United States Patent Application Publication US 2014/0057251 A1 - sequence listing, part 192

SEQ ID NO: 393030 - DNA, 1265 bp, Cannabis indica
attttattatttttcaactccaactctaagacaatagacttttgtcatccaaacttttattactaacggattgcatttttcttaaattttttacgttattttaaattttcttgaacaattattatagttaaattgtgtcattaacatgtactattttacaaccctaaaatatattacttttaaacttcttaaactattaccactacaagattgtgctctctaaattttgatagaaggacacaatttcataattataaaattaacagtttgataacatgaaaattttgaaaacacgatatataataactatagttcatgaacaaaaattattccattaatcatcatctgaataaccatcatatatcgtgtgctaatatatttttgggtaaattagactttagtgtccattacattaatgttggtgcaaaattatccattaaaaatactgaaaaataaaaaataaaagaaagaggttgagtttgaagaaccatcaagtgtagtggagaggagaataataataataatggtacggaaaaacctatatatatattgggggctaatacaataggtattgtaatttttgttaatcaatagggatagtaatttgtagcttttgatttaatcaaatggttcaaattaacccttgaaaactaaaccatcataaatatatttttttaatttataattaattttgaatattattaattacaagttcaactaacaaacttcaaacctaactccaaacttattttttttttacttatttatcttatgactagttataattttcaattagaaatttttacatcaaaaatccaatttacacaatttattacaaaaaaacccctacacgcctacatcaacttttttacttatcatgtttgttttattacaaaaatactacttagtcatcattccatgcacagacacgtgtgctatccccatcactcatcaatcaaatccaactctcttccctctcttttttccttttctttcaatttcattttcgatttttccttctgtttctaagttgtttggaagatcaagtaacctccattgataagcttaaccacccattattgatcacgttttttccctctcgttttttgttcatccacaaaatttcaactcccactaaacccacgatttctcaactgttttccctctcagtttcatcttttttcaaatttatttataagatggcaatcactcgttcatcatcatcaccttctccagttctcaaacaaaaaatcgaaaaatgggca

SEQ ID NO: 393031 - DNA, 680 bp, Cannabis indica
tgcacaaaaacttattgatgagctgaaactaagggtagatgagctgcaaaatgaggttgataggcagagagtgttgatctctgatggagctgaggagaaaagagaggcgataaggcagctatgtttttcgctggagcattatagaagcggatatcaagaacttcgtcaagcctttgttggacacaggcagaatgctgttatggctgcataatatgtgatgttggaagtttctatgtgatgttcatctttgcatggtttgttttgttctaggtttggaaatcctttatatttgttcaatttgaaccttttgatttttgtttgatatggtttaatgtttatgtttagtaaatagtgtgtaagagactgggaaggagcaaaatgtagctaagtaattttattcattttatatttcatactttaaatcattcattgatatattatagtgtgttggtcaaagctcacaagtatagtgattggactttgctttgtactttaaggcctgttttctcatatccaatggcgcagtaaattgaaatttgtagtagtatacaatatcatcccttagtatttggcaaatgaattggagcacaaccaaaatatctataaaccattgagtcagagaaaaccttttgccccgttctgtattactgttattttgtttttctttttttgtttttttt

SEQ ID NO: 393032 - DNA, 1229 bp, Cannabis indica
acatatatagtgtgtggctagctatagttacttcttgctgaaaaacaagtcatgaattttatataattagtcttaatcaataacttataaattttaaaaaataaaataaaatacagaaacatgatgttatattataagtttcaatttaattaattcgattaaagtctcagaaagcaaaatcttatattaattagttttattattttagcctgaacacaataaaacaaagtttgacccttaattttatgaagaatcttttatttttaatttatgtatctatcatatatacaatataatatatatatatgactatttgaagaggtgagcttctagaagatgtttaagtataaaaccctaagatacacaggaagagtacgtccaagtcaatttgctcaccaactcctaaatcacaatcaatctcttatatataagaatagttgtagttaatcttcccacattataaaaaaaaatatttaatttaactattaatcttctattataattttttagttgatttttattttaaaaatatatggtggaatatttattgttataattgtattcgttagttataacatatccttgtaagtttttaaatattttacagtgtcgaaaataaatttaaaatttttcaaatacgcattataaattgaaatattagaaattctatttttggtattgtaaactatttaaaattttttaaaaatttaaatgacaatattgtaactataacgaatatcactataaaaaaaatatatcgatatgtgatttcaaacgtaaaaactgacttagagattgtaatttgcaattctcttaattttatcgtaaaacaattaatgcgatggatagtagttgatcaatcaataaacttgaatatattataatatgatggaatgatcacatcactacataaaaaaaaaattacttgataatttttagtcataacatatattttttgtgactaaatgtaacttttagtcacaataaaaagttatttgtactaaaatatagtatttagaattaaattgtcgctaatttaattttagttatagcaaatattgtgactaaaaatacatttagttacaataaattgtaatttttgttgatttaatcatctacctatacggatcttttagtcacaatataaaaaaatgatgattcatattagtcataatttttactttagtcaaaaaatttattgtcaactaaaaataaaaatttttgtaagt

SEQ ID NO: 393033 - DNA, 1376 bp, Cannabis indica
atacatatatagtggatgctcatagatctccattaataaagatatagatcttccccaaagagcttaaggtggcgtttggttggaggtaatgaaatggaatggaatggaaaggaaataattttttatccaattcctttgtttggttgtattttaaagtattggaatatctttccaatagaatgctctttctaccattttggtagaatgattattccattttaaaataattttttttacacattttaaattccaatgtaacatgagaaagaatttaatgattttttatcaattttttatacattttaaattttattccagtcctattcccattcccattcctatttctattgttgtaattcgagctcaatctcacatgctaggaatggctccaagaacaattcgagaacactcacaactcatagaacataagcacacgcacacacacacaaggcaaaacctttctggtgaaattatatctttattgtattgagtatttacaataaagaatcaaccgctttacagtttagaagttagaggtatttatagactaaatacctctactaacagaatacttaaatactcaagttaagactcgagttaagactgagaagttacagacttaactgctgaacctgttaacaactaactacctaactaattgactaaagacatatggacatgtgtatagaacctaggcatatagatttaacaattctccacctgaactagtgttctgtacattgcaatcttaagtcaattggtagctacatttaagatcttgaggctgtgagagaactttgttgtaggtaaggctttagttagagcatcaattgcattgtcctttgtggagacttttgacagttgaaccttgccacttgagatgatatctctaatgcaatgtagtctgacatctatgtgcttggttctctcatgaaacatttggtttctgctgactatcacaaagtacagtaatgcacttctgattaattcccatttcaccagtgatacctttgagccatactgcttctttcactgcctctgtacatgctatgtactcggcctgagtcgttgagagagctacaatgggctgtaaattggacttccagctaatagtgcagccatttaattggtaatgtaaatccaaattgtgatctccttgtattaaggtcacctggaaaatctgagtctgcatatccaattacattggttcttccttttgttgtctccatatattagtccaacttctgtaggtaccttttagatatcccaggattcatttagttgccgcccagtgctctcttcctggttggctcataaatctgctcatcaaacttaccccacagcataggtctggcttggtgcacaccatcatatgc

SEQ ID NO: 393034 - DNA, 1946 bp, Cannabis indica
tgacaaaatatttaaatttctaagagcttgtaatatattattagacaatcagattcaataatacaaggacaaagtgtaaatattcataatttaactacaataaaactaactaaataaatatatttcttcaataatttctaatgtattagccattggttagtaaaaaaaagtgataataatttaatgacataataaatgaggtagctgagaaagaaatatctcatttaataatttccatgatggttgcaatatttattacattattttaattgaatgtgtaatcaattgtgttctctttttttttatttttttccatttgatagttaaattattttaaacactatttattaatttataattaagaaatattttctcctatttttatagtgtaaacttgttgaattgtgcacacgacaaaattaatatagtccgggatgtatactataactctgagtttatgtattagtgaaatatgcatgtgtgggatctataaacttacattattgataatataagtgtcagtataaaactacatcaaaatatattagtagttaatatttaaagtgaaaagttttttagagtgcattttaaagtatttgtataattattaggtagtaattacacaacataataattctaccatgttataaaatgtaatgtgtgtttggatataagatgttaattatttataaattcctaatgtcttgtttggtaaaatagttactaagtgcactgtaaaacaataatgtttagtagataataatttaaaataaaaaaattttagtaactgcacaatgtaattacactcaattctcatggaagagtatgagaattggagagtgtaatcgaggtctctctattatctataattacacagttacaatgtaatcacgaggttaaacaaacacagaaaaattgtgtagttatctctaattacccctaattcaaattctctcttagctttccaaacgtccccttagtaattacactcaattcttatgagggatcatgagaattagagaatgtaattggaacctctcaattacttataattacagtttcagtgttattacatggtcaaataaacatacaaaatatcctgtaattaccttcaattacatcgagtagtttttcaaacacgttaatcttcgaaagatttagtcttacctacttgattaatttatacttacataccattgaatatttatttcctattaaatcaaccttcaaagatttaatgtctgtttctttcattaatttaattacttatagtagtaactaatagtattgtcattaatggaacccataatttgaataatttttattactattcaaaagaaaaatgcacagatctctatgcttcattataatttataacataaaactaggtagctagtttataattatagcacatgtattgtgtggagatgtaatttattatagaataattaaaattaaataaaaaaaaataatgtgaattaatttagttaaaagactttcacatgcttatgaaatttatttgtatttaaatgacaattaagatagaactgtttggaatcaaggaagttctgagttgaattaataataagagcaaaaactggcataatgtagagcttgaaactgatagtctccaagcaactccaaaatagtcaaaggatatcttctacttgaaattgatttatttgattcaatagaaaaatatagatttattaattaaatttttttctattttattttatctatttgaaattgataaatttattggtgtggaaaataagtaatgtaataaattgatatttaaatttaaattatattcataacttaactacaagacaaccaactaagtaaatttatttcttcaatgttgattatgatcttcaagatcttccaaactactaaatgttaataatttccatatggttttttttcttttttttatttattat

SEQ ID NO: 393035 - DNA, 874 bp, Cannabis indica
aaaatgcatttgatgtctcactcacggggtatttatatctatataggtaaaattaatattaattaaattaaattaaattgatttatctatctgcaatctattaggattatgatttaggattcgatatccttctactataagtatttaaatatctttcgtatatatttctcttttacaaaaagatattttacaaatatagccaaataaattcaaacttttaatcagatattatttgttgatttatgtatttttacgtaggaattaaaactaaaacctaatattgcattaaaaacaaaaaactacctttaatcgtttccaaattattcaagggaaattacccattttaggttcttttgctattattttttcaatttacgatatttatatcacctaattaacacaagtgtagtacataaatacatgattctaaaacacttaagaaagtacaacaaacttgagactaataaaattataacaacaataatataagtcaataatctttttaaagtttcaacaacacacggcctaaaacaaaataacaaactcaaaattaattaaattccaacaacaatataaaattacaactaacatacaagcaaacacaaacttccaaccagggacggagggactttagcccatgtgtgggctaaagccctcactcaaatatatacatcaaattttttatatatagatatatacatatattaattcactttgctcaatttattaaagtccaattcacaaaagccctcactcaatatcttaatcatgattcatgagtctactcttattctaatcaagtccattttaaaagtagtccaatacaaataataaaaaaataatatttattaaaaataaaataataccattgaca

SEQ ID NO: 393036 - DNA, 636 bp, Cannabis indica
tctcaaaatcatatgatcaattacctttcctttattttaataaaattattattattatggctccttctcgaattaggcactactataacatatcaccatatgataattgtgaagaaataacagatgtaaagcaaggatacccttgctttaaaatttatttatttgtgaaatatataattgatataacctcatcagatgttttcacatataatgtacaacttccatttgtgacattattgtatagctattacaacattattgctaaagaagctattgatgacatgcttagtaatcaggccaatcttccttcttattactttattctttcttataaaattattgattattgtcgacaaatgttgactcatcacaactgcaataataatttaagtttaaaagttgatgtgaatatttcttttgctgaacctgaaccaactcgattcaattatcgagatgcttatgaagatctagtattatctctctctgagattggtgttgatgatgatgataatgatgaagatgatgttgataatgatgaagatgatgttgatgacaaagatgatgttaatgatgatgatgctgataataatgaagatggtgttaatgatgatgataatgatgaagatgatgttaatg

SEQ ID NO: 393037 - DNA, 900 bp, Cannabis indica
tacattaatgaaaaaatccctatttaattctcattaaatatgtaaattaaattaaataatattttcacaattaatttatcaaaaataactttataaaatgcatcctaataatttcaaatgccgaaagtaggattcaaaatatttatattttatggacatataaatcaaacttcaaaacaacctgttttaatttttgatgccataaattatttataattttccaaaagtttataaaaggattttaaatagttacaatatatacaatctaataaaaaaaaaataataatctaccatgtgccaaaactacaaaagtaaattattttaaaatttattttttatgggcatgaaataaataatttcgaatcttattttgaaattaaaaattatttaaaattttactaaaactagttagagaaattctaatgtatatgtaatcaaataaaaaatgaaagaaaaatatatagtatacatatactatccattatttgtatcgacatttaaaagagctttttaatctaaattattttcatgatcgtgtacgttatagttatttggaatcacttgttaatttttaaaaaattcagaatagtttataatgacaatataagattcaaacaattatttatcacttgtataagaaaaaacaaacactacacaatatttaaactttattttcgactcctaaataattagagcatacaaaattatgaaaaaaaaaggcctaaaaatattttctaaatgcagaaaaaaaataaaaatatataccaaaacatcctttaggaataggagaattttcataaatatgagaattgaggatatagtttacttttttatggcctaaataaataacactatagggttatgggttttttttaggctaattaggatttttttcccccg

SEQ ID NO: 393038 - DNA, 743 bp, Cannabis indica
ttattggtgcaaatatttcattaatcaatacatcacacaacatgacatgatagcacgattatatacgatatgattatataaattcttatctagggatacttttggtataattgctagtacatttttggtactttcaaattcaataacgtattgtaaggatttttgctgtttatttattttttttttcaaattttatatgatgtgttgggtaactaatgagattgattggttttaacaaaagttttaatttaaattttgagtaatattatgtgcatatacaaataacataggaaaattttattttaaatgcttaaaaaaatactttttaacaaaatttaaactattaattaatttatacaattaaatactattgttttcaatttttaaccaaaataccattccttttgttttccttctctctctgtctttttctcttcctcattctctcttcctcttcctcgcaccaccgagaccaactagacccaggcaccgaaactccaaccaccaccaccgaactttcgttcctccaccactgaacctcctcatctacccaaaacccagaggcccaagaccggttggacctcctcatttatcgataggttgccgatagattattgataggttatttgcgcataaaaatagcagtacaaaaacaaaaccattgataaactatcgataaagtatcgataacccatcgataatcacattttggctggaaagtcataccctccaccaccatctaa

SEQ ID NO: 393039 - DNA, 603 bp, Cannabis indica
aattatccagagtttgacgtgaagcagcagtgagtgtagagtaatatttaatatagattttgacatacaatcagattttaagagttcataataataataatattagaatattgattcaggtacttggaagggccgagcaggaaaataaagtgggcttcgcataagcttactgacttgggttttgcatacaagtatgatttaaagatgatattggatgacacagtaagctgtgcaaagaggtttggttatcttcaatcataataaatcgtactctgcacggatatatatgatttcaagcagggaccatattggactttagtgggctttacggaaagtcttattgggcccttattgtattttaaaacaaattgtgtatttttaagaggaatgttctttttttttttgggagtttttaaatttttaattttttttaaaatactgtgtaaattttatattgtatactgtataagttttatattatgtactgtgttatgtattttactattgttactatggttattttttagttcttctactattatattaattattttattttgttgttttcacggttgttttaagttgttttataaaatatagtat

SEQ ID NO: 393040 - DNA, 1167 bp, Cannabis indica
agaaataagaaagagagaaagaacaaggagagaaagagagtaacctaagagaagagaaaaaggaaaaagaaaaaaaaaaaagagaaaaagaaaggtataaataaaaggaaatttggtaatccatgctaaaaaattagctatggtatttaattaaatccaattattacacataggaaagatattccaatctttcaattttcttccaaaattacctttctttttaactcccatcattctttctaactccattctctttcttctttccctctcccaaactcacggtgacccaccccctccataatcaaactccattcgagcccatcgcacgaacccaccccctctagaaccgaacccacgacgacccaggaaaccactcgacctaagcgacccaggagacccacgatatgcctcaacgaccgacgagacccacaagacaccccagcaacccacgagacaaagctctgtccagtctctgatcacctttcctgcctccgtccacgacaccaactccaacccatgtttgtttgtttttttctttaatttctactttaaattcgcaatctgtgattaaactgaaatgtggtgatgactaaacttgtaattttattaatttttgtgtttggagaagaatttgagtttaaggatatagtttttttgggattttctttgtttgtgcaaaattatgcgatgttatgcaatttttgtgcgattgatattgcaaattcaaatcaattttctgtgttggtattgttgtgcgattttcatgcaatttctgtgcaattatgtgcgataagtcatgacaatcataagtgtttttgtgttcctattggtatgtgatttttgggcgacattttgtgcgattttatttaaacattttactctagacagtgcttgaacaattttaagcgatatgtttgcgatctttgtgcgattcatggttgttgttttgcaattttatgtgttattcgtgttgttttgtgattttgtgcaatttataatccaagtaatagtcatcttttgtttgtaaatacagatggctctagaactcattctcccattggctgagcattttccaaggcgtatcacctatagagggaatgcgtactttgtttcaataaaagctaagttcgtagcctttaacttgaccgacaaggtgaaggaaactcc

SEQ ID NO: 393041 - DNA, 1157 bp, Cannabis indica
ttattattaaatgaaaagaaaaaatagatttataaatcattttctgtgttttgaactataaaaattatatacaaagcagctgaatatgcatgctgatctagctactactactccatcaaagaacaaccaccaatcaaattaaaataatgatgataatttgttagaacttaccaaaaacaaatgaccacttgcttaaaattaattaaagtcaactagttttgatgtaatttacaatacaaccaattatccagtgggattgacattagaagaggaaatatataaatatatatatatgtgtgtgtggttaaatgatccattttgttgttagatcatagaatccaatatttgctgagcaatattgaagaattaagaagatgggagatgctgttatttcatttgtgattagaaggattggagagttggtactttctgaaactaaattcttgtatggagttgaaggccaagtcggaaatgctcaaatcgagcttcaatgtatgagtgctttcttagaagatgcagatgcttatataagaaatggtgatgagaaaattcttatgcattggaagatgttattgaaacctacgtcttcaaactggcttctaataatcatggaactatcagatgtgtactgaaatggtgtgttggcattattgatgtctacaaagttggatcaaagataaaggaaatcaatagacaaggcagatgaagcttcttcaagctatgtcgaaaagcaaagacagttgaggcaagcttattcttatgttgaagacaatcatgttgttggattcgataaagatatccaagagttggttgcccttttaactgaaaaagagaaccctcgtaagcataaggtgatatctttatgcgggatgggtggtttggggaagacaactcttgctagaaaggtctatcagcatcctcaagtaaggactcactttgattgttatgcttgggcctcaatatctcagcaatgtaataggcgtgatgtattggaaggaattttatttggtttcacttttcccaccaaagaaagaagagaagaaatcaaaaacttaagtgatgttgaattagcaagggagcttcacaactttcagaaacagaataaatgtttggtggtccttgatgatatatggaccccaacaacatgggatcttcta

SEQ ID NO: 393042 - DNA, 912 bp, Cannabis indica
gtatgagcatgactagtcacgaaaaatataaggttcgacacaatataatacaaaaaatatgacatgataagtctaaaatgtacgacacataagtacaaacaaactaattcaaaaatgatacattaaaaaaatcttgcaatttattagtaataatagtaataataaatatgtatttatcaattaaaaatatttaaatgattttatcaaatataacacaaaatattataattatgtaattaaaattactagaaaatataaaatataaaagtaaaattatatattaatttatatgttggggtaatttaaaaatttaaaaatttaaaaatttattaataaatatttaaattcttataattataattatttatttacatgattatatgtaaaatattgttgaaatattatataaaaaataattgaattaaaaatacatatgtttagtaatttatctcattaactgtaaaaaaatgtagaaaaataggttgatttattttttaaaaaaaagtaaactgtcctagtaaggcacgacatgaaagtacgagtcctatgagcaatgcagagcctactctttaaaaataaggacaattacataaaatacgatttttggtaagatttttatatttttacatttagaggtatttttacggtattttataaaaacacacaaaaaataataaaaaaaaaatcatggaagtaatagaaaaacaacaattaaataacattaatgtaacataaaaaataatatacaaataataaaaatcaacaacaaaataacaaaagtacaacataaaaatatatcaaaaaaccgtattttatgtaaataaaattttaaaaatcataaaaatatttaaaattctataaaactgtatttttataatttttatttttatttttttaaataatcccttaaaa

SEQ ID NO: 393043 - DNA, 485 bp, Cannabis indica
caaataaaatgccaaataattaaatccaatataaatttcgggctcgaacccggttcggtccgaaatgcccggttgtgattataccgcgccaacctgttagaacacactaaatagagtcactaaatgtccaatttgtagtagtgtgtaaaatctcggccccaatttttgttaataataaggttagttcactcttggctatggatggttcaggttgggactcaaaagttgttcgtgatctgtttaatacccgtgaggtttcactactacaaaaatatagagttgagtgttctgcaaaatgaaaatatatgtgacttaccttagttaatgattttttttatatataatacttaaattaaaaatatggcgaactaattaatataaattaattatacaaatggtaatttgtcacttcatctaaggttaatttagcaattataatttttagagagaaaagtagtgtaataatctttttatatatatatata

SEQ ID NO: 393044 - DNA, 1213 bp, Cannabis indica
tttttttaaaaaaaaaaagtatggaggcaactgttattaattataaaatgtttcagttgactaatcaacagtataatacatctagaattttattaaaaaaatatcatgatacattcgtcataattaaatgcataacagtgactattaaaataattaagaatattctacatttctacatataattggaaagtctttatacctatactggaataaagtttttcagttaacacttacaaaaattataatttccaaagataaattggaaagttctctttcatgtagtataaataaaatatgcttcatgaaaatattaattatttcagcataattataatcttttagtcaatttttacgtctgaaattacatgctggaataattttatttttttttcacagcagtattcgatataattacactattatattcttgtaaatttttaattttttttgaatagtttacaatgtcgaaaatagagttcctaatcatatatattttaatttactatgcgtgtttaaaaaacttcatacgtatttttgacactgtaaattattcgaaattttttaaaaatttacaagaataatgttgtacgcataacaaataccgcagtgaaaaaaatttgaaaaaaaaaaatttcagtatgtattttcaagcacagaagtcaactaaaaagttgtaataagaagttaatggtatcacttctctaattatttttttgttgaataatttcgtttttttttaaaaaacaattattatttttttatttctagcacataaatatgttataattcattttttttttaataaacgggatagtaaaaccatatatattttagagaaatattaataaaggtgtaatattattatttgtgtaatttaatatttataattgattttatatattttcctttaataaaaattataatgaattggtaactgatatcacacaaataattatatataactagtaaaatattaataaatgttagtgtgcatggcacataaatatgaaagagacatataatattttatatatatataaataaatttataaagcttctttggggaccatatgaagaagatgacttgggattcatagggaatttgggggcttcgatgggtgatcatcatcacatgctcgattatgacaacttccactgttacccatactgcaaaaggtaaaggtgttgctctaccatcaactactccccctcg

SEQ ID NO: 393045 - DNA, 846 bp, Cannabis indica
agactacttgtaaatttttaaaataaatctagtagtttaccatactaaaaataagatttaaatattatattgctcgcgctactattttttcttatacgtatagtaaataattgtttaaatctgattttttgcagtgtaagttatttagaatttttttaaatttacttttgatcctaaatagctataatttgtagctatcatcatacaaaaaataattagagtaaaaataattatgaataccaaaacagataaaaaatgtacaagaatgatcctttataggggaatactacaaaaattccctttaatttatattaagatcccgtttagtatacatgattggattggactgattggattataaattaggatttgattgaattagatatattagtactatgttgtgttcggtgcaaaacaagactaaaaaaaaaattataaaataatcttcttataaatgcaaatagtattttaaattaaataatatgtaataaaaataacaattctaaaaattatgtaaataaaaaatattgcaatattttttttttataatagatataatattattttctaaaataaaatgaaaaatatatttttttaataatagaaataaaaagggaaatttacatgatatactaacttttgctattttttttacaaaaatactgtcaggcggtattttttacttttttactgtatttttttataagtttcatactgcagtatactgtgttaagttttcactgttgttttactggtgttttgtagtttttctactgttgttttgagttgttctgtttgtgttttactggtgttttataaaaatacagtttttttgaagaaaaaaaa

SEQ ID NO: 393046 - DNA, 691 bp, Cannabis indica
ttagtgttatgggttgtgggtcacattctaagtttgtatattaattattatattataaattatcattctaatataattctattttttggtttggtattgtgatattttttcagtttcgctagctttggtgataactattattaattggaaggtgtttttcaagagatgggggactagctatttgaagacgttatagctttattgtctaaatttccgggggcagttttgtcacatgtagcttgcgatatgttttctgtagctcatgatttggcaaaacatgcccttcggttagacaataagctaccctggttcgaagaggttccaccgccaatcgtgattaatcatgtgtgactcagttcaccacgtcaaaaaaaaatatatatatataatttaactattataattaatatatcaaccaaataccaaatgtaacacaaaatatatatatatattattatatattttaactaaatcaaatgttttttagaaacttaaataacataggatatttgtagagtaaatttcataaaagttcgttaaattttctatctattttggtattaaaaaaaaattagtctatttttttataatcgcgtacactatagctatttaggatcattagtaaatttttagaaaatctacatagttcacagtaccaaaaattaaacttaagcagttacttaccacgtgt

SEQ ID NO: 393047 - DNA, 645 bp, Cannabis indica
agagagagagagaatttggagaggaaaagatgatttacttgatttcctatctatttggataaaaatgaataaaatatttgtatttctagcttaatcaaatagaaataatcagattattaatctaattatatcgctaaatacaaatgacaaaatacccttcaattcaagcttaactagaaaagtgaactaagggtaaaatgatcatttctaaaactcatataatctcgacattccaatgtctaactatattgtctcgctactacaaaaataccaaaatatgattctattggtgaaacgccgcgttccaatgttgaggggcacaaaacatgcaaaaatataaaattccatatatagcataaacaatacaccctgaattcaaataaatctccataaaatgataattcataattaatattcaaatttcataattaagtcctaattatctgctaattccaaattaaagttaagcgatttttacactcattctcatccaactcaaataacatagttttcatttttttcagacaactagaaagtgagagcctccttttgtatttcgaattcccctcttcttcgtcatcatcaattttgagcaattagtgatagagtacatgcccactcatatcaagtcaagtactcaatcat

SEQ ID NO: 393048 - DNA, 1402 bp, Cannabis indica
atcccttcccgaactatgagctgctaaagtaagcgagtcacatgggacaaaattgccccaaaaaatttaggtagtaaatctataatgtaatcaaacaatgcatcagaagagctagagtttcagcttgtaatccttaaatattacttgagacttctcaaaaacaaaacaaccaaaaaaaaaaaaattgcattagaatggttatctacgaacaaaataatacatcaataaaatactaagttctaaatctctatcacttgattcaatcaaataaaaccaaacctaatgaaacaaaattacacaaaattaaaaactacctagccaaaggtgttttgctttggctacttgagaaccatcaattgacaaaactgtctgagaaatttagacaatatagttataagaacagtagctagcaacgctacacaactatcatgacaattccataaaatatctacaaagcagaataaaaataaaagatgacttagcatcataataatgatattaataaataaaccgaaaaagaaaattctcaaaaatttatataaaaacatctctccaacacatttgattaaaaataaactaataggcaaagtctccgtaatcataaactttcccaaaaaaaccccaaaataaaataaaaaactctattcccacaatttaataataaaagtagataatgtcaaaaaattatactaaaaataatccaaattataatatataaaaataagaaataaataaaaaattaaattcttatatgttaataacagaagaaatgttgaggtagaagccatgagcacaagatgagccagtagcaataaaatagtctacaaaatggcctcgctctagttacgacaatgacagaaatccccaccgtagcttcaaagacatgttgtgaggaccaattctcttggccatggcggttggggtcatcccccaaatttaaatagaccatacagaaagactagtctaaacaattaggaccaaagccatagttattagtatacaaaagccttgaaaggcatcaaaagtatctaacctttaataattattcataaattctcatgatgcaaaaatgcttccaagtctatactatcaaattgaaaactacaccttaaaaattacaattaataaataaatcaacttaacaatcttcaaaagctaataaaaaaaccattcatattataaaagaaaataatgtgttgaccttgtttttagttaatgatgtagaattaataaaatgataatataagtatttgaataataaaaataataaagaactgtgagtatttaaaaatataatattgtaatgatgtaaataaattatagaaaagctgatatatgatatattatagatatttgatgtaaaatagagaaagtaaaattttaataatatattttaaaagat

SEQ ID NO: 393049 - DNA, 823 bp, Cannabis indica
aatttgagtttgtctgtccagggaaacttgatttgtatcaaatcatgtcctaggaagagtccaaaactatagctagttaacagtttgatgaaaattgaggagtaaattaggtgtgatttaatttggttatcatttgttaccaattaccatatcaatgagcatgttgcttctaattggtaggttgagaaagcacatgatgctgatcttcactgtgttgattggagtccccacgatgataatcttattctaacagggtatgttcatgtgtcacgtttctttgcattctgatgttttgataacctcttgagtttgattatgttctcaatgtttctctgaatgttatatggtataatatctcttcagatcagctgataattcagtacgcatgtttgatcggcggaatctaacttctggtggagttggagcacctattcataaatttgagggtcacaaagctgctgttctttgtgtacaggtattaattatactgtatattttgtttgttctgttttcttacattttgcaggaagggctaatgtttatcgttatgtgctcaacatttttaaattccagtggtctccggatagatcatctgtttttggaagttctgcagaggatggtctcttgaacatttgggattatgagaaggtatgcaatctacgcttgtgatttcaagtctttggtttgtatcatagatagagtaggtctgaatttttatttttactaatatgggtataatataaaatatctttgcatatttaaccctgctttaatttttcttttttttttcttgtctgttctaattggagtgtgttgtatgaat

SEQ ID NO: 393050 - DNA, 789 bp, Cannabis indica
ataagctatattatatttaagttcaataaggaaaaaataaacatagcagtttaatctactttagggacttttaattgcaaattaattattacaatttaaactttcttagacttttagagaaagctaagtttgagaatataattcttattactcctaaattaaaaataaaagttacaataatgtgcaggcatatacatattaattaattagcttggtcctattactatttctttttcttcttttattttttgttatataaataaataaaatatgatatatatatatatttaattttttttaatggtatatatagcttatttaacatttcattcttagtatatagagataaataaaaagaatatatgaataataattaatcatgagtgcgcatttataattttattttttttataggatcactattgacattgtgtaagaagaaaaaagattgataaaatattaatgtttattgaaattgtcttcatattttcatcttgatttatctgtttatttaaaatacatttttggaatgcatatatcaccattcataattaacttataactcaatttaattaaaaaaaacttttaaaaatatttttaggaaaaacatatgaaaacagaaaatcctataatatataattatatatacagattaacaaatattacaaaaatatttctagttggccaaataaacaaatatacagttcaaataaaaaaaattacataaataccacttccacacactttaacccagaattcatgctttctaggcaactatcacgcaaccat

SEQ ID NO: 393051 - DNA, 1146 bp, Cannabis indica
ttgaaacatattttttttttttgcaaaagaaaaaaaacaagtctactaatgtatacatacataccacatatataaagcattcctcttttctgctattttattttattttcataaagcagctactttttttaactaaaaaaaatcacatatatacatgtatactaccatattatgtaacctctatttatttaactttaatcttattggccgaaaaaactacctcatgacatggtcatgaggtataaactaacagtcctacagtaaaaattaccctatgtatttattatcatcatccataatagtggtgcttgactctcaacatggtgtattattgtttttcatatccccttttattattaaaatttcacacttcttccccttatagttactctcctggattgttagaatatttgatgtgaattaacattattaattgctcaattcatattagtattaatgtataatgataactatataattagtaatacatggtattatcattggaccataatgagatagacataatatactaagatgctcggaacccatagacacgttttaaaatatctttggttagcctattgagccaaaacaattaattctctccaattggacatctagccccaattaactcatagtctctaataataagaatatatgccgttatggtgaaaagagataggtgtgaataagggtgttgagagaatgatagagaagtgttcgtcaaacccttacacactttagtgtcatttggtaatacttttgtttttaaattttgtaatcacaaaaataaaagtaaattttttatttttgaaaaatataaatgtgatctatagccacttttgtttttcaattttagaaataaaaaacaaaagtgtgtttttgcaaatatgaatttcatttgttaattttatttaagttaagtttgggttcgggtatggggtcggggccggggtccgggtctagcaccaagtctaggtcacaggtcagtggtcctaggccaagttcaagtttgagtccgggtcaggagtccgcgttcggggtctgggtctgagtctggggtctaggtccagactggggtccgagtttgtgttcggggctagggtctatgtaacaccctaactaacataggcgtattacgtgatt

SEQ ID NO: 393052 - DNA, 677 bp, Cannabis indica
agcaagactttgaaggatgagagaataaggaagggtagaacgctagggtaaaacttaagataaaactttcaaggttataattataaatttattgtcaaatttttgataattaggccattttgctaaatatttgaaaaagaggccattttaaatctcaatcccttactaaatgttgccttaacaaaatgctaaacttgatctctattttaagagttagacctcacaaaattagtaaacataaattgtgcatgtgctgccaagctttagcggccaaaaaaaatagttagtaattagcctttagagatgaattctacccaaataactaaaagatcttattcaatatatatatattttaaatcatttgaaataaaataaatatataatacatttacacattcaatatctagttgcacatttataattctatacaataaaaataacaaacaaaattcataaaaatatacaatttcatcgcatacaatatattagaggtgttcgcggtgcgggtggtgcggtttttaaccattttttcaaaccaacccgcacatgcggtttttctaatttttcaaaccgcacccgctccgcgatactaaaaaaccgcaccgcaaaaaatgatgcggtgcggtgtggtttttgcggtttatgcggtttgaactatcacaaattttttttttttt

SEQ ID NO: 393053 - DNA, 1081 bp, Cannabis indica
ttattcattaaatgaaacgattttctctttcccagtttttacctgtctgcttgatatcaatcaatgtaaagactctcaaatctaagagcactaaaactagaaaatagacaaaataaaatacatttacaaggttgggtttagtccattatgtaaagaatcctaataaattgagcatggtttgcttttttaaataggcaggtggcttcaacaagcccaatgcattgtttttttcaatttacaaatgtagtgtattagttagaatgatatcttggcatcattttattgggagacaaaaagttgaatgataatgtttcttctggatagaagtatgaacttttagtgtcatagatcaaaattgttataaatttaccttacttacataaacaattgatggcatgctgattttttgatgagctaaaatgacaattccgattaatcagctgtcaggtacttgttatattctttttttttttgaacaattatatgtgggagtgtcattttattgttggaacaattaaaatgccaacacattatctgttctttaaagtgttaattttagatttttcttttaaaggttagacacatggctaaatattgaatgacattcgcatatcttatttgccaatttcaataagatccttttggtcatatgcagaaagagttgatgtgtagatattttagcataatatgagatataattagattaattttatcaaagagaagaggaaattatatacgaaatcacttatatgagagcctaaaatattgatgtggttgttctgttagagtatgatgtagctatttttattacactattctcgatctattaattgtttataattgcagtttattatatggggttttacacaacacttacatcaaatgagagagttgttgatattctataaagttggttaagagtttcaaagtaaacatttagacttttgtgtatgcatttgaatgttgaatgttgttattggcaacgtaaaattttttggattagtatatagtaaaaattgttatttattatatttattaaggactaatatttataaaaaaaatgttacattaaatttataat

SEQ ID NO: 393054 - DNA, 724 bp, Cannabis indica
tgtttttagcattgtgtggattcgatactttatttgttcgtatcgtttccatctcatctagttttcgtagttttttagggtttaaactgttcataatcgggttcaggtaatatgtaggttgttttaagatctccaactcatcactttctggtttgataaaattctctccgggattgggactgctttttactggtagcaatgtcccactctggttcggtaatttatcgtccaaaggttttagagtttgagttccctacagaatcaaccatcccatataaacctaaccctttaaaacctacctcaaaattagagttgaccgattgaaggattaggtacatgaagtgaaagcccaacaggaagatatcggtagtcattataggcatttcttgcaagagatctcagaaggcaaacgccgattcttgggagaagtagcctggccagaacctcccagcgtgtcctttactcctgtggcaaagctgttgtttttacccagcgtcacaattgaatttgaggtaggtgacttggatttcgaaataatgcctcccaagccacgtacatctaaaactcttcaggatcctaatgtcaccttgaaggcttagttaatagaatcgagggtgcgatctctctcaggctagacgggcaagacgttgaagatctgcgaaattgaaattgggcaataaacaatcatgccaagttagatcagtgcgagagggtgagttcagct

SEQ ID NO: 393055 - DNA, 817 bp, Cannabis indica
ggtgtaaattttcctttcaattatttaatatttttcttcacatacaacaataataaaacaccagtaaaaaaatatatgtttgttagttttttttttttttttttgtcctgttatgatttaggtgtccttttattatcgatatccctaatttacaataaaatgcaggttattaaccaataatgactctagaacaacgttgaattttataatgtgaattattaatcatttttgttttctcagggataatgtatattaatctgcattttctttaatctgacatgtatatttatacattttcagtttctacttagcaattttttacgaattctgaatctaagtttgggcatcatttttaatttcgtgtttaattgaatttgggtgggcttaagtgtctgacctctttgtttcatttaatcctggccttaaattgatgaagatgttgggtgttcatttgtcatcattttccttttttattcaatctcgctggaattagtgagtgttttcgtgtggctgtggttgctatgtctgtcgctatggaagatggaggcaccattcttgctattttgtgtataaagtataaaaaaaaaaaagggggggggggggggggggggggatttttgccatgagacagtagtttcgtaaatatttagccaaaattcaatatttttgtaagttctcttatttataattacaccctgggccggtgctacctggtccatcatggtcactgggctcacccttaataggaccatttctttaaaaggaaaaaaaaaagggctatttacaaaaatatgggaaaatgaagataagttttgat

SEQ ID NO: 393056 - DNA, 563 bp, Cannabis indica
taatataatagtatatatacatttttataatatacaaaagtacttgtaaaacaaaataaattatacaacattagaaacatttttttataatttaaaagaaaattaaattaatatatattctttttataaaataattaaaaaattaaacatgacactaaagataattaactaatgaatgaaaaataaatatataaaaaaaaattatttaaccttggaaacttaatattgtcaaccacaacgaattaagaacttagaaatcaatttagtaaaaaagaaatcttgggcataaatttgtccaaacttatatgattagagaccacttgtcaagttaaaaaaaaattaccaacaatacaaataaaaaaaaatagaactcttaaatcttcgccaacacatgaaactagtagagttgcttgtcagatcttatcgctaatatttagggtctgtttggaaacaaatgtgtaattactatgcagtgcataattactatgcattgcaattactagggtagccctagtaattacactgtatagtaattacattgtattttaaaatacaaggtgtgt

SEQ ID NO: 393057 - DNA, 557 bp, Cannabis indica
aacgacaataatcgtaaaaaacgccaaattttaaaaacgacaataatcgtaaaaaacgacaacagtcgtaaaaacgacaatgattagaaataatggcaacaattaaatgaaacgaaactcatgaaaccggcgatttatgaaatgataataatttaaagaaacgacagtcatttttaaaaatggataaaattttttataaaacgacaaaatttacaaagcagcaatagttaaaggaacacgacaacatttacaacaaaagacaaggttgctcattcaatatatttatactttctactttttataagaaattgggatttaacctttgttaaaaactagttaaaagtgcacaaacttttttttttttcaccaatattacttaattctaaaatgagatgatattttttgaataattaacgatttttattataattattaaactaaaatatgtgtgatgcagtatgacatttaataataacaagaagaaaatttgattttttatgcttacatttggttaaaaaaaaattcctaaacaaataataactaatatttgtaggata

SEQ ID NO: 393058 - DNA, 753 bp, Cannabis indica
gatcacaacatgaaagcctacgagaaagacaagggaaatgttagtgagacaataaataataaggtcacccttgacaaggtactaacggctgcggagaatgccgttaagattgtcaaggttaggaaagatggcaagggtgacttcgagacaatcacagacgccgttaaaagtattccatcagggaacactgggagggtgatagtgtggattggaggtggggtttaccgtgagcatataacggtagataggtccaaatcatttgtgactttttatggagatgaggataatgtgccagtaatcacgtttgatggcactgcacaaaggtttgggacttggaatagtgccaccgttgcggttgagtctcactactttgttgctgctaatattgcttttgtggtacgtggattaattaatgatattatcaatttaatcaatcatattatttatttgatgacaattatttcgaaaagtaaaaacataccgttaatgttttaggtgcatgcagtttttctgtttttagataaaagtactgcaagattgggacacaacacatacggaattcatgactaagcatatgtgagtgttcatgcatatgcttaggcatcaaataatcatcatcatgatcatgtatatatatatatctctatatagggacacgattttatcacgactttcacagaatgtatttcgtagtacattagatgagtctcaagcagggccggccctgacgattagtgggccatagaaaaaaaa

SEQ ID NO: 393059 - DNA, 690 bp, Cannabis indica
gttgaagagccattccatgtatataactatatagtatatactcttaaatcttaatacacaataaactacaaattattcttatataaaaaaaattaaactacaaattattcttaacgactttgaattggtaagtaagacgtacgtattgatctttatcatgtgaatattacatcaacttttttcttctatggacaattgaccctagagtttggaaaggctttgctttgaattttatgttgatcgatcttatctaacatacaagtttttaccataaattatcataaattgctaaagtctatattggataagggaatattgaaagtccagctagcctaaaacgtacgtgtaattgagttgtacaaacattctattctatcgacgtacgtaacaatataaagggattaataaagtgatattggttaaagactaaaactttagttgacattttaaaaataataataataaaaattgttcaaatgtattaattactcaattaataagcttaaaaaaaggtcggtaaattttgtcacttttttagaggacgcaacattttgatagggttgagcccgaaccagggccggccctgaaacaaagtggaccacaggaaaaaaaaatttggacccttatgttagaaaaaatgtggtatttttcaaaattagtaaaaaaattatataattttaaaagagaaaa

SEQ ID NO: 393060 - DNA, 1619 bp, Cannabis indica
tctagttgtttatttctgttcttactctgtcctagaggttgtgaagaactacttgactgaacaagagattggtcttcgggagaagacttgataaagccttacttcgggaggaagtaagcacttggtcttcgggagaagacttgttgaagccttacttcgggaggaagtaagcactcacacttcaaagacgaagggagttcgggcttgaaggtgtttcaagaagtcagattcataaagtggattacaaaggattgcggcaatactttagagggagtctaaacttgtttaagtcaattgtctttgtaattttgatactttattaattgatttcattctctgggcgtggccccgtggactaggagtgttcgtgagaacactgataccacgtataaatctcttgtgtcaagttatttatttttctgcaaatattttatattctgcctgttctgttttgctgtagcagaattactttctgctgctgcaaacgcttacagtttttatattttcttatatacaactgacatttgcaaaaacacggtttttcaatatatacaattttattaaaaatatatatataaatcggtttaattcagtttattcgggttaattgggtggtttagaataatttgtaaactgcccaatatatattgggcggattggatttttattgtattatttcgagttgtattttttgtcggttttattcggtttggtttgggcggtttgtaaattttgttgaacacgcctaacaaacacaactaaatcaaacaataattactaaagaaattacatacccattattttttgaagaaaattctttctaaaaagttttgattccaaggttgtccaaccaactccacagtaatgtaaggtggtcaaacaacaatagctccgacgacgggaggtcgtgactggtagagtgtgtgtggtgtgagtttcctagagagagagagagagaagagagataccagagagagatggaaagtttggtgttttatttgtttagtggtaaaattggatgaaaaatcttatccaagcatattttacatgatgcaaaatagggtagcatatttttagtgagtatatttattttaagcatataatgataaattttcatgtatttttagtttaatttttttaaaatatttaaaatttatctatgagttaagaagtgcgtttagtattattatgataacaaaagataagaaaataaatataaatccttggttgccttttattttccactatttatgttgatatgaatagatctacacatatccttatttttatgtcaatgaaacatgaaatgtcttgattctgcattttttggattttttttgcgagtttagcgatcttttacaatgttgttagcgatatttagcaataaaatagtatgtgggaggtcaaggatgaagtttcacgatatgtggtgatgtgtcgcgatgtacgtcgcggcacactgcagttttgtgtctgttaattttatttttgacatatttaattgacaaaaatattttattatttattgtatatcttcggcttgagtatttaaattagtgtccatattttgtgtatctaaatttggaaggaaagttgtctagctttcctatttatgaaaa

SEQ ID NO: 393061 - DNA, 719 bp, Cannabis indica
taatttgattgagaaaaattcttctatttttttgccttggagtcagagccattaaaagaggtcggtattagaaaagagattcttaaatgaattttaaggaatctaatcaagaaagggcaactgcctcatcttaaatttttagcacttatataatgtacatcctatatatatatattttgcatgccaaatattagtatagcccaaaaatttatcctatattattttgtatattagtgtcaaacgttgagagttagaatcatactctagctttttcatattataacaatatcatttgcttactttaatataaaattagagggtaagtctatactatactacttgttgaataaattctacttataacgagtctttatacacttatccacatcagcatacaacaacaacaacaattaacagaaaaacaaagactcaatcttaggtagctttgtctctacaagaccaagaactaggagttagttacaactgattttgtacctaactcccagatctgatcaaccgactccaacacagtataaaagcagtaaatcaaaggcaaacaaaatacagaacagaaaaaaagaaagagtagaagtgtaaaccctagtttaaagctccatttccaagatccagagagtgcaggtccaaacagagagtaaaaatctcgtgctaaggaatattagaggaggagaagttcatgcacaaagaagaaaacaaagtca

SEQ ID NO: 393062 - DNA, 722 bp, Cannabis indica
gcttactggagtttccctatgatgtgaggtgttaacttaacagtgaattcgttgtactactatcaaatcaaatcaaacgaaatcaaaccaaatcaaatcaaataaaatgtatgaaagactaaaacttgtattgatttggttgctcattcatccattcattgttagatctgagatggaatcttgtacaaaggagaattagctaaagttaaagttaggagttgtatatgtattatgtatatatacaatacatgaaaaggtaaagttaggattaaatgattatagaatggaaatggacatagaaaaaagaggaaccttttacgttggaattgggaggtgagtgaggagagttgcttgccgacagccgaagaagaagacgagagtatctctgatctgatctctctgttattattacagttgaagacgtagacaacgtaccaatttgggttgggcttctttatttgggcctttttcggcccaattacagttcttaatcaataataacatttttattttatttttggttaaatatacagtatatgggaatttatgaggtttgtttgctaatttattgtaaggggttgtaattagcatttttcaaataatttaggtccatttattagggtaggactgatgaattataagaaaagcaacatcatgcattattctaaaacatatatataattattattttatgttatattattttataatataataagtgt

SEQ ID NO: 393063 - DNA, 1010 bp, Cannabis indica
tactcgtctgtaataggtagtttgatacaggctatggtctgtacaaggctagatattgctcatgcaattggagttgttagccgattcctatcaaatccttgtaaggattactaggaagcagtgaaacggatattgagatatctatgaggtacttccaggttgtgcttatgctttggcagtgatgaacctatccttgatgggtacacagatgcaaacatggttggtgattttgattccaggaaatccacttcaaggttcttgatgacatttgcaagggaagttgtttcattgcaatcaaggttacaaaaatctattgctttatctactacagaagatgaatacatagctgtaactgaagcttgtaaggaagctttatggatgaaaaagtttccgtaagaactgggcttgtagcaagaacgatacattgtctattgtgacagtcagagtgccattcacctctaatgaatcggatggaatgataaaattgaacttatcaaaatattcctcttggaatcaattgatggaagatttgctttattgtaaaaaattgtacaaacctattaaaggtagtgaaaagtcgtctaagttagatgatgaggaatgtgaagttcaacatagaaaagtcattgcctatattagacgatggatgaatataaatattcattagcatatctctaatgaaaccagagctaatgttgtttggaaaaagctagaaaatctctttgcgaagagaacgattggtaataaaatttctctacatagaagacttgtaaatttgaagtacaagaatggtggtagtatggttgagcagacaagtcaatttcaaagtccgaaaccaattagttgccatgaagatgaatatggataatgaaatgcaagaatcattactcatcagttctttacctgacaattggcaaactttggtggtagcggtttctaattccatgctagaagggactttgactatggatttgatcaaagatagtttgcttaatgaagaggccagaagg

SEQ ID NO: 393064 - DNA, 944 bp, Cannabis indica
aaaaaaaaaaaataatatgttcaataataatatgaacctcaataatatgttcaataatattacattatgttattaaatttccatgctcttagcgtgtgtgcctttcatattattattttatggatcatatattaatatagtgttgaattaataatagcaataatatatcactacatgaaatctaatttttaatcataataaaatttataactaaaagtaaaaaaaattgtaactaattataaatcactattccttcgttttgactaaaacatccataactaaaactattagttacaaaaatcataatttgttatgactaaatgtgtctttagtcacaatatttgtcgtgactaaaactaaattagtaataacttgtatctaaatactatgttttagtcacaaacaactttttattttgactaaaagctacatttattatcaaaaaatttatgttgcgactaaaatgttgttactaaaggtagaatttttttgtaatgtataaaggagcattgttatcggccggcaccgctagtgcctaacactttctatatgcatgtagcaccttacgattagttaacgatattcttaaaaaactattttcttaagttatatgagactcgatacttaattacaccaacaacagtataacaccaaagaaaatactagacacaagttaagtagtattttttaacatttttcaataaaaagatctacttaccaactaccattactgtagtcgatctctccatgacccaagttccaaccaatctccattactatatgtaggaaataatggcaattccgaaactgccccctacaccaacacccaacagtcataaagcaagggcataatggtacttttctctttgtgcggatccaaagagaatattctctctcaaaaaccgaatatgcctttaatatcagatttgctttttcaaaaaaaa

SEQ ID NO: 393065 - DNA, 1518 bp, Cannabis indica
tagagatgtgaagcttactgagcagattgaagtgtgtatgagtgtttgagtagagaagagaagggtgaagccctactactgtgtccacactcacacacacacacacacaagagagaagagagtgtctctctctctttttgttttgggtttgctttgctttgctgtttgtattatatatctatatttatatatatactaatcaattccggctctcgtcgttttccaacaaaattgtcgttttcctttcacaaacctactgtcgtttatcaaactaatgtcgttttccaacaaacttgtcgttttcatttcacaaacctactttcgtttatcaaactaatgtcgttttactcttcctttggcggtgctgtcgttttccaaatcttaccccattccttcccttattatttttttcctttataataataaatgaataataagttagttgtggggctcactagtttttaatatatggtggtgggtagtactactactagtaggtagcagtaatactaatacgcatcctatgactattatggtgtggcgatgcgagttgtaatatttttttttaaaattaaattgtataggaaaattctacaatgtacccccttaaaatagatatattgatgcacctctatttgttttagcatccgaactaattttttagtcaaattttttctcatggtcatgtacgttatacttatttcaaacatcctgcaaaattttaagaaatttggaaaagtttaacatgccgaaaattatgttcaaacagtgtgttgcacgcgtgactattttattttatacgcgtgtaaaataaactgtttgaacattattttctatattgtaaattattccgattttttcaaaattttgtaggatatcttaaatagctataacgtacatgaatatgaaaaaaaattagactaaaatttttttctggatgccgaaacaagttaagggtgcactaatacatcccttttaaggggtgcattgtagaatcacccaattgtatatgtgatttttataattttttaaattgtaattgcaatatgagatcttaaaattataaaaaaattatattgcgaaaatatagtatggtacaataaagtttaaacaatctatactatcattattatcgactgatataataaaaatttaaaaatcaatctataaaattttaacaatacaaaaaaaaatctcattaaaattttaagatcataactagtcatcaagttattatattgaattatctcaaaaaaaaataatataatgtatacatatattaaatatatttatttttatgtaaaaaagaaaaaaatcatattataaaaattagtaactttataatacatactgcaattattagatttcaaaccagtaaattgcattgcaccctgcggtttggaaaaaatacaaactgcaaccatatcgcaaaaaaattcaaatgacattttttatgcgatatagtgcggtgcaggcggtttgtgcggtgtgagcagtttgatgaacacccctacctcc

SEQ ID NO: 393066 - DNA, 945 bp, Cannabis indica
aaataaatgcattacacaaaataaaattacgcagtcctaactttaaatactgggaagaggaaacagttacagaccctgagactaggaaagtggaggattgatctattttatgttttattttaaaattttgtttattaatttaattagtttttctcaattaaatgttgaaagttgttatcagtcaaagtcaaagataacagaaagataacaactaagagactactattgccgccaaaaaaaaaatctcattggcattaaattgtaacaatttgaactacttaagaattaagaaaaatgcaaaaagtgtttaagataaacctatgtgtcaatattgctatgggtccaactaaatatcgggtctcatatactttaatatatttacttttaaaaagtataagtgttagacactagtaatacctaatagcaatgctcatgaattaatgccccaaattttctatttaaataaaagtaaccttgtaaagtgaaggtttaaaagcattagtagtggtcaccatctattcaaagaaatgttaaacgaacttatacaatctaatatttttgtgagatataatattattattagtataatttaatatcggatcctatttattttacttttaataaagattatataacctaactgttgaccgaggttttcggcaaccaattaaatagtagaatgagaaaagttgtaggaaagtttaatgcaggtgatttttacgtggttgaggcattaatgagccttagtccacatatctttgttattaatgagagtatttttacaaagaatgttcttggtgaatctctctcttctttactcctttcgattccttaattaatcaagcccgcccccttttccattatgtctatggggtatttatagtgtttttcgggggatccctagagaaagatcacttgtctttttatgttagcctcttaggggca

SEQ ID NO: 393067 - DNA, 1576 bp, Cannabis indica
aaattatatcatcattcattaaatcattcttaattatattataacagctaacataaaactcaatatacgtgtcttgcacgtaatttttgtctagtatatatatatggatattttaaagcataaatagcatatgtttttaatttcaattacttaccggacttcttaagataacacatgtcatgttttatattagttcatggtatatttatttttaaaaatagtcaaaacatttttaaaataaaaaatattaatacaaaatatgttttatgattatagaaaaacaaaattaaactaaatgataaatcagattaattattttctattacttaaaaaatatatacatatatatatatataaaatcaactatcatacaaatttatcaacaattctaaacaacaagttcagatgtttgaacaaataaaatcagtccctcaatcgagactaggtgttcatctgtctgtaagcaaaacaaaaaagaatattgatataacataaaggtatttcatgcatgttgatacaacataaaggtagttcataacttattcaaacccaaattgagatagtacaaaaagaatgagtgttttctagagcgtttttcactctaaaattcctttgtagtttttcgtgctttattattttcaatattttttcctttgggagtcatacatacatacacaaaacaacaagaacggattcagaaaaccagagagagaagagagagaaagagagagagttacctggcaacgctaccaccaatttacagagtgagtatgatcgaagaagacagtcgcaatctcagtttgctagggttgggttaggtttgttggggttggccattgctagagtagaagagagataatttgttgatatggcaaagtagtggaatggaattataattccaccgaatgaaaaatggaaaagcatttccgttagtttggggaatagcattactgtgtaattctttttcaaaattgttatttttcaaccaaacaaaagaattaggcccattagtattctatttcattcctttctggtccattaccatcaaccaaacgggcccttaatttttttttttcttctttatattagagattagtgacaatttactttttaacaataaaagaaatagttacattaaaaatataaataataatatcttataatttataaatagggtagtataatatacaacaaaaaagtcaattagacaacaatctaattttattatgtcaatatctactagttcaaattatgtcaattaaaaaaattgaaaaaacttatcattgtaattaaaaaatgtgccaaaaataaactacatatatacatcatcatccacaaagcaatacacatatataaaaaaaaatgtcgaaaataaattaaatatatataaaatacttcttaatggatattacctataaatgtttactaaataaatttatatatatataaacttttaataaccagattatattttttctaacttttaatattttaattggttatagacagggtcggtcttgggttgaaatgggctataggcaaataaaaaaaaattggacccttactataaagataa

SEQ ID NO: 393068 - DNA, 1116 bp, Cannabis indica
tctctctctctctctcatgccactttcaggttattaaatactaagtctatttctaatctcacttattcagaatttttcatgcatcattctcaccattgtaacattaatagagagccatattagaaattacagggtaagagcctataatctgtgtggtgttatctatcaaatcagtacaactaaaaagggagtaggtcattactcgctaaacaaggggtcgaacctctataaatcgttgtgttattttcttatttatttttattatttacacgtggtgattgttgatcataaataaggctccattatgggttgactaatttttaggtcaacatgtttgaaggttgatattaggttgttcttgagatttttgttgaatttggttgggtttggataggtttgagaagtgttaatctcaaagttttggtttcctgcaaaaaaaatggcaaattgttttctcaaaaatgatctaccatttttcttggcagtgttctagaaaaacatcttactatttttagagaaaatagtctaccattttttagaaactttttcccaaagtcttggttttaggtgttttcttgatatttagggtattgtcacgctattgagaaactttcgattttgagtttaagacctagaatgagttaggtcatactactaactgatttatcgttgttgtaacatagggtctgggattgtcgttcattctttgtaaggttggctggtacacctgaacaggaatttaaagtaagagaagtatactcgtaccacttagcatgtcaagataagttacgattattattattatttgtgatttgattattattaattataaagatacaataattaccattttgcgagaaagagtccttactctaaattgaaactgttgttaggtttcttattagttacctcattaggtaacgataatgacattggatgcatggatagatttatcaagattgtctcattaggcaacaacggatagtacttattgaagtaacagttacaacttatcttattagacagataaatttgtaattttaaattgttatatatatatgtgattattcatactgcttgtaacaccctaactaacttaggcgtattacgtgattt

SEQ ID NO: 393069 - DNA, 697 bp, Cannabis indica
tcaatctcgctaacaactgatgtgtcaatctctctaaccactgatgttgcaatagtagcaagtccagaccctctcatggtaactttctttctttcaaaactacaaaattaaaatgtaaatcattacttagttcagtatttattatttacataaattaattcattgtactaattacttaatttactttttcatttataatagtgtgcttatttagagctctgaaaatatctttggcatatgcatgcaatagaaattagagtactacattgtctacctaaggcatttgttaggactccaaccatcgagcatgtacttgatcatctttcaaattccataactctagaactggaaaatgacatctagggttgtactcattcatctcaattaatacagttttaacaatctcataaagtttttcacccagtttcttctttagtcctttcaacttcttgatttaaacagtacttaaaaaggactataggattacccaagagaacaagtttaaatgcttactaaaaaggaaaaaaaaatacacaagtataagtagatattcaaatacacacaatatatatactaggtgaatgtacgtgccgagccacgtattgctagtttcatttaagattttgatctttttaagattttgaatgtattttatttttaaagattacaaattttttgtttgaaaaaattaaatatt

SEQ ID NO: 393070 - DNA, 768 bp, Cannabis indica
tatataccatatttgaaattgcagttaaggttactaattatcacatataattaaaatataaaattgaatgtaaaaaaaaaaaatattggtggtcagacttgttgagtggattgtacttaaattttcataatctggattttacatttgattgaataaaatgtagtataaaccgactaaacttgtcaatgtacacagttataatctcaattttgttataaagtgtatagtgtagttatttaattttgagacatcttgcactaatttttttttttttaaaaaagtatgatttaattgtatatgttacatacttataaaataaaagcacacactaaattatttaaacttttgtttattggtgtgttaaattattggaattttttttttaaatttacagaatatattaaataattacaatatatattatctttaaaaaaaattaaaactaactatgccgaaaatatgaagaaagtacatatatcctattttaaaaggtgcaccatacaatttctcaattattattattgctagctcatcccataataattacagtagctagattagatagccaactagtcacatgacctaatagaatcaaggattttgtagtcttgtcctatgttagctcataagggactttatttttctctttcttggtgggcttgacaaattaaagaacttaatttttaagaaattagactctataccatttttatattctcctcttttatttttaccatctttttaaaaatctattacttttacctcttt

SEQ ID NO: 393071 - DNA, 844 bp, Cannabis indica
agagagagagagagagtagtgaaaatcaagaagcatcaaagaagtagccagacagttttaagttagttccttgcttgaacaggagagcaactctccggcgctcttctatattttctttctttctttttttttttttttgttttcttcggacgtcggtgtgggtgagggtgtggtactgatgtgtcttaaaaactttccatgcatctaggtcctacaacagccacgtcacccaacttctttgcacaaaatccactcattgaaatactaaaccgagattgggtcataactatatatttctactctaaagactcattgggtacgttttataactctatgtctcgatagactttgttgtttgttaattattacaactataagttttaattaaatatgaagtgattgtattatttaatatataataaatgatttttattaaaatagttaaaatctaaagttcagggtgaggacttgtggtttgaggtcgggggcaagattgagatcagggtccgagtttaggtcgagagtgtgtttgagttcgaggtctaggttcgagtctaaggttcggagtgttgggattttatgtcttaaataaaacccattttaatataatattgtttgctatcaatagaagattagaagttatttcagtttatatattattttcatgattatggtttaatatacaatttttgataaatttagaacatatagttattcacaattacagtaatgtcatcacagtaaaaagtaattgtaattaaatgcttcaaagtataagtcccatgatttatcaatgcattggatttacactgacgtgataatcaacgataaagtttacttatac

SEQ ID NO: 393072 - DNA, 1721 bp, Cannabis indica
ttttttttaatttacaaattttaatattctattaatagagatatggacagttggtttttcattgttttcacgttggtgctacatgaaactaatgtgaaaacaatgatgttttctggaaaaaaaaatgttaagtaggattttagatttttaccgattttagatttttaccctttaaattttgacgtgtaacaaatcatgttctctgaacatttaagactattaaaaattctctttgaactattgcatttattggatttaagaatttttgttcaattttactaaatttgtgattgtccatgtactaaattatgcttttcaaattttgatgtctgtcaaattatgtccctctttgacatgtactaaatcaagcctcttgagtgttagattgtccttactaatattggataaaagttcttaaatccaacaaaacttttaatgaccttaaaagttcaggatgcttaatttagtatatgtcaaaattgagggggtaaaaatcctaattaaccgaaaaaaatacaagtaaaaaacttatatataaataaaaattgtaattttaagcagtaaaaatcccttgttatattgctaactatgtagaaggctgaaaggacgggtcacaaatgttagtggtggtctgggcttactatttgggccagaaatcaaaaattagtaattgggcctaaaaatgtagaggtataagtgaaaatcttttttgtttttttttttctttctaatgaagttgttgatagatgatcattaattctctatactcttggaaaatgttgtctcaataataataacaataaaggggaatttggaaaagtcatgagaggagtggattctgacagattgaatctatgtcttatgatctggtttaagaattagaaaagggtttcaagttgaatatctgctgaattaggtgactttttttctttctttccagtgttaaaattgactgagtcttgtctatgttagaattgaaacaggtctgacttggtccaatcttgttattataacctattataggataatatttgtgtgataatatcccaaagacccttatactaaatattcccaacatatatattcatgtagtacattcattgaccaattcatcatcactttctttgaaatctcatcaaacttaacaaaaaaaaaaacaaaattagtggtaaaaaaaccaaacaccaaattcaaaataaaacaaattattttattttatctttctctccatcttctctttattcactccacctttttcttttcttttttttttcattcagtgttgtttctttgagtttatccaagctttattttctaagcttggatcatggttggctctaatatggatctccaacagggtctgtcctaagatatataggacttaaggcgaaatcaaattttggggccgctatatatagtttaactattataaaaattatagttctagtgcttagtttaatggtaaaacttttaaatactcttaagagcttcaaggtaaaaaaattaaaatgtagaggttgggaattgatctcatgacctcttatatgagaagttaaaccttttaccactacaccaaaaaaaaattattatattttcttcttatttataattttatctatatattaatattatttttttcacaatttcggggagtgagcgttcgggagtccgaggcgtacgcctagccttcctactctcaaggccggccctaatcttcaata

SEQ ID NO: 393073 - DNA, 1169 bp, Cannabis indica
agtaaaaattaaatagaaaaagtgggaaaaatacaaatgaacttatttatatcactactgaattattgctcttttcatatcagatttaactacatgtttccgagaatatattgtagtacaatcggacatgtgaagtttgccactttttcaactcataagactgagctcatagccttatacttaattaatcttagctagtcttgagcaaaccttttcttggttaattaattaattaattaattatatgttacatagaaaaaaaaaaaaattaaatccaagaaaatcaacaaatcaatctatctgtctgtccataaatatatctttatgtatgtgttttgtgaaacaagttactcaaacaattaacttaattactcgttgactcgatcaaatatagatatatattaatttataattatatataatatattatgggattttttctctcatgtagatattgttgacttaaattttcatgaaaagatatggaaatatgcaaatataaagaagttaatttcaaataattagctccatctatatatttaataccaacttgcatataataacaaattaaattataggatcagttgagtcaagtgttaatattggttaccgtgaatgcatgtatatactcattttaagttaaagtgctgccaagattttcagatgttaaataatattggaaagcccctaaaaatagggtgtatggatgcaattttctctattttgtggtcagcaaatttttttagttcaatttattttaatggtcatcaagtacgttgtactgcaatttttagaattaaaaaaaaaaataatagtacttttttattttatacgtatatgaaataaaatatttaagtattatttttatattataaattattttaaattttttaatatttcacacaatattataaataactacaaaaaatagactaatatttttttctagatgccaaatagtaaaaatactacaaaaaatagttactttttagtgccaattttttaattataacataatttttttatgattaaatgtgacttttagtcataacaaaatattacttgtgattaaaatatagtctttaattacaagctgtcactaatttagttttagctagttacaacaattattgtgactaaaaatacatttagtcacaacaaattgtaat

SEQ ID NO: 393074 - DNA, 1104 bp, Cannabis indica
tgtcatcagtttctcttatttttgttcttcctctttttttcttcttaaaaatccaaaatttaaacaaaaaaaactaattcaaaaattaaaattgtagagccgtaatttgatttttgctgatttcttgtatctaaattttactttttcattagtttcccttttgtttattaaaattcaaaaattcaaaaaaaaaaaaaaaactccgatttgttattgctgaattctttgtttccctatttgtgttacatatttgtttctttttggtttcccaaattatttcacaaagcttgtttaattgggtttccttttgctttccttgtgtcattaaggagcaagagtttcgagcttgctaatttattgtcttgaaaaaaaaatggaaagaaaaggagaggaaatcgagagcaaaaaaaaaaacaaagaaaagaaaaggaaactgagagcatacaatttttgggtgatgtggttaaattgccaaagtttaaaccgaatcctaatccttctttatcattgtttgtaggaacattcgacaaacacctttggttctcctcttgaatagcagaggcataagccttgttaatgtaagaagaggatcttgcatcttgatctacgatcgagtaccactatatgactcactcaacccaactagaaactcaagaacacgatcttcttccagatattcttgaatcgtcttcgtaccaccacaggtacacgtaggttgtggagtacgaaattcttggatcaaatcccaaaaggccttgagtcgagtaaagtgatttgtaatagtatttgatccttgagccatagattgttttgttcgtatggcttcaaaaactcgaggagcacttttctagttgaatctttcctcaagatttgacaaaatatgtgtagaattgtccatatacatgatactttcagcaatttcactagaaatggtgttgaaaatccatgagatcacactgttgttataacgattcaacaactcaaagttgtgatcatcttcatagagagcaggaagcttttcattgaagaacttgagcttgtttctcgcaacaatagccactatcatagctcgcgccatgagctataattctcacaacctatgag

SEQ ID NO: 393075 - DNA, 684 bp, Cannabis indica
accacattatggcatgtctttcacgtattttatttgagttgttgaactgtttgtttggattgttgaaggatggagcttagaaacgactttgcgggatttaagcttctacctaggtaggcaacccccaacatgcatataacactgtcctgtctgggatgtaaggctccaaggaaatttttggataaacaatcaagttttgtcactagtgaaaaataaaatgacgatgtagaagtataatattactacattagagtcacttgtctagttaaaaataagaataaaataaaatgtgtacttttaaagaattattaaactaaaaattaattaataattaaaaagattaagtgaaattaaattataaacatttaaattagttttttaaattaattatacaataatttaagtcatcattattctatttgccacatgtaataaaatttgactgaatgacctctttatcccacgatgtgatgagtcgacatcaaggtgctaaaccagaacaacttctatggcaatagatagggttcaagcttatttggcatatgaatcaagatctcctgttaaaaaaatagtggtttatactgtgttaaaccaatctatatttaacacgttaattgaatttttatttattaaaaaaattaaaacctttaattaagtcaacaaaagtagttaacatatttaata

SEQ ID NO: 393076 - DNA, 843 bp, Cannabis indica
gtaagttaaaagaaaaaactgtacaataaaaccgccatttacactgttttgagtgatattagttttttttctcttctctttttttttctttttataaaatcaaaataattaaaaaattatatattttaatttcattaaagaaaaaaactctctaaccttatccatatataaatttttaaaatgcaatctttatccggattttgaagtgtttttttaataacatttgggtttgtcattttgttggtaatgaatttttacgtattaaaattttttatttttttttattataggacataattattttcaaaaatattaggtacagtgttaagtttttattattatttttttaattgttttattgttgtttttaattattctattttgttgttttacaaatgttatattattttttgtaaaaattaactcactcgtataaattctccttttcataattgattattattatcattattatctatgccagtttttagagtttctagttgaagaataccttatatccaaagatattgcaacaataccatattttttgttcaatattcctattatattctcaaattcctaatccaactctcttttcatattattatcaagtagattttcacttttccatttcatttgtaatcattaaattttaaatttttctatttgaaaagaagaaatattttatgttataataacaataatcaattattctagggaaatttacaaggtatactaacttttgctatttttttacaaaaatactgccaagcggtatttttacttttttactgtgtttttttataagtttcatactgcagtatactgtgttaagtttcactg

SEQ ID NO: 393077 - DNA, 478 bp, Cannabis indica
agaaatattcttatcaataatgaattatatctgcatggtaatattattataaaaaaattaatcttgatttattttacagagcaaatttattgggaaggtcaagtgaaatacggtggtgtgacatcgattttaaatgtaatggtaactacaaatgaaatacggtgaagacaactgttttgaaatcatttgtaatttttttagatatcaattttgtatgaagattcttcaatttcttatctttattataatatttgaagatatttccatgtattttttttctttttcaaataaaaattttatgataattttctttctaattttttagagttatcagttatttttctaatattttattgtttatataacatttaaaaatattttatttattaaaacaatgtataatatatcgatctttatagaaattttttcaaaaaattaataaattaaataaggcatatgaattaaatttaataaagta

SEQ ID NO: 393078 - DNA, 752 bp, Cannabis indica
tgtcacttggttggatgtacttgaaaattctcctgggtcgcttagttcgagtggtctactgggtcgtcatgggttcggttctggacgaggtgggttcgtgcggtgggttcgtttttgggtcactgtgagtttgggagagggaaagaagagagagaatggagttagagagaatgaaaagagaggagtaactttggaagaaaattaaaagattggaatatttttcttatgtgtaataattaggatataattgaacaacatggctaattttttaacatggattattaaattttccataacaaattaattttctcacactatgtatgatgttagacttttgatgatgtccaagatgtatattctaccgatcggaagctattaagagttgtcagttgtgttaatatctattggtctcccttatgaaacacttcaccaaatttaccaagttttataaacttgttgttggtttatcatattattgctattaattgataattttgatgaaatgatatgaatgtaaactttatgattggattaattaaattttgtatgagattgtgtattgtaataatttaaaattataatttattatttgaaaatgaattaaacatatataaaccataaaaaatacacataaataaaaaaccaactataaaataattgttgaataaaaaaatattatgaaaactacttaaaaacaactaaaagataacaaaataaaaaaaaaatatttgaaataaattaaaaatatacat

SEQ ID NO: 393079 - DNA, 786 bp, Cannabis indica
gaaattatttgttaattaattaaactacaatttcgcatcttgattacaggtaaaataaattatacaattcaaggagtaattttagtaaaattttcatttattaaaaataatcatgtataaattactatggtttttgaatttaagatatatttctatctatatatatgctgatttaagctttgattattctaatttctagctactatattaattttatatttattggattattatatatatagtagaaataggaaaaagtagaggagtactgtacgtagctaggttggggtgatcagtacgtaacggtcggagtcaaatatatatgtgtatatatattaattatttgattggaaaatacaaaaaatccatataaaaccatgttgtaatagtggtcatccaaatatatttatttatatttaaatactattttgatttagaagtatatatatatagttgaaatgtaatgacatgcaatatagggtttataattatttaattaaatacatatattacggcaataattcatacgcactaatcggaaaattggtgaatttgcctaagcaattgggttttctccacttgagagaggttgcttaaaatgaattttctatcaaataaaagacacatgcatgctactataattatttttatagatatatgtggtaggaaaattctacaatacaactccttaaaatggatatattgatgcacccctatctgttttaacatccgaaataattttttggttaaattttttctcatagttatgtacgttatagttattta

SEQ ID NO: 393080 - DNA, 958 bp, Cannabis indica
catcaattaaaaataataggcgaaaattattaccgattgtttaaaacagtcgattatagtggtcactataactaacagttttaaacagtcggctatagtattattgaccattattttaaattgttggtaataatttagccgacagttttaaatcaaaaattaatttgtggtccaaaatttgtaaccaaaagttgtgaagctcttctttgtttttcctatcgaccctccattgttttcttcaatattcccactgcaaactccttcgaatccaccattccttcaattcatacagacaaaatattaatattaattatatatacatgaatataatcttttcagtaaccaaacaaatttattttattaactaatacttaatttagtttcattatctacctatgcattcatgtatatatattcaaaatttataaaaaaaaaatattcacaataataaactcatacacgtcttcttttaaagaataacacaataaataaatacaaatgaaagacaatagagattatctgaaaatgatattgacgaacggtggttgcgctagtggttggaggggacaccgagatgatggtgtgactggtggtggtgctgactgcgagatggaccagttggtgcgagtgatggtggctctgtatgattggtggctgctgctgtgctccgtcggtggagagggacaagagaaattggagagagagagaaaaaaaatttgaaatgaaaatgagatagatctgattttggggttttattacaaaaattgagtattccctacgattttaaaccgtctaggatacccaattaaactatattaaattgttgtagatttcttacagttgtttaaaatcgtcgagaatactcaattatagtcgacggttctaaatattagtgacagtcttcaaaaaatcaattggagaaccaatggaagtaaaatatagcatttagacacaaatt

SEQ ID NO: 393081 - DNA, 572 bp, Cannabis indica
ttctgtccattttgtaaagaagtaaactggtacaatagcatacctcgcgcctccttgacgtgtgggtaaagaccaatcaagtcaatcccatatattgcaaatggatatgttgaggtcatcattcttagctcggtgggttgtactcgaggtatatgagagaactgttggcatttgtcgcatctcttaaaaacttctgtgtgtccttattgatagttggccagtaatacccttgacgaattatctttttcgaatagctttgccaacctgcatgatctccactaaagccttcatgaatttctttgattatttcattaacttatgtaggtaacagacattgtagtaaaggcatggagtaacctcttctgtataagtttccttcgaccatcatgtaatgaggaatcgaatataagagttttcatgcgttagttttattttttggaagttctccatgtaatagatacttgacgattggtgtgatttgttgggttttctgccgtaaataaaaccctttacaatctgattagttatcaatataagaaatttgaagtgatttatgtttgcatgaattttac

SEQ ID NO: 393082 - DNA, 1181 bp, Cannabis indica
acaatagattattggttttaattaaagctaaatttttgtttggtgatttgttacaaaaaataagaaaaggtgaattaaacatttaacccaattataagagaaatgcatttacaattttggtagttggttatcacattgaatgtatgttttttttcttcaaacatttaaacttataatatattaattttttgagtcaattcatataaattaatgtgaaaattaaatatttaaaaataaggatttaatatgggttaatggtgatatacttctttgttgttacctgctataactgaagaaaaattatgaaatagttattttctaatggaattgtttttgtttttttgatgactaattaagatttttatccccaaactttaacatgtaccaaattaaggatttttgtttagtttcattcaattttatactaactcatgctctctagactttgaaatctaccaaatcatgcccttgaatttttgacaaaactaattataagatatcataatagtgttaaacatcttagtgccaaataacaatacacatttcataataataaattattaacaattttagttataaaaaaattattcacaactcacaaaatagttagtctatagtaaatagtgaatgtcccttaaaagcaccaccaccaaacaatatccagtctagaccataactaaactaatgaactaaaaatttgaaagcaaccaaatggcaatttctacgtacactgtttgagatatcggactccggtctcatgcatttaaaattcctacgctcgacctcaaccttcccaaaatgggctaacacttcactaaaacacaaaacaaataatcaaatacaataaatgtactaatatcaactacataaacaataaacaataatcattaaacaggagattacctcggatcattgacactagagaaaatataacgaaagaactcgtactgttgattcgaataaaccttgtttacagtgaacgccccaatcacctttcctccagagtctttgaatctttcgaaggcagtagcatcaaaatcatccttgacggtctgctcaacttcctcttttacaataactgggacttcttctccccaaaagttgatatcttcaaacgactcttcagaaacaagcttctcaattagaacaacgacattatcttctgatatattaagtgaagg

SEQ ID NO: 393083 - DNA, 1310 bp, Cannabis indica
ctaagaataatatgtgttttggatagatcaaatttatgtgcaagtcattgtgttattgtttttatatatgttgtttgtggcagttttgttaaatttattttgattggtactataccatatgattgagcagctaaaatacttgaataactaaaataattttagctttaaattccattacaatttaaaaacattcactacttcccaatcccatttgtattttgtagttatttttgtcttctttttttttaagagtgtcatgtttaagtgttcaacaaaattcaggaaagagattattaagagtatttgagaaagtctatgagttggagaaataaggcattttccaacattgttttggttgctggttgtggtatcttaagactagatagtaaggaaaaaagttactactagaggagatttctttagaaaattatggatggtggatcgaatttcaagtggaaagagcttggggcttcagattgggagtcatcttcttcctcaattcctttgaagaggataagagggccatcatcaagcaatggaatccacgtcccatcttgccttgtggatggctgtaattcagaccttactaaattttgggactatcatagacgccacaaagtttgcgaaactcactcaaagactccaaaagttactattggaggtcacgagcagcggttttaccagcagtgtagcaggtgtgtttagatcattgttgataagaattttatattgaataaaattagacaagtagagactaaagaagatgaacgagttagttttttttttttttttagttgattgtactgttctttgactagtaacaacactattttttacctctttctatccaaagttgtggatgttttaatagattaattgcatgtttaaaactttcgggaacgtccgacttatagttttgtttattttaattgttgttgttgctcacattctttatggttccttagtttcttggccaatttggtgtgtctcttcagcattcagattatgaaatgataactcttcttgcttcttgctatgttctaggacttcatgtatgattctagttcaataactacacttattgacgcaataggtaaaaaaaaaaagtattttcgtaatagatatgatatttttaaaccgacgtaatatatttttttgagacagttttaaaatgtcatgaaacatttagcgtcattttttaaccgacgcttaaaataaaatagaaaagtaaagtatttagcgtcagtttataaatgtcgaaaatagttttttgtcgtcgtttttaaagattgacgcgtaataaaaaaact

SEQ ID NO: 393084 - DNA, 817 bp, Cannabis indica
ggattaatatcattttgaatcctaacccaaaatcaaaaactaaattaaaggaacgataacaacttattagttttccacttagtgattgattgttactaaaacatctcttattgcactagaaaaaccaatatattaagtcacttaaatattgtatttgcctattcatttcaggattaatatcattttgaatcctttacaagaattcttcgtatgcaggtttggcgtcggggattaggcggtttctcctctatagaatggtattactgcagtagcacacgttttgtagctgccactcttaacaatttggatctcaccttactgtcgtcgtggtaagcgatatgaaatttctttctcaaactggtggtggtcgattcctttctccggttagtggtggtcgatcggggtgagatatctattctccgcaaggaagttattttttattcttctttacattggtggaagaagtattgagctatgttgattatgttctcattatttttggtttggacttgtgttatttccttgctctaaatttagttttcaacaaggtaacttggatagttttatagatttaagagtacccccaacagcacctttgttctatcctttaaaatactttattaaaatttcaattttttcaatttttttattttattttacacatttatattacaccattcattaacttctttatatttttctctatatcatctaaatattatattttttacatatattttattaataaaataaaaaaattaattaaaaaaaatataaaatatatttatctctttgagttatatgtaaatttgggatg

SEQ ID NO: 393085 - DNA, 2077 bp, Cannabis indica
gtataatttaatatcggattccatttattttattttaataaatattataaaatattactaacaaattataaaataatactttatcgtttatcgtgttactaagtacccaaatatcttatatcaataccgtgatactaagtacccaaatgtctcgtagcaatgcttaatagttataacatttaagagggtataccagataatactgtcttttatcatttctaacctatcatttcccaccacaacttgtgtatctctaaccaatcacatcgttagtctctttctcttacatttatgatctttcgcttacatttatgagatgtaaaataatgttaaaaaggtaccatatttgatatgcttagaagaataataacaaacaaaatattccacatatataggtgaaaaatcattttaacttaacaagactcattctaaaataataatatgaattgattaaaatatttttgacatatatgtgtaatttttgtttttttttttttatttttttagtactttaatataatcgtccctattaaacttaacaaaatagagaatgctaccgacaagtagtattggataaggtccgatttggacgcacatccaaaatttaactgtcataatttattcaatattaatttgattgacacaactcaaattgtgttttaaatctatttcaatattctgtcaagtcatatttcaaattctgatcgcaattttgaagttatcaactttaaattttgtcatcaaaagagttacgaatttaagctacaacttactcaaagtgggtcctgcggacacaactcaagcttaaaaaattaacaatcgacctccagagtcaatttcacaattacatcatcataaacggtcaaaaatagcctaaatatattttttcatatttttggaataatttattattattttagtaggatctccttccttataaaatgagagctcatttaactcatttttcacatttagaaaagtacccataaagtcagagaattttttactagtttatctctctagaaattgaagctttcatacttagctaattttcttgtaattttcgtgagaaataaaaactcaaaatagacgtagatttattaccattgcaacatggggagtgaactactataaattttgtgtgtctctctaaattatttacttaaacttattatttatctaccaatttagcgagttgatattagctacattttagcgtcaacaataataatataacataatttaatagatgtatatgaacttatcaaatgttataatttttgaaaattggaagtttttaccaccactattatcttacaaatttattattattattattattattattattattattattattattattattattattttgcatcttactttcacttctggctgctatattctttaatttatgaaaacaaatagcttaaatttttaggagaaatgttcaataaattattaaaaaaattggtttttctcgatgattttaaatagtcggataaagtatttttgttggtttctataatcgtcgcctatttgatcgtcgcaaaataggtaatcgtcactcaaattcccaactatgtaaaatcgtcacgtatagtgtgttataggcacgattttaaaaaccgtcgctatatacgataaggcacggtttaaaacagtcgtctataaaccgtgccttagtattataggcaacagtgttaaacctgttacttatagtataataatctattatattttaaaaattttaataattttaaatttttattatatattcgtttatattataattataatagtcaaacaattcaagcataaataaaaaatttattaaataatacaaaatataattaacaatatatagtatactagttaaacttaagatctcaaacttcaaatatcgtctagtaatactaaaaaaaaaaaataaaaaaaaaaaaaaaaaaaaaaaaaccttaacaatatacctgcacattctaaaaaaaaattattaatgaataagcatgttagacttgtaaagaataacctaccatattgcaaaaacattaatacaaaagaaattaatatt

SEQ ID NO: 393086 - DNA, 986 bp, Cannabis indica
atatatatatatacacacacttatcatgagctttgatttcaaaagatcgatttatagtaacaatcatcttgtttgttggtccaagcttcttaaaagccctaaaatgatcatttgaaactaaatggcaaaaaggtgatagttaataatttctcttacaaattacaatagaaaatggctgtttatgctcatattgaatattaattaaggattgaaaatacatatggtgtgacagaaaatagatgcttaattaaaaaaattggaaaagttggcacatgttacatgtaaatgtaataatatactgttcatgagtctattatctatataattatatatatagttatataatcatgatcagatccccaattaattagggttactttatattccttaaagtgatcagattatatgcaggtgcttttggcaactgtataaacaatcattaatatttatatatgtatattataaatactgctcgttataatttttcagttaatctccacgtccgaaaacatatgttggaatatttttttcaattttttttcacgagggtgtttgttatgcttacaacatcatccctgtaaatttttaaaatttcgaatagtttacagtgccgaaaatacgtttgaagtttttgaacgggcgtagtaaactgaaatatcaggaattctgttttcggaactgtaaactattcgaaatttttcaaaagtttaaagggatgatattgtaactataacaaataccgctatgaaaaaatatatttcgatacgtgatttcggacgtggaggttgactaagaggttgtaataggaggttgtaattagcatttctcatatatatatggctaattaggatttttgcccactaaattttgacatgtacaaaaatcatgcccccttgaattattgagattgttggattttaaggactttttgtctaatttcatttcaaatttttactatttttagtgattgtttaactaaaattatg

SEQ ID NO: 393087 - DNA, 993 bp, Cannabis indica
gtaaaaattaataaatttagacaaaaaattttaaatcttacccatctcaaaaacttaaaaaaaaaaaaaaacgcaaaaaaattatattattaccaattcaaaactgagaggccatggtaatagtatattatttcaattaattaactatcaacaaagtatttctttacctaacataattacctaactaatcttctaaataacagaccttgtcgtaatattaaatatattgatatgatcaattcaagataacaaatggatgattaggttaaatgtacacaaagaacaaaaaataacatttttaataaatataatacccaatcattatatatataatcatagagtttattttctctttcaattgcatgttacaatgttggataaaatatattaattcctctaataattaaaatattgagaaaatttgtaatagtgtatgttgtaattattatttaaattatattaaattaaaaaagaaattgaataatttattatatatagttatatatagttatatgatcacgtactcattttcaatagttcacacatttgtgataagaaaattgaatgagaaacttattttatgggtcacaattatggccacacaaaatggaggccaatagggcaagagaccaagacttttacttattttggaccatcttatactcctattcctcacacaagtgttatactaaataagttgtgtgtgtttagaagtaacacacctaattattattattagatagtgtaattattatgatagtaattagataatttaataattatattatatttttaaaatacaatatatatttggatatgagataataattacatataagatcggacttagattaaggcagataagacacctagggaccttttttatattatcttcttttatttttgccttctttttaaagtctatcattttgacctcttttttaaacattgtaccaattttgccattgtcacttcaagatactctccatgtga

SEQ ID NO: 393088 - DNA, 888 bp, Cannabis indica
gtccacatcaccaagaaaagtttgtaggttaacattcgttagctctctacaccgacgctcactgccacaatgaccgacacaaccattagcatcatcatgatcaatagaaggaatcgtcatctctaaaaaattagagaaaacattaaatttggattggaaaaacaaaaaaaataatcaaaaatcaaaataaaaagaaaataatacacaaaactaatgatctaataacatacaacaacaagatttccatataataaatgacaacaaaaataatagagaagcatagaaagataattgaaagatgagaatggaaagatatgcctcaacttttccatttgaaatactaaatgaaggaagtgatacgtgtgtaatattacgttagtgtattttatatttagatatatattttttaaatactgtagaagagaatcataccgtttatctcagtgctgtcatagatccaagggctgggaagatctggcgacaccaatcccaaaactaaaactcagataccaaacaaaaatgagttggaggggtcagatcaagctagcgttgatggaggaagaacccattgagggagaaaatcgtgaaaggaagagtataaaattgagtaatttgcggcataaatacttaagtttaactcccacttgtaaataaatacctaagtttaatttttgtcggtaataatacctaagttataattttgaaacttctgtaagtacttaactgttaagtattaagtaaattgcacaattcctaattggtccaagtcattaaatttttaatttttttaaaaaaaaaattaggtaaatataccaataagaaaataacacgtgaataatgaacttaatatttaacagttagttacttacagagttttagacatataac

SEQ ID NO: 393089 - DNA, 547 bp, Cannabis indica
cataatgtggctagaatgggctttgacccaaaacattgcaggttttgtagagccatcatcgatacctaaaactatcctttgtaatgaccgtgaggtctaattttctatctatataacgctttattatacaaaaaaaaaaaaaattgatacggtatttaacggaatggtaataatataaattgataaaaacaagcatacgttatttaatctgtccaaaaaaaatgtgatatgtaagtatataaaattgaaaatataagatacttatgtggtatattttttaaaagatagtgtaaataatattcatgtattttaattgagaaattttgaagggaattttgtgcctagcataatattaatttaatattagtttttacttattttaatttaataaaaattataaaaaattgctattagttatatgacgtgatcataatagtgctagtattttggtactccaaatattttaagaacatcactatttggcaccaataatacttaatactttctatatgtagtgttatcgatattctttaaaagttatttattt

SEQ ID NO: 393090 - DNA, 911 bp, Cannabis indica
agcagttttttatagtagtttttgcataatcctactattttctttagaattgatattcacctaatagtttatgattctaatagagtgataatttgtaattaatattatttttaatgatattattgagtgtgatgaaaaataaaatctaaattaaataaattacatattgcgttgatttattattacctaaattaatttatctttattaggatttaatgttttatttaagttaaattaaattgtatgcttcatagagatttgttgttatgcaatttgaatttgagtaatttttttttgaacttatttttggatatatggaatcttcaatcttatcacaataagaatctaaccgtttaaggtgtttgtttttttctatggaagccaagaatattaataaagaaatctaacacttgattaacttgatacataattaatatgttttggcagaggctcaagtctttctataaattaagtcatatttaaatcttaaagcatgttactaattattagcttatattatatataattaagtcttcttataaatgtctaataattaacctttatatataactccactgcactcatttttgttttttgttatgacctcatgtagattatattattctgagatttatgacttgtccactatatatttataagtgaacaaattagttataccaaacaagaaattattattagttaaattgagaaaattatgaaaactgaagtggtttcgttgtgcttgcatgtgcacatgtcccacttttcttgttttattttgttattatttttatagagtttggaaattagaactacaaaaaattgctatttttagtgatggcaactttttagtcataagttttagtcacaacaagtattgtgattaaaaatacatttagtcacaataaatt

SEQ ID NO: 393091 - DNA, 587 bp, Cannabis indica
tttttttaaaaaaaaaatcatccacaaaaaacactctccataaagtgagctaaaataactaaataatttagctaaacattattcattctctaaatatagctacacattatttattcttcaaacttacttttttttattctttgtttgtttcttttctttctttctttctcatgtttttatttaaataaaaaaataatatttaaatatataatattttacttgtataaaataaaaatataaaaaaattgatgtacagtgtgatgtaaatatttaaggtaaaataatattaaaaaaaattagtaaaatattttaaagaatagagtaaaaaacctgataaatcctaccaataactcctttaaaaagtagatatacttaacaaatatagctcaaaagtgataaaataatttaggggtgttcatcaaactccttacaccacaccacacaaaaaatgctattaaaaatcttttgcggtgcggttgtggtttgtatttttaccaaattgcacggtgcagtacagtttgcagttttgaatttaatagttgcgactaataccgcatcgtactatatattacaaagttaccaatttt

SEQ ID NO: 393092 - DNA, 762 bp, Cannabis indica
ttttacctatatatttttttttcaaaaaactcaaggtttggttttgttaaaaaccatattcaattttttttactgtggatgttgttggattgttgtaatgatttttttacaagtattttgggtatgttattcaaagacaatggagaactttttttcgttttctttgacacccataaaggggtcaaaatatgtaagatacttttaagttttgagagtttcttggcaaaaatgggtactggaaatggattgtatatgaaaatggtgaaattcactcaaacggtgtcggaaacggagcaccagaggtggtgtttccagtcggtcgggaaaccgggttcgctgtcagatcgcacgacccggatctgacccgcgtggccagctgaaggttagggatgacctcaaaacgacgtgtcgtttttggctctccttcagacaaccgacgtgccgtttttgttaagggttgtgcatcgttttatagcaaacgacatgtcgtacagaccagaactttggaccattttttcaccattttgctctattttaattttttttcatttaattgtgtaattatatttttattttggtcaatataaataattaattgactcataatcacataattaaattaaggtaaattattttctaatatttataatctcacaattttattatttgttatttattaattgaaacataattatattcatgtcataacattattgtatagatgatcgatttttctttttttgaaaatataattatgttagt

SEQ ID NO: 393093 - DNA, 1729 bp, Cannabis indica
  modified_base (59)..(59): a, c, t, g, unknown or other
cagtgctatgtgatgatagtagtagatttagtgaaaagtgtggaaaagaaggattttanattacgaatagagaagacatagtgactttttccggcaacggagtctgataattctttgccgacgttggagtagctgggtacgccaagtttgggcgttttacaatatagattttggatgggatcggccaaaaaaatttgttgtggtatctatagagaatggtgccatttcaatggcggaatgtggagatggaagtggtggcattgaggttggtttagttttgaagaagcatcaaatggatcattttgcttccctcttccacaatggtctttctcataataataataataataataataataatattgtttgattttgtttactgcaatctaaacattattattttgatggagtacacatctattaatggatcatttagaattcaataaaaatatttaataaataaaaaaaaagaaaagtgttacaaacaaaaaacgagccaagaccattttgataaattaaaaaaaaatggaacctacttttatgtatatatattttattaaaaaaatataatacattatatatataaaagtgtaatttttaataaaattcaaatactaagtaaaataaatatattttaaactaataaatcgttacatatacttataaaattcaatatattactgaaatattatatgtcttgcattttttaatttaaaagtaataattaaatttgcatggtcaggttttgcaatcatatccttttgaatagataacataattaaaccacttaatctttctttagacatgattgaacggaaaaaagatttgatcaagatcagtttaaaaaaactctattctgtgtgcgcaacagtgacaggaatagttagcgaaatcctataagtaattcaagcatttggataactaccatctacttcttttatgtagctcaatacatctataactctttcaatttttttggtaatttttgatgcaacatatataactcttggtatagtcatcactgtcaagatttgaaatcacacaccatgcttcattaagtttgtaagactgatacaaaatctcttcaaatcatagtcatgtgtagactttaatttctcattactaaacaaaagtctgaaatttgcctcaaaattttaaaattgctcaaacctaaattaacaataattatctttattagttaatatggtaggaatagtaaaagataattttaaataaataccaagaaagtatgcataaaataccaagaaagtatgcatacctatttttaaatgatgaaatagcttaatcaattatatggaggaaatagtcaattttaaaggactctattgtgattgtgtcacctcctcattggcactttattttctataaatttttgtttttccataaatactagttcaacttgcatcatacttgcaatctcaatagctttagttatagtctcctcaaaactaattttttttatacttttggggcccgtttagtacgtgagattggattggattaggcaagataatttgtcaaatttagtgtttgggcatgttggaagtctggataactaatccagctaatctcatatgtatgagattatttatcccatctaaaagggaggggataaataatcccatgcaggtgagattttctttttattgctttttttttttttaattttgattttattactatatttttaatttaataagaatttaaa

SEQ ID NO: 393094 - DNA, 594 bp, Cannabis indica
atatttactcacattttttttttatagtcgataataatcatcatggttaaattaatgcatttctattagtttttacatgataatcaatatagatatataagatctctcataaaattttttgaaaaatttgaaaataatttaaaaatctctaattgaagattcaaatagtttatttggcatacttctttcaatacatacacgtactcacatacaaataagttatttaaatcatgatttcaatatattttaaattattgtaaaatttttaaccattgtgtcatgtatcaatgtaactgtgtaaagaaaaaaaaaaaaagaaaaaattataaacatattacttattattaacaaatattttatagtctatacttgtcatttatcatatcgaaaaagtattcactgtcgtgaatacggtatattatataaaaagattattatttttagggatcagtgcaaccgaataccatcaatagaataacaatttttcataattatatcattttaggtctttatatttaattttaaatcttttatttagttaaataataaataagattttgcatttttaatacaaaataatatagtaaatttatt

SEQ ID NO: 393095 - DNA, 1984 bp, Cannabis indica
tgtgtgtgatattttataacttcattaatctgtattaaagactagtgaatgattttttatgaaagttaatgcaatatgttgctatatttaatttttcatctgaatttgaatgatattgaattcacgaattcttgaattagagtttgtgttatatgttttgtctcatgtggattttctcttataatttcatatatattttgatattgttctagactttagacttttggacaatgagtttacttgaaagattattcaatttttaatttggtcaaagattcaaattttggatgtatagtgttggactaataagtttttaagtttcaaattatatatattaatagttttcatatataattatatatatgggttatcatataattatatacagtttatgtccgaaaaaatttattaaagtctaaagtaaaaaagaaaaaatggatcaattttgtgcatcattggcaccctaaaattttaaagtttgtctctcattctaaatgtattgattgaaacgtgatgttgatcgttaaagtaatctctcttgtgtagattgttaatgaggaagtaatctctcttgtgtagattgttaatgaggaatgttagatgattgtgtgtgttttcatgtaagtattgatcgacccaaataaagatcatacttattttgagtgtagacatacctatggtgataaatgtgtgacaattataaggtttgatgtgaacaatatgtacagtccaaagattgataaattatttgacaggatttattatcaatatttgattgctacgagtaccacttacagtaaatatctatctaaagacttgatattaatagtgtgtttatcttgagatgagatttgccattatttgaacttattgtgttttatgaatctttgtttattttggtctctttttagctcatgtttcagttatatctaccaacattaagttaattctcatgctaaatgagataaatttttaagtaaaaaaagagacaattatgctttcttagctatcctgtttcaataaaagataaagataaagataaaaataaaaatcaagatgttgcatatagaacactgttaaaaaaatacaaaatatattagatatgaaattatctataacttttgtaagagagattaaaaataagattaaattccaagtatgtcattaggcacatctaaagaaaatgagtttattactaaaaccatgcgattaactcggcatcgggaaatcaaaaactgccaaagtaaaacttaaaggagcttacatgacacacaaaggacaagtgacaacaaagatttttttttaaaaaaaaagtctttttcaaaaagagaaaaaatacattttagggggcaattattatgcccattttttgagcactgaatgtagacatggcatatgttatataagtctaaaagaaataaagaaataatgaatgcgaggaataaataaatattctacctcgaaaataagctatgaaataaaagaggagataaccttacggagtactatcaatataatgatttacgaggatgagaagaacacaagttaagtcgtcgagacatggctgaaacgaaggaggcaatagaatatcaagaaacaatgagttgagtagaaaagttagataacaagttcttccaaagcttacaactcatggacccacatacttgtaagtatgttgaaagactaagagaaataagcattatacaacttatttcaagagaccaagtctaaaaagctaccttagaaggctatagcgaggacaaacacttaaactaacaccttgcaagatacagctagctatctttaagcagcaccaactaatgtgagccataactataatgcacatcatttcaataaaagcaaaactgctttcgaataagagtaaaaagcggttaccaataattatttcatgaggagtgctatggagactctctattctactctcttttgcactctctctatgatgtaatgacaaatgtcaaat

SEQ ID NO: 393096 - DNA, 812 bp, Cannabis indica
ctaaaaataaactttgacacatatgattttagaaatttaaaataaatattaattaaatttgaactaaaaagtcaaataattaatttaaatagaatcaaaaaaaaaaaatagtgacaactaaagaattaaataacaaaataataaatcaaaataataatcttttaaacaaaactcttaaactaaaacttggatttcttcaatgctcttctaaaatctgcctctaattggacctttgaagaagtctcacttccttaaattatttacgtagactctgaaaactgcaagcaagagaaaatattatcagtggcaaaaaacaattttaacacttatgtaatagggatgtagagtaaatcaaatttaccttgtcttatcatgttgtaattttgtcaaaatgttcaacttattttggagaacatttctctcttgaactaaatgttcatgagtggcaccgtgctggttgtgaagttccttccaaatatcacgtgtagacaaacgtgtcatactttcctctaatctcttcattgaatgaagtcaacaagatataccttgcacagtgatttttttcttgccattgtgcaaagacattcgtggcagcgtgactcgattgttcacatacttctagccatgggtcttgttcgactactaattcatacaagttctccttgagtagtagaagttgtatgtctactctctactcggacgtgaaatcaccatcaagtacggttaccatattgtagggggtaattgttaacattatattgttggtgtgtcatttcattattagactgaaataaaattaaaataaagcgaga

SEQ ID NO: 393097 - DNA, 1279 bp, Cannabis indica
acttggatcgaatcattattgaaagagttgggatatccactgcctggagtctctgtaacctggtgcgacaatatgattgcaagcgcacttgcttccaatccagtctaccacgcacggactaaacacatagaactcgatgttcattttgttcgggacaaaattttgaagaaagaacttgaagtgagatacattccttcctcagatcaaattgcagactgtttaactaaagccttgcctcactcaaggtttcatctgctcacttccaaacttggtgtgattgcttccccccttcgtttgaggggtgatgttgagaattaaggttcatcacatcccctgctactcatcacaaaggagtcctgcccatttgtctgcagtcagcatcgtgcattagggaattagaatattccttctgttatttgcttttcttatgtaatcattgaattgtactagagtatcttttcggttatgcattctctattgtatattgccacttgtcttcatcacagtgactcaatgattgtatccttaagtatatatattgaatgcaaacccctcagcctccttgagctaagttttcccatttagtaaattaccatcttttttatctgagcatatatatatatatatattgaattggggataagttgtattgggattgattaggttttccttcaaaatatttgaatagttttatactaaatgctataatattaaaattaaggacctaactgcagtacttggattaggtgataatttttgagaaaatgcttcattaatcgtaattttgtggtcaatggaattatagtaatatgtattttcaatttgattcccatttcattttaattaataaaagatgtcttgaaattgcatgcggacataatcctaaagcatctaagaggtatcatatcatagttaggctactaaattaacatggatggcccttaaaggcaaataattggggaaaaagagtactaaatatatattggtattttggtactgtgtgagggaatatgtgtgcccacttgaactgatttttttccaacatggacggtggaaatatggtatttatggaagttgaagtaacatcaccatattcagtggcctttaggatctgttctcttctatttcatacataaaagttattctatatatcatttgacattttggctatttttttaatttctatataggagagcattttttctaggtatttatttgaaatactaggtgaatgtacgtgccgagccacgtattgctagtttcatttaagattttggtc

SEQ ID NO: 393098 - DNA, 1102 bp, Cannabis indica
taaataaataatataacatttataggtatatgtgaaaaatcccacatttaatttattttaactattttaattaactgcatatgtactatatgtaaataaaaaattataggcactgattgattttggaaaagcacacgagttaataaagtgttaattctaattaatatatagttttctagttgtcacataatgtcgcttgtcctcttttggtatataggaactattccttttagccttaaccaaaggccaacataagtaccaaaacaaaagattaatgtgattattttattttattttattgagcacactattattgtggacattgtcccacatgaaataaatagtagagtattgagctatatataagaacatggactatttcactcatcactaattggttttgtgatggaattctataattttcaacaagtcatacttagtactatttaaaagtgacactttatgattagttagtgataatttttaaaaactactatcttaaatcatatggaatctaatacttaattgtactaactttagacgctaagaaggtatattaagtattacccgtgccttttatcattctcttttagaaaacaaccatacacaacttctttgacttcactacacaacttctttgtaaattggagaattttcacacttaccgttttttttctaaaaaaaaataaataaatattttatggaaaaattaaaaaataagaggaaaacagtttagagtaaccagaagaagggtaactatttaccttaatactgttttttcatatacttttaattttaattttaacttttttttttaataatgtttccaataaaataattgttttggaaaaaaaaaaaatcatattttcacataaattgtataaaaatctataaaaaaaaaatatataattttcacttgtacatttgatatctttttctccaaagttgacaacatattcttttttatataaattatctatgggtagaaagatttttaaaatatcttggtaatatggtaaggcacgaagaaacaaggggtaagttgaaaaataccccttttattaatcaattaattaaatttacctctaattttatatttatt

SEQ ID NO: 393099 - DNA, 623 bp, Cannabis indica
ttttaaaaggtaattttttatttaggcccctacaatgagtgggccctaggcgcgggcctagcccgcctatgcctagggtcggtcctggctctacactatgcaacaatttatgttgcatttatatttatatgtgttttcggaaatttacatcacgtgaagcagtgtttcggcatttagaaaaaaaataataatttaattttttttatgatcacgtatattattttatttaataccacatgtaaattttttaaaagttgtgaataatttagggtgtgtttggtaatatatttttaattagttttttatttttaaaattagaaaaataaaaatattttttaaaatcatattctataaatttgtttttacttttcaattttttaattaagaatctaaatgttttttaaaaaaaattgctttcaaaattttttttaaacagattttttatcaatattttggattaatttgactcaaacttagatcttggaaaccgaatcaagacttggacctgcccccggtcccaatcttggacccgggcccaactccggacccaacttaaataaaatcaacaaataaaaataaaaataaaatttactagacatacttttgtttttttgtttttaaaa

SEQ ID NO: 393100 - DNA, 943 bp, Cannabis indica
aagatgtccaacactatacaaataataattgtgttccgcttttcagcctaagttttgggtccattttggagttgtttcttcattaatattatatttagaatggctttacacttgattttcctgttcttgaggtataaaagtttattttttacaaactggtgaaaagataggggcaaaactggaagaaaaaaaacctcgaaagctaaaaaattggtctatagtcgcgactaattatatggttgcgactatatggtcacgactaagggggttcattggtagagacaatgatttttgagattgttctatggtcgcaaccaagcattatgtggtcgcgactacgggctaaacacgagatttctgggcagttttataatttcactattctaagatatctccattattttctatataaaggtttcacgttttagaagttagattctcagaaatagaatcctaaaacctaagaaggagcaaaaggaagcaattgtagcgacccaaaacaagatcaccaactggttctttctttttcccttttaattttttatttatgttaatttctgtttcaaattttattatggatgtgaacatgagttttatgaactaattaaactcccaatttaaggatataatgaatgttcgttgatgtttcctcaaattagttaatatgattattagttttttttctatagattgtatgatttgttcttatttactttaactacatgttttagactggtcatctttaatgtgatttatgatcctaatgtgaaatatctaagaaatattgaacattatgagtactctaataaaataaacatagtgtaaaacgagagtatttacatagcttatgtgaaatttagattctgtaattgatgcaatttatatgttaatttatgcaagtagataatttaagatttaggaccttaatgatttgagaagagtt

SEQ ID NO: 393101 - DNA, 1190 bp, Cannabis indica
ctagtttgatgcattgtatagtgttggtgccccccaagtgaacacgcagacttatgatctcttggtcacttgcaattcaataagttcacaaacctttcctgggactttgcttggggtgctacctgttatacggatgtggaactgaaaaaggataaatttaagaagttaatcttattagcaagtggtttaaacacaataaattaggcataaacattgttttttattcattaattggtctgtgttgttgtgcaacttacataaattgaaatgtaagttaacattacaaagtttcagcttttagatatgaagtggctacccctattaccttgcatagccaaggccaccgttgaagaactgtgggacaccacacccaaagggctatgataactagctcttttgtactaggatgataagtaagtaaaactgctactttagagtagtgttctataagctaactactgatagtatttacaaaggttttatccttaccaatatcttggtaggagaacgagctctatcttcttgttgtaccttcccatcttttagactcccttactagttatctctgtaacttaataggggtattccgagataggtctggacactcctactgatgaatctttagtgtttaggaacactcatcggagcactaagtctcttatgaagaacttactatccttgacatgcttattgaagtgccttgctaccttttgccggtaggcctatagctttaggttggcttgatctcttcattcttcttcttcgtcaagggactctgtcgttaggttgttgtttgtttgctagtcataggttgttctcttgtgagatggtggcacaacctctagaggaaacattgcctcatagccataagcgagagctaataaagtttacccagtggtcatcttctcggtagtcctgtgcgaccatacgacctcttagaacaattcaagccagttgccttttgctttttcaaagtgcttctttagggtgtccttgagggtattgttgacagcttctatcaacccatttcttgaggttgggccatgacaaagaagctgttgttggaggaatttggacaacaccaaataaaataatatatttaaaatataaatagaattacgtgagtactcaacctagaatggcaagtattcaaactatggatagacacacgtattggaaatataaatgaa

SEQ ID NO: 393102 - DNA, 649 bp, Cannabis indica
gacacctttgtgcattttgccagacctgaagaagtcagaaacaacttcatagaagtcatcccccaccgactcccaatagtgtttaaagaacaaaacagacattccatctggtctaggggctttatgattgttcatggaaaaaagagtacttcggatttcctcatgagtagggacaatgaggagcacctccttatccgtagaagagattttctcatggaatatatgattacaattaagcgtctgaccactgtcagacccagagaatatcccttggaaaaagtctatgaattcttgaccaattaaatctcgagaagtgatccaattgttatctttttcaagatactctcgatagcatttctcattcctctaatagcggccgttaggaaaagaacttagagcactagtccccatccttaattcaagaaatcctagccctttgcctctagtacaaagctttcctttctaaggactcattcaaggatctccgaatgttacattcagttttccaatctcggtcatccgcaggtaagctctgaatcatgttaagtttttcttccagctctttgatactagtgtctagtttaccatatgttggaaatattttaccaggatctagatttactaccatgtatgtttcattaacatccta

SEQ ID NO: 393103 - DNA, 720 bp, Cannabis indica
ttttgtaagtttcccaataataaagcccgtattggaagcccaactatgccctaattgaagagatatgagctcatccacctccatctaaaaaatccaggctgccctgaacacccacaccacccaaaccacacatgcaacgagatgtaaatgttacaacgagcaagatgcattatcagcttcactaacctgtatgttaaccccatcaatacctacttggacttgatccattaaaggttttgctatatatgtgaaatattgtacaaagtaaaaaaatagttcaagacaagtaaatagtctttttataaaatgactcaagtggatctcgcagagaatttgcgaaaaaagggcatcttgcagtgtttcataatgaatgtgtacttggttgattttattgcattcataagcttgtctcaatgtttaagttaaacatgtgtaaatatggactaattcagacggtgaaactataaataacttattaaattagtcatatcttcgtttgattgtattcgctaccaaaatctataaaaagtaaaaaggatacatatatactatattgtaacaatacatatgcttcaaagtggcaccctatttataaaactagagcaatactattaggtattttacagtgtccaacactataccaatgtgatgtgttgcaggtactattagaatatttctaattaagaaaataaataatattattgattctgataaatgaat

SEQ ID NO: 393104 - DNA, 1486 bp, Cannabis indica
cgaatttaggagcaacagtaagaaagtaaagttggatcgattgaaagatataaggcttatttagttgaagaaggattttctcaacattatagactagattatgacgagataattagcctagttgcaaagattacaacggtaagggtcctgctagcacttgcagcaagtaaagattgaagattgtggcaaatggacaagaagaatgcctttttacatggagaattagatcaagagatatacatggagaaaccaagaggatttgaggatagaactcatccaggatatgtttgcaaactgataaaggcactctatagattgaagtaagctctgagagcaaaatggtatggcaagattgctaaattcttagtaaaaagcgattatgccatggcacacgcagattcaagcttattcatcaaagtagaataagcaatgattgcagttattctagtatacgttgatgatctcatcattacttgcaatgataaagcagagattcatcaaacaaaggagaacttgtcagttgcttccaaatgaaggagcttagagaattaaaaactttctcagattagaagttgaccgaactgaggagggtttatttctctgctaataaaaatatgctaaagacttgttgcaaaggtttggaatgctcgagtgcaagcctatctcaacacctatggaagctaatgtcaagctacgtgttcattctgcgaaggacttacaagacagaacaatgtatcaacaacttataagtagtctaatctaccttatattaacaaggtcagatatctcctatggagttggagtagtaagtcgatatatgcagcaactaaagaagccacatttggaagcaatacgatgaatgttgaggtacgtcaaagatactattgattatgggatcttttataagaaaggcgataaggttaaaatcattgacaactgcgatgctgattatgttaaagatcacgatacttgtcgatcaactattgggtatgtattcaagcttggatctggaataatatcttggtgtagcaaaaggcaaccaacaatatccttatcaatcatagagcaggggcagtggcaactcaagagagtatgtggttgatgcaattgataaaggatctacacaagtttacaaactatgcagtgctacttcattgtgataatcattcgtcaatttgtctagttgaaatcccagtatttcatgcacgaaataagaatgtggaggtacactattattttttaagagaaaaagtacttcaagaagaggaagaactataccaagtaaaaagcgaagaccatgtagcatattattcactaagaacatctccaatgagagatgtaaaagttgagctatattttgtacaaaaagtaattttgtgtatatttttacatcaattttttactattatgctccaatgtataattgtaaatctagatgcaaaatttaatatgttatttaatgatcacttaataatttattaaaaaa

SEQ ID NO: 393105 - DNA, 613 bp, Cannabis indica
tgcaccttaacctttcttcttccacttcaaccataatctctccaatggctgctacccttcttcctcatcctcactcctcctcttcctctcgtcttcccctatcccaactttcttttccagcttctgcttcactcctcacttcccgctccaaccgccaccgttcttccctttccgtctccgcctccctatccaccgcagaatctcagaccacctccggttcctatggcgacaaaaaactcctcctcgaagtcaaagatttgactgccgttattgccgaatcgaagcaggagattctcaagggtgttaacctcaccgtctatgaaggagaggtcagtcaattttctcttatacaatattccaatttcaaaacttttacccttgaaggccacaattgcgtgaccaacttccgttttacttggtttttggatgggtttagattcatgctgtgatggggaaaaacggttctgggaagagcacgtttgctaaggtaagtgattttgtgagaaattaattgtatctggttttactattgattgctaaattctgttgaattttttgggttccaatggaaaatgaaaatgtaattatggctgcctgaatactttggttggta

SEQ ID NO: 393106 - DNA, 1049 bp, Cannabis indica
tatttaccaaaagttgtgtaatttttacattgtttgaggatgtcaagttgatgatctaacatagacgacataagttgaaaatattaatggattgattggactgacataaatcaaccagatatgctatttttttttcaataccaatcacttagctcaagaacactaaagttaagtgtgcttaatctagagtaatacataagatgaatgacctctcctaaaaagttttactataaaatatgtaagtgataacaaagtacgttagaaaataattaatttacaaggctaatcgtcattctaggaagttagacccattaattagtttgtgtgggaggatgcctaatgaagacttaaagtagtgatgttacaatctaattaataaaatttgaatttaaaataaagtttgtaattttaaaatacaaaatattaaatgaacattaattaaaaaaaacaggatgccaaacctattcatgacaaaatgaaaggtaacaaatgatacacactacccttaagtaattaaatgcagtaattattaatataatcattaattcttttaaaaagaaatgaaaagctagctagagctctaggctctcgacacccaatttaactaatatatttttataaaagactaaaaacaattccatagattaaatgctaattagaaatttttccttccgaactttgacatgtactaaatcatgcttctgaatttttttggtcgttaaaaattctccttgaattattgagattgttagatttaaggacttttgtctaattttagtaaaaaaattctaacatgaataaaagtttaagggacataatttagtgcatatcaaagttttagggatatgatttggtagatatcaaagtctgtggagcatggtttagtatataaacaatcactgaaacagtaaaattgaatgaaattagacagaagtccttaaatttaacaatctcaatagttcggaggaaagttttttaacaaccaaaaaacgttcaaaagggcacgatttgataaatgtcaaagttcagcgaaaaaattactaattagc

SEQ ID NO: 393107 - DNA, 1474 bp, Cannabis indica
tctctctctctctctcttttagtcatgattttctccctctcactcttttagaaatagattttaggttttgggtttagatcaaagagtttcgtttatatgtgtgtgtttattttgttagacctaactttggtttcatttttatttagttttttctgtgtaattttggaggtggtagtgtcgtgttcgtggtggttgtggagctggaggtggcaatatttattttggatccaaaatagaggtggtgggtagttgtgctttaggctgacggttgttgtggatggttatggtggtggtgggtgtgatgatattttgaagaaaaataaataagaaaaagaagtagaaaattgaaaaagaaaaaaattgaatttttaattgttatcatttatttttattttaaattaatttactataaattttcttttattttttaatatttatttacatgtactaatacaattgtgccatgtgtactctgtgtccacaaggataatacattgtgtacacatgatagtccaacatgacatttaacacttgaatatgaatataaatagtaaattgctaacagaatacgagtattggagattttgccgttaaaatttaagttttaggggttaagtgcaagcaaagtgataattttggaagttttttcgtaaaaattaaagctaaaaatataactaagtatacgtgcgatgtatgtaacaataacctaatattatccattaattatttacttttaggacataaatcctaacaacaatataatactatgggcttcagtgataaaagcaagctgggccagtaacaattaatggactttttcatcaggagaaaaaacaaaatatcgtgaatatagattagagaattttctaatattgggccatatactatggtcataaccttttggaataaagaatgagcagttttgagccctaaaggtaagatgattaattgaaaataatgatttagaatgtaaaagattgttttgggttaattatctggtttgatgcctagatgctaaattcttgcttttagatttaattttgaaaaaaaaaatgtggggtttagataaactagcaaaatattaagaaatggactatagggcattaagaaataatttggtatcatggtatggctttcaatggagcaaaatattatttgtatcaatatgcaatttggtttaataagcctaaaataaaagtcttacacaaaaatatccatatgtaaataatatttggcttaatatgtgaagtttgtgttaagaattatcaaactatcatataataatgtttgtttctacatgaataatgtaatttatacatatttataatacaaggggatataaaaaggaaaatttataccacatactgtattttttctattttatttcaattttactgttgtagaaaatattatatttatgagcaatttgcggcgaaacccccttatgttttgatttttatacacttaaccccct

SEQ ID NO: 393108 - DNA, 823 bp, Cannabis indica
gggaatgcgtgcagtactgtggtggaactcttttactataaaggattgttacatattaaggttcagagcacaactcactaactatatatatgttcactagtactactactgctgagatatgaaaaacattatgtacatatacaatatatagtcaaacctcaactatatatatatatattctctctttctctctctcttattccatcttcttcttacttttttataaataccctaaaaccgacctagatcctgatagtaaagtgattaaagtgataaataatcagaaaaaaaaaagggaaacacacactaaagttataaagatattgatagaatgagaaaaagggaaaaaggtaatcaaaaagtaaaaaaagaaagaaaaaaaaacaactctctttctctttgttatcagaaaaagagagtgaaagagccgctataaagtgagaacagtagtactatatattaaaaaacgcataatatagacacaccagaagaatattatttaagattgactaatgtcaaaaattaatatatataaatttacattgttttaattattaataaataaataaatagggtagtactatttttattacaatattcgttatactcacaatataatttctgtaaagttttgaaaaatatcaaataatttagtttgtttggttgtgttttcagtttttaatttttaaaattgtgtttgtgagaatagaaaatagttttttgtcattttaaaattttaatggtgtttgtcacaaattttttaaaattgtttttagattttaatttacgaaaaaaatcaatattttagcaccataccatgaca

SEQ ID NO: 393109 - DNA, 1166 bp, Cannabis indica
tgtcaaaagacaagacaccatgatttacaattagattttagttttaatcctaacctaaatccgatttaaaacaaactaaaagtgaaacttaaaattttactaaaacaatcaaccccaattatttctaatcctaagtacatccaaatccagaagaacaacgaaatttgatcccaggcttctaagaaaccacaaaaccccattagaaccccccctatccttgaatgataacttgttgtattcaatttttcatgagttcaaatctctcatatatatatccatatatatgcaagctcatactaaataaatttactcttatagtgaatacatattgtacttggtttggagaatcatctagaagttactaatcatatgttggtaacctattactaataagaaaaataacaattaatgattgtcggaactactacatattgtggggtgaccatcgtcctgcctaagtttttaagtaatattatatacatatataatttacatcaattaaaaattttacacaatagactaaaatgtcatcactaagtctcaacatcattacataataaccgaagtcatataataagttttctatgtgtcttcagttgaatacgtctataacgcttatatatggttacgaatttctccaaaatcgaagctataggacgaataaaacagtaactatataaaaaccctttttgtagtgtgatattttctagctatctcctcccaattaaatgtaccctaagctatatacaatattataatatagatcgagtaatattgccagatgaaacacacagatatataaatataaatatataaaatagatatacacagagatttgatcatatcaagattatttatttacttttatctttttttgcttaacaccatatcaagattttgagtcatttcatttcaacttttaccatacgacagaattatagatatatattttgatcatggtgttacgtgtgtttaaactatttgtgtatttataaatatatatataaatagtgtcagggtcttaaataggaagctagagacagcccaaccttgacctgagcaatatatagcaaagttgttaataactaactaatattaatgtatggagcctgtattttatgtatatatatatatactagtaaaaagttacgtgcgaggcacgtata

SEQ ID NO: 393110 - DNA, 1837 bp, Cannabis indica
tagtcccaccaatttgaactttttatgtatacatgatgtacttattttacccacaggttgtcttgtttggtggctacagcccacacatacttccctagtgcagcattgtattcctcaatccaagccctccttatttttgggtttgcataaccgatcccatgcaacataaccgatcccatacattgtattcctcaatagtaattttttaaaaaacataaatattttttctattttattatttgaaaaaaaaaacaataatgaaaagatatttttttagatatgtggattgggtgaaaaaataataatagaaaaatatcttctaaatatgtacaatatgtttaaatttgtattgctatgttaaaaaatattttatgttatataactacatttaatataaaataaaaaataggagatatgtgtagtgagtttaaatttaaattattatattttaaaaatgaacaacaattaatttttgttatatcatattgagtattataactatattcttttgccttctatcatatttttttggattggtatactcaataagtagtattagagtaaagtgcattctgtatggaacaaatgtaaaagtacaagcatttatatgggtataagtactcatcattattattaattgattttgaaatgaaatatcataattcttgttatagtatcatgggttatttctagcaagtatttaattttcacacgatggcagtcagatgacgaaataaggaggggtcaaataaaaatatattttcacctaattttttttaatataaagtattttataaattaatataagaagttaattagccttatacaatatatataaaataataagaaatgctaagagcaccataaaaatacatataaatatatatcatacaaatatactcttcaaaaataaattatattattcatttttttttcactttttactataaaatagataactaatttaaataggctactaggtttgggcttcatttttaattttaacttcacaatttattattaggcttactaataagaaaattcacatttttctaataagtaaaatctaattattctaatttaatttatatcttatgcatactttttctttttctttttctaaaaaattaggagaggccatgaccactccataaatattctgcactatctacacatacccaaatagtgtacaagatgaagagtaaatcgcatgaaatcagcatagtataaagagacttgaaataaacaaacaaataaatgattgtcaatgattcgatgatttaaaattagtgagtaaaaaatagtcatcatcttaagataaaatattagagtatagtgttccacatgcatcgtatagtaaggtactcgttaatcaatattataactaaaaatttatttttaagactttgttatccttaaaaagtatgtgctaataatacgagtcacaaaaattataatttgttgtaaccaaatatgttttgaataacaagtaactttttattataactaaaaataatatttaggaacaacaaaatacaagaagtgtacattgccattttgaatgctctctataatatttgggaagctagaaacaatgctttatggaatagccaagtttacactataaattttcttgtaaatagaataaagaaaaagatttgtgtgaggtttttttcatttttaaagagagaaaacttatatggatgaattgaattggtttgaaaatttcagtgcaacttaatgtttccttgactttgtagtgcttgtaattgtgttaagtgggcaataagattttttactaaattctaaaaaaaaaaatatttaattataataaaaa

SEQ ID NO: 393111 - DNA, 869 bp, Cannabis indica
gtgagcttaatacttaacatgactttgatccatttcattattaaaatgcatctaataatgtcagagtggaataaaacttgaattaacggcataatcaagttaagtgaggtctctccctagctgatgaccagaaatgtgaagccacttgaggctagctcctgtggttgtatgcctcatgagactagctctagttgttggtaagtgagtctttgagactagagcatgaaccggattcagatcctgatagggaaaatttaaaacgcaagtatacgtttcattttaagtaataataccgcataagcacgagtatcatcccagaaagactattaccaagtactaataattatttttctactttctatttggcaaacaaaaatttgaggaaatattattaaaactaggaaaacaatttaactataaaattcaggtaagcaaacaatgattatgaatatcaataaatgaaaactagagtattaatttcatctacttgtcaatctattattttactaatctgttttacaatttcttcttccaattttaatagaggttcactaaaacaaatcttattattttttcaagatataagacctcaatctatatgtaaattttctacatatccgtgataaatttaaggtataaaaggcattaagaatgaaaatcctatttgctacacaagtcatacgggtactcttgtctaatatgtgacttatgtctatacaattatagcatattcaactctcatctcttgaatctcaaattgaaaatcaataaaaatatgcaaatagtgattaagtattcataagcattaaatataaattgtatagactaaaataaagaagacgaatttttaacaaaaaaaaaaaaataat

SEQ ID NO: 393112 - DNA, 559 bp, Cannabis indica
acaccttaaccttaggagggatgtcaaggcttcaaagatacttccactaagaactaggacctgaagaagaatcatgttgacccatatccaagagacgaatcgcattccaatattcactcttaaccatgtaactctcgcagagttataatgccaaatgagatgatcttgggactgattagaccgaggcatgccaagtatttgtgaagcttcgttagggtcggatctgagttgaaataggccataggcaaaaagaaaaaaatttggacccttattataaaaataaatggtatttttaaaaattattaaaaaaaatatgtatattttttgaaaagtaaattttttatttaggcccctaaaatgagtggccctaggcgtgggcctagccagcctatgccaagggccggccctgagcttcgttaaccaaaacaaagcatcaacaaggtttttctttcaatctccattagcaagtttaagatcactcactatagagataggaggatggccttatgttgaaaatattttaccaggatctagatttattaacaagtatgttgaatta

SEQ ID NO: 393113 - DNA, 1348 bp, Cannabis indica
aatacactgaaaatgtcaccactgaaattgcgcgaaaagtataaaataaaaactaagaatagacagtagggttttcggggtgtggctctagtcttgggtatctatataaaagatggaatcgacgtgattagatcttgaccattgatcttgtccgttttatccgaagctgaggctcggtagcggaaccaactattcgaaatttggttcggataacggcgttaggagttaacggggttcttcttttgtgatgctcttattccacgtggagggcaggcttattgggcggtggagatttgagaaagtaaccgacctgattgaaaagctggggggacaggtggcgtcatctagtgtatggtgggtgggaccagagagatgacgacacagtgtgtttgtttctcgtcgtcgttgggtccactgcttttgtgggctccacgtcaaggttttagaggtccattctcaggcggatacttcctatgttaatttacgatgccgatgttattgttttatctatttttttttttttaatatttgtggatttttttttgtgaaaattatacaaatcattattttggtaaagatttcaaaattgtatgtttatttttttaagtgggcgttacagcctacggagcatttctgcatagcagtaagataaattatttttataattacttagtaattttttataatattattaatgtaaaataaatgaaatttaatattaatattaaatcacactaataattatattatattttataaaagtactaggtagcatggtgtctgatatctcttatagaataatacttatagttatcaaaagacattggtgtctgatttttagtggggttcttaaaaagtaatcaagagttgcatctgaaagcttgggataagttgtgtctctctaaatctcttagaggacttggatttcagaaaacgaaagaaatgaacttggctttttttggccaatttggggatggaacatgttgaatgattgtcagtctttgtgctgcagagttttagaatccaaatatcttaaagggaaggactttctcaagtgcaagtataatgactcggactcctgactttggaaaaatattgttaaagtcaattcaatcttacaaaattttgagaaattcggaataatttacaatatagaaaacaatatttaaacagtctattttacacgcgtattaaataaaatagtcacgcatacaacacactatttgaatgcagttttcggcatgttaaactcttctgaattttttaaaattttacagaatgtcttaaataactataatttacatgatcatgagaaaaaatttgactaaaaaattattttagatattaa

SEQ ID NO: 393114 - DNA, 568 bp, Cannabis indica
ttttttttttttggggtggggggaaagaacactaaactgcatttgttttcaaaccaccataatctatctcaatgtttacaacctcttgttttatggaaattgttttcaagaactataaatattatttatttctaccatattcaatcgttgtagaatctattacgtttttgtgcaactccagtaaataaatatcacatcatatatgacacttaataaaaatagtctgcttataaaatttcctattttatattattaacattaataactaatttatgctacaaaaaaacattaataactaatttataataatataattatagtcaacaaagaattacaaattaaaaaaatagttaaaatgaaaaggaaaagttattggagtaaaatgatgttaacatgtgaaaattccacacgagttgcactaaaatacctctaaaagagtaagtttccttgtaaactaaacattgcattttatcaagagtctatggattgattctcacatttttcactaataaataataaaaaatataattttttagttaaattttttctcatagtcatgtacgttata

SEQ ID NO: 393115 - DNA, 1320 bp, Cannabis indica
atccacataataattaatagagtaacctaaatcgtgactattaatcaacatagcaactcacataagaaattacggagtcaatccaaaactgtttaattattttttaaaaaaaatttaaaaaataatatataaaataattctccatcattttcatttttatataccctacatttttcttacctcttgaaataaaagtagcattccacttttaaaaaaaaaaattaaaaagtagacattagatatatactttgaaacacaaatttatacatacttttctcaagctatagtttatgtattgaaaagaaaaaatatatgactatactataaacttgcatgattttatcgatcactctaaaacaaatttatacattatcaattatatttagtaatttattgattttactgaaaaaatatgtttcagatgatcatcataatcatcgtttgatcattacccaaaaattgggaagagaaccgaccggcgggccgccacctccgaagaaagcattttctcttggtcctggacacaaataattaatcaacacagcttaattgtaactttattaaatctattattataagtgtttacttcgtctttaacacttgaaaatcatagcttctaataaatcagtttttacttcattttcgagtttgacactttaagaaagctactattctttttgaaaaatgaattaagtttgatttatataaaataacaataattataaaagagtatgttgtagatttcgttacaaactttattaataaattataagctgcatgtactatctattttccatttttttttattttttgataacacatctagctattagttgtctgggttgaaagttttcttattaatttatgtatacatagttttctagctgtaaacgttagacgagttttttttatagtgccttctctcttgtcaattcaatgttagaatttattaaaacactcaagaaatataaataattaaataatttaatcgtatttttaaaagtactttaatatagaaaatactaaattatattttatacaacttttgctaaatcaaagaagatgatgataaagatgaacagaaacactactttgagaccattagagattgcacagaaaggtgtgatctttcaataatgcactatttcattaaagtatgtttttttatggagaaggggagaatacaaaagccctagtgtttattcaggaccactacctatttatagactcattatataatgagttttgggtatttataatttggcccctcaataatttataaattaacttatggtatctacatattatttccatgacaat

SEQ ID NO: 393116 - DNA, 685 bp, Cannabis indica
gtctttaaattcaataatcttaagacttatttttaacaaccttaaaaatttaggacaaaaatcctaagtatccaaccgtaaaagcatccaaaaaaaaaatatatttacaaatatttaaactttattttttgaataatatataattgagaattttttaaaaaaatatatcaatactaaatataccgaataagaaaaaaaaatatactaaggatccttttaaaagtagaatattaaattaccctatcatttttaaataataaaaaaaaaagttcagatctgccaaaatgcaaagcgaaaaaagtagagagtgaaacccagatttttttcttttaaagaaagaaagaaagaaaaaggcattggataccttacctgctgtggcagttatatacaagagaacagacctcaattattactgatcttaatctgcaaagctaatttcacattaataattattatatttttctttgaagaatgaagaaactaatcattctcttgtcggaaataacaaacaacttctaaattttctattttatttttattaataagaaaataaataaaagaagaagaagaagaagacaatgtatgagtagcccaggtgcttaccaaaagagccagagggcaatggtggtgattatagggtgggtcttcttctcttctcctatatttatatatagttttttttttt

SEQ ID NO: 393117 - DNA, 586 bp, Cannabis indica
ctttactatttgcttttaattttctcatattgttaaagaaagaccaaaaaagtttgaggacaaaaaactaagattattatatatataatccgtacttaggcatagactagttagttttactcatgtgtatgtatcaacttgcttcacattttattttacatatagtacaaagatatcttaacacttaagctctctatttcccaccttttcttttttgtcttaatatttaagaaactctattattaaaatattaagttagagaaataactaggtacttaactgaggagactcactgtagatctaaagagctcaaattaaagtcatgaaataaaataagggatctgaataattaaagccatgaaataaataactaatagagtaatgcatataaataaattatacatatatttggtaaaaaaaattgtatttattataggaaaaattatattactctgatttttagtagaattttttacaattttaagttagttttttttcatatatttttacattgttctataaaaatacaagaaaactagataatagtaacagaaaaatattatataaataacaaaaaattaacaat

SEQ ID NO: 393118 - DNA, 852 bp, Cannabis indica
ataccaaaaaatttctaaagatgcctcattttaataatttttattttttttataaaatttatatctttgattatgctaatttcttttttaatttttttcttctaattcatattcttaaaaaatatatctatcaaacaaaaataaattacattttaaatattataaattaaaataaaaaattatatgaagttttttttttaaaaataaatatatatatatacataagttaaaaaaaattatgaaaataaaatcaaaataaataatgaaattaacataaaataatgtgaggaaagtttttttttttaaaaaatattaagagtaatttataaaaattatttaagtttatatttttttaataatgtggtgtatattattttatggggtttcaaatagaactctcttattatttatatttcgattattattggacgatattgccccacatggatcaaataaaatcatattaagtcatatatgagctactcctctcattaccaattagttttgagatgaaaacgtatgattatcaacgtagtatcagagtcatatccctagtaagttttcgatccacacctatcagatagttagccaaccgcaagccagcaaacaaaaataatcaaatgtttaaatattaagccatatataagaacatgaactaatctactcatttccatttaattttaaaatggaatcccataatttttaacaattactattcctattacactaagcaaacaccatctagtatttctttttcttacccttaatatacatgaagataagggatttatcttatttttagggaaaagatgaaggattttaaaattatttaaggtgccgtttggtaacact

SEQ ID NO: 393119 - DNA, 539 bp, Cannabis indica
tgcacaacaatcttaccatacatagaaaattattttgtcaactaactgccaaaaaaaagactttacaactacacacataaagatagggggcatggcctcgcaaggaacaacgtagttccgcccctgagcatacttaatcttctctgtaactctagcatagattcaactaaaaaataaagataaatatcactaaattactatcgttcatagcatggtgagagctcatgcagcaacgaaaattaaaataatatgaataggaagtcacgtagaatattaatttaaataatttttttatgaagattttaaggaaataatgaaataacaaaataactatattcttattaaagtgataaaaaggtgtgtatcattgaaattggttataataattaaaaaaaaacctaacgtattcattttttagaaagaaaaaataatcagatcatgtcttagaatataggagaatttttaaaaaaaagaaaaactaacgtatttattttttagaaaggtaaaaaaattagatcatgcctgtattataggagaat

SEQ ID NO: 393120 - DNA, 1389 bp, Cannabis indica
gcaagacccatctaacacagtcagcataaccctctatagagaaagacaaagagcggttgggcagttatttattattaacccatgtgcacaaagataaaacgtggggagtgttcacgtttcatgaacaattaggaatgattagataccaagagaataactgtcaccatataccctcataaatagagacagaactcaaagaaaaaggaaacgacaaatcttgagagaaaatagataatattgctattgaaaaacaatatcattgtattctgtattcaaacacatctatccttaataagagagactcgtggactatgaagatttaatttcaaaacctcgtaaaaactttcttgttatttattactttctagataattatttattatataattaattttgtagtttatttattacaaaaaatgctaataatttaattaatgaaaatttgcgttaacaatttagtagttttattgagagcttttgtaataagacacagtaaagataccctcctaaaaaatacaacattgaattacactcatggcagatgatactcaacataacaaagagaatcagccagaagagacaacccatcgtccgggaaaggagcctctggctttgcaaagaacgaacactgctaaaactccccatctggaagaaacagtaaagactttaatcaaactagggaatagatcccaaaaaggtgaagtgaagatgtttatgatccaaccagatacgttttactggtggaactagaaaataggcaacttcgacaacacttggctgaatcaaatcaaaggaatgtcgaattagagcgcaaagcagtgacaacaaaggttgcacaatgagaggcccctcaaaatcaacttggtccatctgtaagacgaccacgggagaggccctgaggctttgaaactaggagacaggggaacaaccaagggaatccctcatatactcaggaagaacaacttggagagatatcctaatggatggaaaaaatccacaaaatcctagaaacacaagaaattaggagactcgacatgacaatccaagaacttcccatggatttacaaaccaagggaatgtacaacctaaagtactagagtcttctcgcatgaatacagattccaggcaaacacgacttggaaactaagaaattctctagtatgatgcgagaaatccagaaaatcaacctgtgataggtcgacccctaagacatccacaaaggcctaatcgcaatgatagagacaatatacacacttacttgagtaggggtcatgtgtcgaatctcttctaatagagaaggccaatgcgagaatagccacaagaagctggctcatgtaaagatccaaatggatcaaggttaaggactcgcgtgttggaaattattttacc

SEQ ID NO: 393121 - DNA, 761 bp, Cannabis indica
acacacgcacacactttatgttattattaggttctagatttttttactcttaagtatattttcggagtgttttaattatttttagttttgttttgttctattttacactttagtttgttaatattttcaagttcagtaaaaaaaaaaagagaaaagtgaacagttgaagaaaaaaggtgtgaaaaattaagatttaatcgatgttttgtcactagtgtgccaaagaaacagttcttggaatactttaaaagattcagtgctattgagacccttaaaatcgaatatgtaaagatgttggaatagcaccctagcatgaaaatttaatgtcagggtgctcttgtaagaaaaacagataaaatggttgagaattaaagaaattaggcgggcctcgacattgcggaaccaaagttgaggcatggtgcgaagtgttgtcgagtgaatttcgcaacaccaaattatattgtttgtttaatatcaaggagaattttatgtgaaaagacaagtgcgagtattcaacctagaatggcgagtactcgactgggaatgggaaaacaatcaacgaaagctggaaaataacaataagacagagaattatagtggttcagtcagattatgatctgcttagtccactgtagcaagggattcgtaggtgccatttcatggtggatcacctctttatatacaaagcaggtgtccaatcggttacacaaggattacatttattgttaatccattatttacatattgaattgcaataatta

SEQ ID NO: 393122 - DNA, 1095 bp, Cannabis indica
agagcgagagagaatggaggagatggatggtgcagctcgtgatagcaaatggatggcgcagctcgtggtagcaaaggagagaataactttgaaaaaatgagatctgatttttttttttgggaggggtttatatcttaagaggcggaaaatgaaatttaagatgcgataaattaaattttagatccgtaacgcgttaaatttaaacataggaattgccggaggtttaaaaccgtcagcaattaccatttaaaaatacacgagattttttatggcacgtttaaaaatcgtcgcctatacctccagacagtttaaaatcgtcgataataccttattttttctgacagttttaaacactcgtttaatttttttagtgacggttctccaaaaaaacgtttttaagactgtcgtgaatactcctttttgtagtagtcttctaacttatctataagaaaattgatcattcgaagtttgttcatatcagtttgtgtttaaagttttgaattcaagtgtgtgtatgtgcaatctattatgtcatgattataacttgtttgactgaatgcaaagatcaatgatgattttgatgatgtaatgtgtatggcgagttggtgtagggatttagtagacatcaacaatatatatttatatagggaaatttgattttctatacttacatatacctaatatttttccctaaactaatacttttctacattgaaaatatatgaccacttttccaaactccaaaaatacccctctcaaaaactctttttttttcattttttttgggcttttaatgggtcgggtccgatggcgcccgatgcccgtccgatgcccgccctatggggcatgttcttgggtttttgaaatggggtccgatgggcccgatgcccgtccgatgggcctgatgccaaatttttggggtccgatgggttttttggggtttttgaagtcgggggcccgatgggtccgataccccatccgatggggtccgatgggcccatcggaccgaccttaaaaacaaaaaaaaaattgaaatttttgcgcggcatcggaccttcttcttctccagtggtgttcggccggcgtgcgtgcgtg

SEQ ID NO: 393123 - DNA, 1755 bp, Cannabis indica
cacaattaacaatttaaccccgagtattagctaaaaaataaatataatatatacgaaattccaccatatttatttataccccataaatctaaacaaaaagaattaacttataatataaccaaggtctaaacctttcaaaaaaaaagtataaccaagctctaatataaatataatatatactcaatacaaccaaaatttctttaaatttgaaaaataaatccacataatatttaatttttttaaggtacataagatttaattaatctaaaaacttggaaacatttgacttaaatttacttaaaatttttaaataaactacaagatttggaaatcataatactattattattattataagattcatcggataaaaaataagaataatgatatattcaaattctaaaacttctcctattaacccatataatttccggacttacctatccttaactaatttcattcataaattcacgtaaaaaaacctaaattcattcctaaattcacacgtcaaaaaataatcattcataaatttcctcaaacctgaattaagataccttatttaattataaaaaatatgtaatgcgcattaaggaattattaatatagttttgaaaattatatattcaatttaataataattttttaattaatcttaactaatcaaaaacctaaaacatagtattatattttattaaatagctgactaacaatatatgtgaaaggatatctcaaaaaaacaatatatgtgaaaggtataacaaaacaaaacatgtgaagaaaaaaaaaccaagccgttattttatatttttcaattaattaagattagttaaatattttttattctgatcgaattaattatcaaattgttaataatatattactgtattcattaaaagttgtaagctagtccaagtatatataaacaaataaaatatcacaattgtacaatatttagcactaaaattaaataaaaaatatatttggttggtattgtataattgtactccaaaatacaatgattaataatgccaaattaagtaagaacattgatatggtccatgtagagcactaatgtgtttagtattattatgagataattggttagtaatattttataatttgtattaaagtaaaataaataagattggatattaaatttatcaattaatattactattattatacctcacaagactacttactatgaataaaaaacatacaagaaaatagttttcaattaattttgaatgaaaacaaactaaataaaaaaataaatcaaaaattaaagctaaaataaaaaataaaataaaaaaatcatatataaaaatataataataaaaaataaaaatataaataaaaaaataagtcatttattatgtgcaaaatttgataaaattgttaaacagatctcaaattaatttgatgttatatttttttagctataatatatcaaagaatcattctcttttttttttttaccagtaaaatatagcactacaggtcattggagatgctcgaatgtggttgtttataaattattagcaatctttaaaatcaaatatcaaactaaaagaaaatattgtagcaacataaccactatatttatgttatgttaaagtgtctctgagtaattttcgttattacttctcattaacacacgatgaattaaatgtttttttgggtgaaataatataatttattatagtatatatcgttattgtataatattatattgactactttctttattatatt

SEQ ID NO: 393124 - DNA, 468 bp, Cannabis indica
tatgtatttttaaaagacaaaaacacaagaagatatacgactaaggcatactataaaatcttccaatattatatagaaaatgacaaatgaacaataaaataaaatattaaaaaaagaaagctattaataattaaaatcaaacgagaccacacttaacaaaaaaatatataacaaaatcaaattcggtaaattaatatttaaaaaaaaaaaaggtaaattaatattgaaaaaataggtaaattaataaaaaaaaaatatcttaaaagtatttattttgttatgttgttttttttttaaaagaaaatgggtcaaaattattttaatcttaaccaaaaaaaaaaggttatttagtaatttttcccccccgaactttgacatataccaaatcatgcccccctgaacttttttggccgttaaaaattaccccctgaactattgatattgttaaatttaaggacttttgtctaa

SEQ ID NO: 393125 - DNA, 595 bp, Cannabis indica
aaaaaaaaaaaaaaaatacagctagaaccctatatgtaccaattagctcaatttgttagtaatagagatcaattgaagagagaaacacttatgaatgagcaatagctctaaatatatacaagttacaataagagaagtaataaaaatcaacaacctagcatccacaacagtccaacaccccctcaaacttagtgttgataaaaaatctagactaagtttttctctaagatacaaaaatcttgtgctagttacaggttgaaatatatttaataagtagttgtttgttgagaactttctctcgaacaaaatatagaaccagttgtatatgcttggttcgagaatgcatgattgggttggcaaacatcagaattgcactttggttatcacaccaaatgattggaagatgcttcagatgaacacaaacttcaataaggaaagcttggctccatattaagtttgttgtagcatgcgcaaggctacagtactctgtctcataattggatcggggacatttttttgtttcttagatgaccaggatgttggacttttattttaccaggatcttagacctactcacaagtatgttgtttaaaca

SEQ ID NO: 393126 - DNA, 837 bp, Cannabis indica
attccatgttgttgtccaattagatgtttaaagaataaatacaactattattagaaataaaatattgaattttataaagtgaatattgtaatttaataaaatcattacaataccgtgattctcatggctttggatattttgaaggacatagttgttaattctatcaatttcgtaatcataattataaggaatactacctattttatagatatttaaattgttaaataagccttcatagttatattagtttcataattgtggagacatgtagtttcacataaaatacctatttttgggttaaaactatttaatgaaatacttatggagctttgcatgttttcattgacagaggggcaatgtgtttttacttctccactatcttctgtattatctgttggacatttattgttatttaaaaattataaaataaattagtagttgtaaatttagaaagatgaacattaacgaacaataacaaattttgatgtgaatatacctattggaagaaggtacttttcggcacttgatgaagtgtgggtattaattccttcatttgattgtaaagattggcaactaaaacatagtagaaacacattgttatgttactactataatgaaatattttgattgttatatatgaataaaagttgttgtattgataatgttaataatactatttgattgaagcaattgggtgtgacgtagaatcttctccaatttcatagattttgcgaaaaatattactatttctaggatcaaagtaattttctttgttaaatcatatttgtatctactatagatagtagtcacttttcgcttgaatctggcatgcttgca

SEQ ID NO: 393127 - DNA, 1156 bp, Cannabis indica
caagaaagatgacatctcggagataagtagtcctgagtcatagcaagtcgacctgggaggggtccttagccctacgcctaggttgacttcgggaactccgagatggaagtttagacttcaataacatatttccaactcactatctttcggtattttgtaccataaagcaaccgaatctaggccttgagagcttaaattacatgaacctacaccctacaagtcaacttggcacctagggtttcacccagcacccagctacttgacatccctaactagggttttaaatttctgggactgtcttactgcaaatgggtcaaactttgcattaagatatgaactagacataccatagacatatttgagccatcataatcaaattcaaagaagttcagttttgagcactcgagcacccagcgcacaagttgagaatttgtcaatttgggtgacttccaagtattaaattggtgattcaacttttacatcatcttcgtctttatcaaaaatagagaaataggtactttcggggaagaaacaacacttcatgggtgccgaaagcaaggctcaatgcccaggttgacattttgtcaacgtgggctaattttgatgatcttttccgagaactttgtcaggcatattctctgttttagcaaatattaagattcaactatttttagagaccaaatagaacttccaaggggccaaaactggaatccagcgcctaggttgacatattgtcaacgtgggccttttccattcagattctcagaaaaagtgtattgggaattctcaaaaaaactcgggttggcctggaaacagagcctatcgcataggttaacctggtgttgggcctagcgctcaggttaacaatcgatctggtgcactggtttcgatcattcaaatgctaattctgctccaagcattctctctagaatggtcaaaaatagggtaggtgaccttgtgctcaagttctagaacatttgaagtattaaaatgacgtctcagaagctctgaaataagcactcagcacccaagttgataaatggcctggtgctctgcttatccaattctgattcattctcggtcgttagtcaaatttttcacaataattgagtgctgtaaagcccgcttagttaatttggaaattagcagttgttta

SEQ ID NO: 393128 - DNA, 922 bp, Cannabis indica
gaagtcatggctgccacaaaataagatgttgaaaagttcatggttcgaatgattttgggctatggagaatgaagatgaaggccctgctggttcaccaaggcttgtatgaggctctgcttgggagaaaaggctattcctgaggcaatgtctgacaaagacaagaaggagtttcttgcaaaggctcatagtgcaataatcttgaaccttggagataaggttctgaggaagatcactaaagaaaccacagctactggaatttggttgaagcttgaaggattgtacatgacaaatctttggtgaatagattgtatttaaagcagtccttatattcattcaagatgatggaagaaaaatatgttggagaacagattgatgagtttaacaaattgatcctcgatcttgagaacattggggctaccattgaagatgaaaatcaagcattgttattactcagttccttgccaaaatcatttggacatttcaagggtacaatgttgtatgggagagaatcaattacacttgatgatgttcaaaggagcttaatcaaaggagtgagttaaagaactctagcaatggtgatggattgtatacaagaagtgagaatagaaaaggcagtaaagaaacaaaaggaaaatcaagatcgaaatcacaatttagtggttggaagaacatcaaatgttatcattgcaagaaagaagaaaatatagaaggcttagtctaaaaaggcaaagtcaggtgatgcaagatctgaagaagatgcaggtgtgatgagtgatggatatgactcggctagtactttgcttgttacctctgagaatttaaattttaaatggatcaaaaattctgggtattcatttcatatgaaaccaaactaatcatgtgtaaagcccgcttacttaatttggaaattagcagttgttta

SEQ ID NO: 393129 - DNA, 740 bp, Cannabis indica
atatggtgcaacttcatcagatggaatgtcatcattcttggttagttttgatatagaatatactatcttttcaattaatgcgacatccaatttactattaaaagtatggtcagttgtaaaatttgaacttagaactcattttaaccatgtgtgtggtgattgattgtaaagttttcacttagatttcacagttagtattttaattatgttgtggtgttctatcatgttatttcatgaacaaatgccttggtagattagtatcctgatacaatggtatcatttgttgaaatatagcttttgaagcactgaagttaaacactactggtcaaaattaaatttaaaaatgaaactacatgttgcttatgcatgggttcaaacaactatgaatatgcaaactttctttaggccttcttactaaacttaatggtacaagtaagaacattttgtattataactagtaacagaggcatgttggatggacctggggttgagataatctcagcagtacgtcagcttagtgtaaactcttggtgatagtagttggttaatacacatactttcagaaatacaaaatacgaaggcactggcaagtaagcacaaaagcaatattgaagaaaaagtttatagaataatttattataacaccctcatgtatttttctagaattttaattatgggataaagcttacagagatgtttgtacgcccttcaaaaattttttggatgtgtaatattttttt

SEQ ID NO: 393130 - DNA, 1042 bp, Cannabis indica
ttagttaggtgtggattgatgacttgtcataatccattccaattaatatctgttagggattaggtttgtagaaggcctaaggccactgtagtaattttatatatgtattttccctataaagacttaatgaaatgatatcagtgtaagtggaggtttatctaacaatttctacctaaaccttcactgaattgatatctaagtagttaagccaaatctgagggtcattgctctgtgatcctaagatcacattatccttggtccaaccctattaagtttaaacaatgtttaaacttagatatggtgattaccttggttcccatatctgcaagattctcctgtgggtaccttgtctatgttgatgtgtccttgtgtcactttgtccctaataaagtgatacttgatttcaatatgcttagtcttatcatgaaacatagggttctttcataagtgcacacaactttgggctataagagtatattataggtgtactatctaggagttttaattcttctaggaccccttttacccaaatgctttcctttatagcttatataggttgcaatgtattcatgtacaacgccacaactggctgtaattgaaccttccaacttcacacaatttcctcccattagaagtatataggcaaatggggatttcctactgtccctgtccccaacatagtctgcatcaatatagcattctatgtctacctttccttgttgctgcttgtatttgagtcccagtttagttgtcccaattaagtaccttagtaaccacttcatagcaagccaaagtgtttttccaaggttggtcatgtatctactaagtacactaatggcataagcaaggtcaggtcttgtgctaaccattaggtacatagcagatcatatagcatttacatagggtatcttactcatctcttcattttcagctttagtttcagggcactatttcttagacaaggtatattgagtagtgataggttggttggaaatctttgaacccttcattgagaatttctcaattattttgtgtatgtaat

SEQ ID NO: 393131 - DNA, 512 bp, Cannabis indica
atatttataccgcaaattactccctcttttttccaactacttctcacttcttttaaacccagactacatgtatatcaaaaaggtcaaataaaaattaatggagtctcactattatagttttttttttcttgaaataattccattaagagaaatgctaaaagacattattgatatctaacaccttcctacagctggccttaatggtgtgcaggcagttccactgcacagggcccaaacattgaaaaggtccaatttttctttaaaaaaaagaattaaattcattaacttgggttatagttatttcggttagtatatcttacgttaagatattaaattaaataatactaaatataaaataaacgaagctattaaaaatgtagttaagcaatataaattaatttaatttgacaactaattgattattaaaaaaaaaacaaatatatatatatataacgtaatgagtataatctgtaacgccctaatgctaaggcacgctacagtgctttttcaat

SEQ ID NO: 393132 - DNA, 1076 bp, Cannabis indica
tgagccaaaatgatgacccccttaacagtggggttcttctcagaccaaaccagctcaattctaatcttccaaattgcccaacagcaacatgtcattgcaattaatttcctctgctcaccatcccacagatgcaaaacattatgtaaccaacctgagaaagaagttacagttggaacatcactccaatcctcacttgatcccaacaagctctagcaaaagagcaataaaccaagcaatggtaaatggtttcactagctatcttgatttgataagactttaatttcgaatgattaacattgtattcttcaatcaatgtaacatcgatctaacaattgtaacgatgtacggaataagtatctagagacaaatatgataagagggtgtaagcaacttgactagtttatttttttatttatttttttgaaaaagaattagttttaatttaaattattatttctgtacataaaaatgacaaacagctattgctaatgctttcattttatttaaaaatcatattgacaaagatcataatttaagagcaaaaataaagctgtcttatttttccatatataaatatagaaaatatttttagtaaataaaagtatcttataaaaaaattataaccaaaatttatatcattgtgattgtagatatagtaagaattcgactaattttgttaaaaaaaattaaaaattgaaatttacaatacaatagattgaaacaatccgtcaccctcacacatttatcatttttcttttatacttgtacttgtacaactaattattttaaactacatttgtagcacctctactataaattatttgaaatttatcaaaatctttttagatctctataattgtactgcacaccatcaataaaaaatattatattataatttcttcaaaacaaagatactcctaccgctaaagtaaaaaaataagtttaaatagcggcataagtactcaaagttttatgtttgtaagcggcataaacctaatgatttttttagtggcataagtacctaatatttgtaaaactgtaatttttctctattttcgtcagtacaggctccgttt

SEQ ID NO: 393133 - DNA, 687 bp, Cannabis indica
cctttggtggtttgagagtagagttctgtgctgtctttttgtaccaaaatatggcataagtcgatcatgccatggggaatggccttcttgtggattcttgattttatgttcaagttttagcctttttatgactaaatgagtcaagaccttattgatttccttgttgaatagatgtccctaggatgaaaactcttgtgcggccccataaatcttaagttgggcacatttgggtgtgagtcccaacactaaatggttagttagtgttcttatgagttttctagaagtgtcatagtgccatcaaataagatatcttaactaatttggcatttacaagtattggtcaaaatcataaaattgattttttttatttattcaaaattaggtataataaaatattaaatatgtataatttcaaattaatctgtgccaaatgagtattattaaaaacataacgccaatctattgtgagctcttggattaataatcctaattttattattatgtttaaactaattgttgaggagattatatctcttttagctgctgctagtggtgattcttgttatgctatctcgtgtgatgcgaattgtatggtccatgcactagcgaagtctgttactacttcggtaggagttcaattatggatgaatacttgtcctagatttattagtactcctgtaccagctg

SEQ ID NO: 393134 - DNA, 694 bp, Cannabis indica
actaagtgcctccttaactccaagagcctcaatgacttcagccgcataagtgccaccttggtatttggttgttatgtcgataaggtgaccaaccgaatcacgagccactactccaaaactgtatgcaatttctttctcaaaaaggctccatcaatattgatcttaactgtgtttgaagcgggtttagtatatcgctcaattttattatcatgatgtaagagatataatgataataaacaatttttatcttgagctttacgccaatggtcaagtgtagtcaatgctgatgtgagaacctgtgttgggaatgaagcttttttgtcccaaacaatagtatttcgtgacttccataaagcccaacaaatcatgatagcacgacaagaaacatcatcatcataactgttaaacataaggtcaagccaatgaccaatagttgatgttgtatcaatgtgagctatcaacatagctttatcccagcagctagttgcgaaactacaacttaaaagaatatgggaggctgattctgcacaatggtggcatacaggacacataggagatatcctgatgtgtttagaagcaagttcgaggcatgtagggagagtatttgtgacgaccctccacatgaaattctttaccttaaggggaattttaagatgccatagcttatacaaaaaacctgagttgttcacaccat

SEQ ID NO: 393135 - DNA, 2055 bp, Cannabis indica
ttgcccgttttagggcttctaatacttgggcactgccggccagatttggctggtggcgcctagggtctaggctccacggtgtagtaggttgaaggtggagggtcctccgttggatagttgttgtgagcggtggtgatgaacgtctaccctttttctttctccttgaggtcggctctttgatgcccaagttttcaggcgagtggtcatcaaccaagatggatggacgtctcttttgaggtatctcaagtttaggtcgatggtcgtgggtaactccgatctcatggactggtgggaggcgacgaatgtgggtttttgtgggttatctcccttttatttttggggacagtgagttatagcggcccttcttaggcgagaacttgggctttggagcattgtttctcttcctgttttctcagatcttagtgtcccatgagtttctactcaagcgtcttggctttggtacacaatggcttgtggttagcttttagagtgtcattgatataaagggggggaggactcaatttttttccaaagggatgtgcttctcttgtcttagcaccctcaccgttcaaaacccccttagatggcaaaattaggcttttattgtcggaagatggcgtcgtttctatccctttggtctgcttgtcttgggccttcgggtgacctcctttgcatgaggggaaagtcttttgaagctaacttatgttatgtttttatttggtttaatttttgttatttgtttagttttgtcggggttgaattccctatgtcttttgtggtgttggctttaggccctttttggggggttgtctccttcgatgctcctacgtgagccatgagcttaatgctcctttcgatatcagcgtgattggccgacatttgagtcatctcctagtgagatttgtgcagttcctctgccagacttatacagcttcgatttttgcttaacctcaaataaagttctcgtgtcaaaaaaaacaaaattattcctctctctatgtctttctagtctgcttaatagtagcttttgattattattttcttcctctgtccacaaaacagaagcaagattctccatcaaggtctttccaactctctacatccaatgaatatttagaatattttcagtctaccgtatttcttgcctatgatttcttaaaatattgttaccaaaacaaaaatgaaaaaaatacaaaataaatactttcaagggaaacaggctgttttagtgtaaccgtcaaaatcgacacatatctagtttttatttaactctcttccccctttctatttataacaaaatattatatcattaactaacttcacaaaatcgatttcaaacaaaaaaaaaaaactcaccaaatcttttggtcaattttaattccacatacccacatcacgggccttcccgttctttcattcagttgtacactacacaccacatgatgcttgaagtatgtgaataatattaatatttgtgcttaacttgtgaagttaataagattacatttttacattgatttatggaaagttgaaaactagaacatcatcaagtgctctccaaaaacaatatttaatagtactgtcggtgacttagtggtgtatattattataaataaagatggagaaaaaaaaatgcatctggagaaaaatatagggttttatgtgactttgtgatagagtgtgtttttggaacaccagtctgcccagttattacgagatttattacatgcagatactgaacctggctggctatatttagctctctggattcaatatttcaaatataataattaataatgtagacaattttcttgataacctatatacactgatcctgacgaataatgcagtcaaacacaaaaaccataataaatatagtagtaaatttccatgtgcttttacttattagacctccaattaatatatttatgagcaagtgggtttggagatgcctactgttactgcattccaacctacccaagttgagggaagttatttttctctctatcataatttagctttaaggaagaaaaaaaaaaaacagagtcttaaaaa

SEQ ID NO: 393136 - DNA, 536 bp, Cannabis indica
aaataaattatattatattaaatgaatgatatccaataaattatatttattggatatttaagaaaatattttatggcgcaaaccacataaattaaagttttatattttgtaatatcaacctaaagttttttttatatataataatttttagtataaataattttttggcataaaaaacaaaaattctgtataaataatttttttggtatatatttatatttataatgaattaaactataatataattactattataattagttacttaacaattcataatataaaatttttaatttattaaaaacttaaggcagctttttcttacattttaattataattattttttctcacagtaaagtatagttgcaactgttttttaacaacgtacttactgttggaaactaaccttgtctcactaaaaattatcttaaaaatgggattatactgatcaaatgtcaaaggcatgtaacttgccaacttagaaggtgtaattagttattaaattaaattttatgaaatctgatatatatatata

SEQ ID NO: 393137 - DNA, 1861 bp, Cannabis indica
tatatacacacacacacacacatctgaagttcacatattttctcacaattaagcacaagaagttttggcacaaattagtaacaaaaactaccaattacatgtgcatacgcattgactaagaaaaaaaaattaaggagcagtttaacaccttccataggccctgcaaaggtctagaatgagtgtgcgagtgattaacaatcttgacgaaatgctgagcttcccacttccttctagcttgcctttccttctctttcctcctctgtctccttgacgatctgtccctaacagggctcgttcggttcgcaaagtactgataaatctccgacattaaccggtccggcaaactcccgggagacccaaactctggttcaattgaatcaacatctccgaccccaccatcctccaagactaaattggccgagcttgaacttctttgaacaccatttctcctttgcccccgagaattcgaatacccaaagctcaaatcttcttcaacaacaaaatgggttttgcccatgaaactgagattgaccgggatcaaatccttctcccaatagtcaaagcaccgggagttagagaaatcttcgtataattcgcttcgaccatcgggatcaaggaaaatcacctcttggccctcggacgaaagactcataaataaaaacggtgcctttatcacgttatatgttccgttgttcgacggtgaaaccctagaaccggtaaggcacgacgaaccccattcgaagaatatcaacagtggggatgatatgtcagtggttcccgtgccgcttcggcgccagaaaccaatcagattctcccactcgctgagggttttatagaggagcttgtaagaggtatcacccttaacccatttcgtgatctgggtcttcaaaccccaacgccgatcgcacatggcgaaccagagcttgtcgtcgtttcggcagagcgaaacgaaccttttcgatgtgcacgcgaatgtggcgatctcggacggcataaggaacgacaggacacaaagctgaacatcttcgggaaaatcggtgaacgaaaaggaaaacccgcactcctcaactgtcagatttgagtcctcaaccctcgccattttctcagggaagaagtaatttttcttcagaaagttaaagaagaaggaaattttggataactattttttggtgatgaaaattttgtttttattgtcgaaaagtggtgaaacttgtgttcaaataaaattggtagattcttgtagaaaatggaattattcctgaggcagaggaaatgtgccttcaccttcagtagactcgtggaagctacagtctccagacacaatgacgcgggccaaagtggtaattgaatgagtatgtatgattatctgcgtgcgggtgcaacttgtaaaggaacggtatcttggtttttttttttttttgaaattactttatatattaggttttttttttctaggattttagttgctccgataatttttatatgaattgcttatatataaatttttgtaaaaataaaaaaatgaaaataccccatttttttctctatgaatggggtgttattctttctttctttaataaacaaaataaaaagataaatgtatttttcatttataataaaaaggaaaaagtgcaaacataatcttccaagaaaatgaacataggcacaaagtcattacaacattctgaactttacctaagaaatttcgggagaaagtaagcactcacacatcaaatacgaagggaatttattgtttggtagtgtttcaaaatcagattcgcgaagtaaattacaaaggattacagcaaagatttagatggaatctaaacttatttaagtcaattgtatttgtaattatttg

SEQ ID NO: 393138 - DNA, 1369 bp, Cannabis indica
cctatttgtataactaggctatcattgttttttatttttaagaactgttggggtacatcaggagtaggagaggaaagagaatttagtttgacaagtctatatctgatgattattaaggatagaaccctttgaaagatcttcaatctcaaatcaatttgaggtaattttctacattgttttgtgttttcttaagaaatttatagtggggttggtccatcttggaaaattttgagtacactctttatatacaactgtagatagagactcctgtcttctcttcaaagaaaagtctctctcccctcttactctaccagatagcttaggtctttgggggttatatatggcaataaggcaaataattctcctttcccatccctttcaagaaatcttgaccataggatacatacaaaatgccgatcaagatcgagtcagcaatcctcccattttctatattcaacagctccatttttgaaaagtaaagatcgtagctttaatttctgtttaccaatttaccccaatgaagtaactagaaacggctcctatgttcaagggcatatttggtatagcgtatgcatgtgccgacggcttcttaattgggggagcacttattttttagccgttaaaagtaacttctttcattgtcatcaacaaattttatatcttaaactttaattatcatattaattagtttatgaatatattttctttccttcatttacttttcatttggcattaaatgatcacttgcaataagctagaatattaataaagaactcgtgggccatcattaggtacttcgatcttgttggtcggttcttgtttttcagcaaacaagcattgtgtgatttgtacaagattctcgaagctcttgatgtggtgctgtttgttgtttagatttttttaatgcattctgtgcttatttaatttcagccatattctatagttaaaatgttttataataattgcaactgctccacggctcctaaatttttttaatgtgaaatactatttgtttttgtcattttttataactaataaaaggtttggttttctttccagtttttcagtttaccaaatttaatcaaagccaagatcgaaatcatggttgaagaaagtggaaatgaagaagttttggttgatgataacgtgtcaactgaagactggctgtcacacgcacaagagcttatccctgttgcaatggctaaagcaagagaggttaaaggattcccaggtagatggaagatgatcatatcaaagcttgagcaggttccttcacgtttatcagacttatcaagccatccttgcttctcgaagaacactctttgcaaggagcaattacaagcggtgtcaaggacattgaaagacataa

SEQ ID NO: 393139 - DNA, 1266 bp, Cannabis indica
aaataaaagtctaacatgataatatatgtatcattgcctataggctaattcagccaatactttatttttaaacttgataaatttattttttttattattttttttatttaagcgtttatatattattacaatcatgtataatctataatctgcactcaggatctccaacacacatgcactttcctatgaccacttgagctagtctcaagtggtttgataaatttatcttaaactatgagttttttatatttttgttggcctatataggttaagaaagtcttgttatctatgtagtgtgatataagccaagataataatatgctcttttctaatttgtacttgtcccttttactagtttgtttttgtagctcttctttgtatgcccgaattggaactgtgcggatcacagacggtttttaaattactatgtccgtccttataggtttagttatataaccatccgctagaataatcattgataatagtgtgggtatcaagtaataggtcattggaaaaaaatcatagttagtatagctgttaatagtagctattttctaaaatcattataacaatttaatttagttttgataaaacctaattaaacaacattctaaatgattttcaaactcaaagttcaaccacacatatatatgttagaaatttattgggatcacaattgtatatataaaatgtgtgttgggttatcaaataaataagtcaaatttatgtggtttattttagaataaaatttatgacttaaggacatgattgtcatgattttaatatgtggatatcataaagacaatttctaatttgatgagggaacaaattaaaaatagtcaaaaatgattaatttactattttttcagttattaataaacaggtattgatccccattttttttgtatagcttcacatatcttatgtttatttttgaattcccatcatcaagaaattcttatttcagagagaaaattttgatgcgaaaattggaagatcataccatttaaaatcaattctatggactccgatacgcttccactaatctataattctattatttgattctcatgaattaattagggctaaattcagaatttacagtgttcctaacatgtgatatcaagagcatccctaaattaatttttgaaaatttatggtattattgatctttaataaaattatatatgcagttatacatatatattgggcattttacaaaaatactggatttggggtaatagttttcaattttactgccacacg

SEQ ID NO: 393140 - DNA, 727 bp, Cannabis indica
aacgatgggcagagttggcatattagaggaggctgcacaaccccttgatgatagagatctagaggctagccaggtagaggtgcctgtggttgaccagggcgctgagagcccggacaccaagtttgaagtggaggaggctgtgcctgctaggaggaggatgtataggacttatgctgtcttctcactgccctctgagctcatatgatgttgacataaagccatttaacagacttggtcaaccctcaatgataggtttggaccgtgtctttgtacagtcttgaaatcctcaggttcttaaagtcgggtcatagggagaccaatgggtctttcctccatttgttatcactgtcgaggctttcgataggatattgacgagtggactagaggcatccactgtgaggtgccctcaagggatcagagagcacaccgactgaccttcggttggatggcatggtcggagcaccacatccagcaagaggcggttttgcctttgcacccctatttcagagatatagctacttactttgggatgtgtccaacacaaatcaccctaaaaattatgaaatacctctcgacaatgtttgttctttatgcgaagctaggctggccttagcctactttgtatgagattaggtattattttagtttgaagttttctccaaagcagaatcagatggggtactcatacttcagtcaggttggccaccaatggttgggtgacaccaac

SEQ ID NO: 393141 - DNA, 1304 bp, Cannabis indica
ggtacatttattcttaaaaaatactctaatgttaagattattttgaacgatatattttacgttcctacttttaagaggaattgacttttgcttccacttttagttaaacaatgatattcttttctttttgctgatcataatgtttatattatgtttgactcttgattattggagataatttttactctaacggtctaaataaattgtcattgcctctcttagcttcccattttatattacgaaaacatctttattgtcatgacacaaaatattgggtcatattttcaaaagaaaggattgatcgtttatttaaagctagaattattcttcttctttatgcttctggtagggatacttgtgttgattgtactcatggaaaattgactaaaacaagaaaaaatactgctaaccgtagtcaatctttactaaaaattatccacaatgacatcagtgggtcttattccactacgttgtgcaaaaataagtatttttataaatttcatagataatttttctcaatatggtccaccactttagtaaagaaaaatataacgctcttgataaactcaaaatctttcgaaatgagattgagaaatagttagtaagagtcattaagaacgtttattcggattgtagaggagaatattatgattgttatacagaatctagacaacgcatgaggcctttcgttgagtatggcgttgctgaaaggagatattgcactctcatggacatggttagaaacatgatgagtggatcaaatctgctagagttcttatgggttaaagtactcatgactggtacttatattttgaaccgtgttccaagtaaatttgttcccaaaactccttttgagttgtggatagggagaaagcctagtttgaatcatcttcatgtatggggtatccaactaaagtaaggatttatgatcttaatttgaaaaagtcagatccgagaacagttcgctataatatcattgattatccaatgcacacaaaagactatcacttttactgtcctgctcgtggtacgcgaattgttgaatcttagactgctaaatttttaaaaattgatgttgctaaaaatattccttaacatctcttgaaatgggggagtcatctaagtgaatttttattcttgtgtcatttttaagagataataataatagcagtcttcttcctactctagctgataatgcttccattattgataaatatattgctcctgatatcgaagatgacaagggtcctattacagatgaagggtgtattattgacaaggggcctaatattgaagaaggtcct

SEQ ID NO: 393142 - DNA, 1107 bp, Cannabis indica
gaactgctcagtgctgaacctctataaatattctcgtgtttttatttagttcattatattacatacacattatactacttgtcggttacaatttagactcactgtcgttggcaaaaagtgaggtcaacaccttaattaattaatcccttagataaaataagtttaatcttaaaagaaagccacctaacctaatgttaaaaattaccaaaatgccctttaaacttacaacgtaagtaataacaagctaaggggtaaaatggtcaaaagccataaccagctaaaacttgtttttatgtttatcataaatatatatttcactaagaaaaaggttctaagcttatccatatgattctaacggccatctatcgcattttccgtcattgttgaaaaaaaatcataaacattacataatgcatttataacttaaataatacatctagagtttaataaaatctccagaattgagaaattacaactctaatgcccatttgtaaaatttggacccacatcataataaactcatacataattataaaaacaacaataattaacgctaattgcctttactaatccatattctaaaatgtgatcattacagtgtatgcctgttgaagttctttctgttgttcgttaggcccaaagaattcgagggagttcttttggccaatgggccttgcaagcctaagcttcttcttcaacgtattcttgaggattttattgacgacctccactagtaaattggcttgtggccgggctatagctgagaaactctttacgattccatgctgaacacaaaagttaataaagtgctcgctactgaactacttcctgttctctgacacaatcttatatgggagtccgtatctacacacaatgcttttgataataaaatccaatgccttcttggaagtaaccgtatatgtaggttcaactttgacccatttgatgaagtagtcaacaacaacaattgcatacttgattcctcctttacccgtggggaggaatcctaccaagtaaattccccagattgcaaaaggccatgggtttctcattaatgtaattttggtgggtggtgcatgtggaactttagcatatctttgacactac

SEQ ID NO: 393143 - DNA, 785 bp, Cannabis indica
caaaatggtcaatttggtggggggaaacatgtgttcttaatgaatttgccaaaatgtcattttgtaagtgtaatttatagtgtgttcaagcgactataaagccagctcagagtgaaagatggtcatttgaacctatcaaaagatagcttcatgatcgttgtgatattagctgtgtgtgtgaccacaaatcttacttatgcaaacagtagtattttaagcttgtatattgctggtggatttcttcacaggtgtgggagctgtttcgatttggagtgtggcagtgggagttgcatgcatactcggttttgctggtgggtttgcacgcaggccttatacccttcctcatgtaagtttcttcttgcatttcaatgcaatgataattttctatttgcatactagcataacaatccccgggcaagcccttcttctggtttgcttttcttttcagatttagaatttgaggacagttgattttattattatggcttccgaagttttgatttttcttttttgttgctttgacattgtttgcaggatcattggatgagtctctttagtttctagcataaaatttagtatatgtgcctcgcacgtagctttttcctagtatatatatagatatatagaatatagatagattgattacatttttttaagtcatttcattactattaatggtttgattaatttagaaattaaataaaaataaataataaataccttgtaacttgataatttattttcttataaaactttaattaaaattaattatattttaaaattaa

SEQ ID NO: 393144 - DNA, 570 bp, Cannabis indica
aaataattttcttatttgaatttttatcgatagataaaaatttgaatctaaaataactatttaataaagtagtttacgttttttttagattgttcttatttgaattttgtttttatgaaatataaaataattttctcatttgaattttattttttgaatcatcaataaatcaaaatttgaatttgaaatagatatttaataaaatagtttaggcacttttttttttgtctgagattgttcttaataaaatatttaatatttaagatatatatttttgaaatgaaatagtaatttaatataatttttttgaataattaaaataaattgacaataaataaaataaaccataatattgtaataattttactatgaggatggttatgctgtttagctagtaatattttttgtttattattaattaatataaattataaaaagagaagaaaaaaaaaagctaattagtaatttttcccttgaactttgacatatacctaatcgtcccctgaacttttttggccgttaaaaattccactcgaactattgagattgttaaatttaaggacttttgtc

SEQ ID NO: 393145 - DNA, 968 bp, Cannabis indica
cacgtaactctcatctagttaatttaaaaaatgtcaaagatataattaatacttaacattattatagtgtattatactattattaatataattattagatctcatataacttaatttaataattactataaaatatcattaattattttattaaaattatctctagtcacacaagaattggttgcacgatatgtattcctattgtatttttagcacgtaaaataattttattttgtttataatagagtatactttaattatttaatatattctgtatattttttttaaaacaatctaaataatttatagtattaaaaatatgattcaaatatttattgtactcatatttttttaatacaagcgtgaaataaattattgaactaaaattttagaaatataaattattaaaattttcttcaaaattaatttacaagatattttaaataactgcaatgtacattgttaattcaaaaaagaatatacatatataaacacaataaaaatgcatcaatgcacctatttttacatcatatataagctcttaaatataaatatatataagagaattatgtagtcataaaaatacaaccattcaaatagtaaattacactcatgtatatataacattttcatagtataacacatttaaactttaatttgtcataatcgattattgaaaatttatcaaaaaattacaaaccatttttagatttctaacttgaaaaagtaacattagatatttattatagggagtagtgatgggataacaattcttaagcagcgagatttaaggtaaggaaattaagtatttttgtatgtgttgaactgcataatttaaattatttgtgtattagaataagattagtaatttattattatgaatgtgtatatggtattgaaagggaaatttgattaaatatgcttacattaccttaaaaaaaattataaacttatacttactaatattt

SEQ ID NO: 393146 - DNA, 1159 bp, Cannabis indica
ctggaaatccatcatagtttcctttacccatgaatgaacaccagtaaatttttcgatcatcattcatagagagaaccacatccacgcccagatctgaatgtgaatcatgaaaatcctccgataagcttgcttcttcaatagtctggatctaaagggacctccgtatgatccaccacagagcttgtgacctttatattgaacttctgcatctcctgtttccttcgcccccttagagagagaagaagagatacgaacatgcgcaatttatagttactattattatgttgaattaaaataataatttcacttatcattattttatttaacaatgatttatttaatattaatattaacaatgattaatattaactacttgttaatttaattaattttaaattattaattacttatattacaatttataattaagataatatatttattttactaagtgttaaatttaaatagataatttatgtttaatctatattcctaatgtttaactagtaattattaaatgatacgttttttttttaaattaaaaaactacaaattctcattaaactaaataaattagtaatgttatattttgaattattctttataactaaattacattggttttgaaattataaaattttaaataattatttgccaaattattttttatctttatttctaatttttttcactttttttgttaattaattatttgaaaataactactttttgtttattaacttttttttttattgttatttttaccaaaattttaacagcataacgacttaaaattcataaatcctaaatttttaaaacttacaaataacataaaaaaaaataatttcagaacaatatatacacaaaaataatgatttactcatccaaccgcagtacatataatcacaaaacttactttactatagatgatcagtatttaagatattcaaactcctctataacatgcataaacatattaattaataacatatataaactaatttattatataaaaaaattactaaactttgaaatgcaaagccaacacaaagcctctagcgggtagccgtgatatatctaggatgataaaagaaagactaatttcacaaaacataaaatcaaattaaaaaattatatatacatacatatatatatatac

SEQ ID NO: 393147 - DNA, 645 bp, Cannabis indica
taaataaataaataaagaacatatgaagtgccaagttacatatagttagaaccaaatttctctttttcctcccactatcttattctcctatcaattcaaggactttagagtgcaaattttatacaattgctatattcatgattgaataccaaaaaaagaatgttatgtatttttcccatttgattgggttgtataaattttgtaaaaaaaaggacaaaagtatagtattaatggctttagaaatagtagtagtagtactaagagtatgttcaataatatcttataatgaagtagataaggtacccctcccaacccaagtcctaccaaagctttattttttgtggtaaatatttgctgctgacaacacatggagagagagagagagaaatgtggtgtgtgcttaagataaaagtttggtgtggagtggaggaaaagggtctcacaagtcacaacacatacaaatatactatggccaaagccagagaggcgtgagaggcaagacgaattaggagaaaagccagttgcggcagcttagctaacccttttcacaattatatcaactcctttccagtttggaccttcaaagcactcaactaaacaaaccaaaagaatccaattaatatctctttctttctttctttcttt

SEQ ID NO: 393148 - DNA, 707 bp, Cannabis indica
tttaagaaaaatataataataattaagaaaaaaaaaaatagaataaaagaataaatgaatgagcacttatataaccttttttttatcaataaaatgaaatcttcattaaataattggtgagcataaacaactcaattatacgatttggtaaacccaaccaccaaactataacaatgtaaaaatagaactaattttggctacaacattatcaggtcgctataattaaacttaataatgacatgaacatattattataaattataatcatttgttattaacataaaattaggagaaaacaagttaagtgcactatttgatgaattcatgctcaaacaaaagttcacaagaagtctctttatagtcaaaacagtctccaagacaatgatacttcacatttgatgaattcatgctcaaataaaagttcacaagatcaaaatttaacagttatgtatactacaaggtgctaagacgagttacatatatcttttgatttatgtagatgacatgggatagcatccaagcacaagaggtttagatagacaaactaaggaaaatgcttgatactaaatttgacattgtaaggagtgtcaacactccaataagtgctcacttaaaactcaaggcactgacagatgaacaagctgcatttgaagaaaaaaagatgcttagagtgtcttactccaatgttgtgggaagcataatgtatg

SEQ ID NO: 393149 - DNA, 872 bp, Cannabis indica
atctcctcagccactccgtccagaaaaccctcctctttctccgccgccttcctctcctccataccttctttatctccgaccccaattcactcaactccggctttacctctcccacttggtctcccacattcgcggattctgagctcccttgggtctcttccacggcttttgtggcgagaaaaaactggcttcgtttctcggtgccattgatgctcgttgatctttgtttaatcagagaaaggttgatgaaagatgccggttttgatcgaacggctgaggttggatgagcattggtcgttgttgttgttgttgttgctgttgctgaaggtgtcaccgggaaccgtacggacatagcgagtgtcatgctggactgggtttaataccaaattcgatcaaaacagagagaccaagatacacattaacagaaaattgattatttataattgaagtgaaattacgacgaaattaacattctcctttaagatagtgcaattttgcttatacaacaatgaactgaaacccataacatgtgttgaattatgcaaaaatatgaacaaagaaagaaaggaaaaatgaagataagaagggtttcagaataatacctatgagatgagagagaccatagagtgagaaacaaacggatggcgggtgtgagcgagatagagtaggtttggctctggtctggtccggtggtgttcgacaaacttgatggatttggtttggtcgatgtgggcctagcaaatgttcaactaacttgggcttttttagcccacaacttgcaaactggacaagagtcatttggaggtaatttggtccgacaaatttttatgggataagttgaaaaatacttttttttttttatccattaatta

SEQ ID NO: 393150 - DNA, 1075 bp, Cannabis indica
aagttatgatatgtacattgatcttaataataaaaagtacataaatcgaaatatttacataatcataatgtagttacccgtaatgtgaaaaaataatttatgataagtcataataatatatgacttttaacattttttgttttatttgtttctgaaaaattcaaaggaataatatattttttttgcaaaatttaaatcaaatattatgtagccaaaattaaagaaaaattggcatcttaaaatagaggaaaaaaattattaaataaagttttaatatagaatattattagaaaaattaatagagtatagtgaaactttatcctaatattccatcagttcagttgtttgaatggtgaattgattatactttagactcatcgatcgttttggatctacatacaactggatctccattttttggtcgataatttttttgtaggtttttggacaaacaacctatgtttttgaaaaaaataatttttaatattatttttatgatgattaagataaaattcattgtacttttatttgggaaaatgtagtatatatataaatttatatatttaactgtttaaatttatctcatccgaatatgactttaattgaactacaataaatgacaatatatatttttgcaacttcttcgaacatcacaacatctatcaaattagtaccattgttgagttgtacatatgtcattgcactaataattcatacagaatatattaaggctggtatgaatgtcaattaagttcaaatatcaatttatgtataatgcgtttaccatggtttaggaagacatctatttttgcaaattggattcccacaatttgtttcttcattgtcgttgtagaacataattcttgtattacatgaatcacatgacatgtaataaaaattatggctgaggttcttcaatatgattttagcttcaatccaatactagtaggggtgttcatcaaaccgcacaaactgctcaaaccgtccgcaccgcaccacatcgcaaaaaaaatatggtttgaaattctttgcggtgcggttgcggtttgaatttttctaaaccgcgcggtgcggt

SEQ ID NO: 393151 - DNA, 2114 bp, Cannabis indica
atttttgtaagttttccaagaaattaagtgttaaaaccccttgcctaaagtgtactattgggcataataaattaataactgattatttaaataatagttaaatttcttctcttttaggccttgtgtagaagttagggggtcattgtagtgagtacgatatactgaattcaaccctcatccacactagtaaccccagttatgaagacccatttgcattgtttaaataattgtattatgattaattatattagtttaacctaattaaaattaaacataattaattctaataatatttgtaatttatttttcaacggattattttaagaattaatttagaaactttagatttagttaataaaataaattttagataattaatttctaaataaattaatttgtattttttttagtatttaattaaataaaaaattaatatttaagtgaaattttttgaaaaaaaaaattgtgaccttaaatatagattaatttttgtaacatttaattaaatagaaagaatatatttaagataaaaattaatttaattatatagatcaacttaaattagtaaggcatcctaagggtagaaccatcattagctggaatccattgatgtttattgtgaatattctttattgtactagccaaataatacaccttgaagttgagacactacgagggagtaatcggttatttaccacatttgtatatgcttttaatgaagaaaatggaagagaggtattgtggatagacatgataacattagctaagggtatacatggaccttggttagtgttgggggactttaacgacatactgagcctagaagaaagagtggggaatagagtcaaaagcactaaattgacaagtttcaaggattgtataaccgaatgcaagttggaagatgttaaatactcgggcagctactttacttggaataataagtaaggagaaggtgacagaatttactctaaagtagacagaattatggcgaatcaagcatggctagagcactacgtaaatgcagaagctgtcattttaacggaaggtcaatttgatcattgtcttgcggttttgtcagtctatcctcaccggaagattgggaaaaaacatttcagatttttcaaattttggcagcaaactaaaggcattgtggagctgatttccaaggcttagaatgaaagagtacaaggcactcacatgtttaagctaattgctaagcttaaaatatcgaagaaagagattagagtttttaattggactaaggtaggggacattgttgccgaagaaatcaaagctcaaagttttttgaaaacctgtcaagaaagcttacaaagagatcctcttaacaataaactcatccatgatgagagaatgattaatgagcaatataaggaaactcatagtaaatatctttcctttcttgctcaaaaagccaagacacattagctaaaagatggtgacgctaatacttcaatcttccatgctagcattagagcaagaagacatgagaatagaattttctccattaaagatatggctggaaatcggattagtgatccatccaaagttagtgatgcttttctcgatttttacacacaacttttggggaccaaaatggaggataggaagactttgttgagaagtgtcatctcggctagatctactttaaatgctcatcagaaagctctcctcagcaaacaatattcaaatggagaagtgaagatggcagcgttttcaatacctgggcagaaagcactgggtccagatggcttcaatagctatgtcttgcaagataattggaacattgtgggaagtgatttatctgaagctctactatctttcctgaacacagggaagctactcaaggagatcaatgctacaacaataacaatgattgtgaagtccaactgtcctgaaaatgtaagtgatttcagacctatctcttattgtaatgtagtttataaaattgcaacaataaagatctgttctcgcttaataaatatccttccttcaatcattgctcaaaatcagggaggctttgtacaagggagatttatagcctacaacattctaatatgccaagatctagttcggcattatgagaggaaaaatgc

SEQ ID NO: 393152 - DNA, 1242 bp, Cannabis indica
ctctctctctctctctctctctctctctctctctctctctctctctctctctctctctctctctctctctctctctctctctctctctctacttttctcagtctctcaaaaacacaccaagcatgtgctagcccaaaccccaacaaccatcttgaagccaccccgtggccaccccaacgacgcccaaatggctcccacaccctgatggtcccactcgcaccctcgcacatcaccataaatggagtccaactccatccgtttggagcccctcgaacgtcgccatcagaggtaatttatttctctttctcctctgatctctctttctctttctctcctccgatctttctctttaattttttttccagggtgtggtagcggtttaattgggtattgtggttatttatgtgtataaataagagatttttggagattttttatgtttaatatgtggctatatttataatttctttgagtcagtctacaaccgacggaaataagttgtatgtgtaatttctcaatatttttaacgtttctcaaccgtcacacaaaattaatatcgacattggcaaactgatgcaaactaataaatttttgcatctatgatatctatgtcagttattggaaccgatagaaaaagtttaaatgtcatttgaaaattgaggaaaattgtcatttttgttgtagtgctactaacctgtttattaaacaagtaatatatgggttgacacgcctaacccgaaaataatacgatatttacctatgaaaaatatatattcttacattttttttataattctcaaatgtaaaatatatttttttttagttaaatatgacacgaatatgtgaaattactcataaatgcgtcataaaaaggttgtaagcatgttataaatatataaattaaccaaaattaagcataattattggtaaaaataagtaaaatgagtgaggttggaataacccatttataaatagatcaagtttgggttttagttttagatacaagtaatgaatggattatgttagttataatatttgtatataacaaataatataatataatattaaaatagaatgggatatattatacattaacaagagtatattttgtactatgtactttagggagtatattttgtcaaaaaaatcatgaaatggaatgtgcataaagaaattaatagtgcaaagcaagacattgaggttgttaattccatttttggcatatttaattgacaaaaatat

SEQ ID NO: 393153 - DNA, 1987 bp, Cannabis indica
gaagaaagatcaccagattgtattccataattgttgacataaatgaatttagcatcactaaatttggtattagtttatgaacaagtgatatgagatttggttgaagagttgaactttttggttgacttttgttgtaccatttcttccatataaagcaataactgctggagttgatcctagttgcccctaatccaacaagagcaaccttccttgcactagaattactgtacaatctctgtaaaattatcaattattaattaactaattacaaaaattaatataagccaaagataatataattaatcttcatgcagattgttaaccagtaagaactaacaaaacttatgtatgtcatagtcaagtgcgatattgggcataagtaggttaatcctgtgtttaaagttactataaaaatatattacttttagtcacaataaaattcgtaactaaaagtaaaaaagttgtgactaattaattataaatgatcattcttatgttgtggccaaaagttacgtggctaaaagtattagttacaaaaattataatttgttgcgactaaaattaaattagtgataacttgtatcgaaatactatattttaaccacaagtaattttttgttgtgactaaaagtcaaatatatgttgtgattaaaaatttgtcactaaatgtattttctttttgtagtgggcccacctaacccaatggcccaaaaaaattatccttttaaaaattcacttatattttttgtgaaaattgcattgtatacctactttattttatttgttttcatttttaccttcatttctaaattctttaaaatatatccacttttataaataatgtctccattataccctttagattaatataaatcatgtgctacatttaagtagagggcaagaatatattaagcaacccactcataaaagtgggtagattttaatgaaatataatatgaaggtatttttgattaatggataaaaaagaggtattactcaacttattctatattttttactgattttgaaaaatactatatatcttgttaaggatgcaaatttttttctttggcccactaatattcaaggaacgattactaattttctattggaagaatatacgacagtttttcaactgacacaattaatatactgatattctaacataaaagaatttttttttgttcttacaatgatcgaatgattttttttttttaaaaaaaagagccataacttaccaaaacttgatcttcatatttttggatgagaagctcagcaaattgttgaggagtataaagatgacttgtattataaattgtagggagtaagtagttttgaagatagtcattatttcctattgtaatatgatataagcacttctttaagtaatcattttttgttctattttttatttttgagattgtaatttggtggttgtctatttgtttgtccaggctaatacattcaccctgtaaaaaaaataaaataaataagttggggtaattttatgaattgaaaaatattaaaagaaaatatttgaaaaatttataaaatttgttttttatattaatgtatttattgaattaaaataagaaatataccaaatatttgcctgattctggaagaattccacaacctccagatgcatagtttacacctttgactatgtcatagccagtagtattggcaaagggtggtatgaaatcatcaaaccctaaaagttgaccttgtgacaaaaaaataaatatatataaatattagttgatattgtaaatgtatatagatgtatagaatatgtatattacctaattaaaaacatgcatatcgtacactaacattacaaatttttgtacttttaatcacaaaatttgtcactaaaagtaaaaaaatcgtaattaattataaatcattattcttatattgtgactaaaagatccgtggctaaaggtattagtcaccaaaattacaatttgttgtgactaaatgt

SEQ ID NO: 393154 - DNA, 1068 bp, Cannabis indica
gttggaggagtttcactgcaaattactctttaaaagatatatataaaattacctaaaactaattatgactataacattaaaaagtagatatctatgttgttaaaattaaagtgaagtatttaattttaacatatgaaattacaaaatttatgtcacaatatttctatatatatttatattgtaagaaaaaattacttttagtaacaacataatttttttgtgactaaatatattttttcatttattataattaaaaacacattttgttacgataaattataatttttgtaataaatatctttaattacagatattttagtcatatgaattataatttataattaattataatttttacttttagacataaattttattataattaaaaataatttttttggtagtaatatatatagatcctctcccatggttttggtcaataaataaaattttaaattattatgttgtatatatgcatctaatgaattccaacaactagctactaatttagagttatatgacttgtcaacatccattatttatgcaggttctactaatggacaatgttatatatggaatcattctccattgacattattgacaaatctctctctcactttattattccaagagttgtctccattgaagaagtggttcactctttcaatcaagaccaataatgaaacactacacttttgattctttaaatgaaatggtattagtgttggagttgttctacaaggttctgcatgagttttaatacatgcaattatgtcttctcatagcaataacatattaaaaattgtattgagattgaagaagactgctaaagctagggcaggcttgggcgggtttggccgaccctgagttgtattgagttttagaaaaaataaatatttttcgacccttattataaaaataaatgatattttttaaacaacatattttaaaataaatttttcttcatttggatgccaggattgggtggaccttagacgtaggcttagtttgtcttagcttaagaccagagtttattttgaaatttagtggaccataaaaaaaaaaata

SEQ ID NO: 393155 - DNA, 1045 bp, Cannabis indica
tggaatttaaaaccccactcccatacttgtgagttctgaaagtattggctcttaaactataaaaaattactaaaagataccattaatacttaatacaatttaatatgtaatattattattggtgcaattaagtatcgagttttatataatttatcgtaatataatgacttttaaaaaatatggctaaccaatcgcaaaacactactaatacccaatatcaatactctaaattatattacttcttattaattttcttcctatgattttaaatttaataacaaattcttatattttatttttagaacatattataaatcatttatttatttatttattgaaagtattataagtcattcattaacaagaacattctttgaaaacatatctaacttatttacacaatagtcgagtactcaagctataaagttgaatgaacctactacaatagtttttactttctactgttgtgtcttttgagctgtagatagaacagaatataagtatttttaaagttaattgtgatgctacactcttcttcatttgattttattttagtattttgccaaacgattttaaaattagacaactaattatttgactagtttttttaattttaatcttagtcatatctccaagaggaagatgtcccaattagattgcagactattattttaattaattgtcattaataaaatttcattatttattaaaaaaacattaaatgttttaaagatttttatttatttattaatttgtataatccaatgtcaattgtctactagctatccaatttttttttaaagattttaaaactttgcctataatacacggcatgaataataacacacaaaataatacaatcccattacataattaatatcaccattaataattttcatttttctctttttccaaacaattaactattcctctttctttgataacacctcttgaatcctttcaaggtagttttccatagtctccaaactcttctcatctgaaaacccaaaagaaaaattaataataaataaataaaatagtatca

SEQ ID NO: 393156 - DNA, 1164 bp, Cannabis indica
cttaacaaaaaaagaaataaaagatagaattcatgaaataagcaagtctctcctgaaaagcttccacataatccttgtgattataccaatacatatacaatattctcctcatcaattttttcttatataaaaccgaaattccacgattccttaagctttatatatacttttaatatagaaaatatggctgagaagagtagaagattgatgaaactcatcatacacgtgagagagctgaagagaattttcagaaagtctaaaagaaaaaaatcgcgacgactatgaggcgaaaaacatagaattatcatcatcacctgctcttgtttgttgtgatgagcttttcatggcgtcagataagaagaagaatggtaaatatgcacagaagagtaattctgatgaaccttcttttattgcttataatattgtagcccagagacatttttctcttaggcctaacatctacatttaagaggtttattagaaatgaataaatatattatatatttggataagtacttctttatgctaaaactgcatttatatcttgttttctctcttgagcgtgttctatgttgtaaatgctatagagaatagtaaaaacaaaaggcttaataatggtatttgtctttacttttatccttataactcattaaattataatgctataatataaataacatttaaactatttatgatgtattaaatttaattattttcaataaatgtaattttaaaaaaaaaatgtaaatgatatttaaaaattgaaacaaatttacatagagtgacataaatatcgcctaattttaatgattacgattaatttttctaataatatatggacatgagctttatttttatataaatttgattattattaagttatttgcggctaaatctctaattttcacattctataacaattgaccccttgaattctttttttggcggctaaacctgctaaactacaatttcgtttgcaaatttagtttggcggttaattttatctgttttgtgctatgttggactgtgttgtgatgaaacaacaactcaacaagaacacattaaacaaaacaagaatcaatgaaaaccaattcaagacaatcactgtgttgcagcaaacataaaaccggtaataagaacatcaaatgtaaatagagaacacac

SEQ ID NO: 393157 - DNA, 1965 bp, Cannabis indica
aaatatattggaagttgtttatatgataatgttattggttgggagacgactgggatggatgaagagctagggttttgtttgtttgtttattttttttatttttttattttttttggtttaaaagaagaagaagaaaagaagaaaggaaaaaaaagaaatttttaattatttttaatttttattattttttaattattttttaattattaatattaggtgatccaataaaatttcactggcaggtttatttaacgattaacggaagaagtgttgaccaaaacgattatagaagttaggaactttagctataattttcttagtataggggttagatagtatcaaatttaaaagtttagagaatttgactgtaaattaacctttttcatttttttagggagtagccgaccatcccattagtaagtatagactcttcaagttagtagcgcacaaactccaaaacatatataatatcccacaccattacattaattgttattaaatactctcaaatgagtgaccacgatcaaatgtggaaaaaaaggtccgcattcgtaccagcgggactaaatcagtgcccataaatataatataatatataatgctactgggatcttaactaatgaaagcttttgttgtcataagctctatacaaatccactctaaaagttagtaaatattgggcttggtacattttgatgtctaaagctgtaaataaaccaatagcaagttaaaattgccacatagcaatgggcataaaaaagggtggctttcatatttctactatttcatcaattcgtgtcattttggtatgaaaatcattcaagtgttgtgttatagttgcagaccacttgcctttattctaatattttaagtcaacccttctatcattttcatccttaataagtcaaatttaaagtttttttttttttaaaactaataaacacttttttgattatgttttagtaattaataagatcgaagcttataaatgaaggcatatcaaatgaagaaatggtaggaacttacatggagatggaacaagtcgaagcacagggaagacatggatgagattgagattggtggtagaggctgttatagcattgtttagagttccacagcagagcatccatgctgctagaatcgttcttcccatgtcccaacacctacaaaaatcctatcatgcttgaatatgtcaatcgaaaacaaacttccctccgattctgattccaattccgaatcatcttcatcttcctcttgtatgaattccaaaacatatactggtccatattttgtaatctctgaattcttgcttgatgaattcacctcattctccattaataatgggccccacatcaaccaattcaatcttcaataatcaccaggtctaacctatatatatatatatatatatatttatgtaattcaaatgagaaaacttacgaagtaaaatcaatatgaaacaataagtattaggcgtatgatgatgaaagatctgatcatcataataagcctaacgaccaaggtgttgtaatgaatcaatattactcctatgtatatatattagtagcttgaagtagagaactcaatcaaaatcaatattgcatatagcttaaatgattaggatttttggtctctttactttatttggaaaaaggtaaattgtaaggagatggaataggctatagtggaagtcttaaaatgattggtctaaatctaagctaattaattttaatagaattcgtcttataaacgcatattgtctttattattataattatttgatcagtccagtttgtttatagttggaagagttttatataaatatacaaatataaatatatatattctaattccaaaagagaatgataaacggaatggatggaccattaatttatacaagacccttatacgtcatctactagaaaaacttgctacagtaaaacctctatccaagaatacacttgg

SEQ ID NO: 393158 - DNA, 841 bp, Cannabis indica
gtgcttttctgtaaaggtgagaagagaattatcggcgtaaacgaatatggagtaaaccaggtttcggagaagcatagagcctgtttccatggcgattatctcgatttcttttcttttttcgttgttgctaaatttagtatgtaatataaatatacaaataaaaattattattgagggtttgtgaataaaaagaggtaagttaataagagaaaagagatgaaaatgaagtaagtgggtgaataatttttctggagttttgatatatgtatatatgtagttttatcatgtgaattaatatatagttttaaatatctcataaaaaaaataataactgtatgtatatttgatatgattataggaagattttgtaggagtatagtcgttggttttggaccgtagaaggataggagaattgcatttattttgttagcagttgccttttactttctaacccaaaaataaataaataaaaacagttgttgacaagtcttccaacgacggatatagctgttacacaaactcgtacgtatattatatatcaatatcatattattatttttttaataaatgtagtcatagactaaaacttggtagcctttggaaaaaaagaaaaagaaaaacactagaactaaaacttggtagtttggtttggttagtacttagtagcacatgggagagagtatgtaggtgacaaagggctaaagttagaattagaagaggcaaataactatattgttggccaacagatctcatttgctcctagatatatagagtagagtagttcttgaatgcaaaacttatgtcctagagtttggagagaatggtcatctaccactctctc

SEQ ID NO: 393159 - DNA, 765 bp, Cannabis indica
tatactaataataatataatatctcataaaagtattatacgttataggtacttcttagtatttttcgaactttttgacactaatttgagttaatatcatgattatttaatattattaataaaacaattagggctgaatacaaagaagatacttgatgattttggaaatgtgaaaatcgaattaaaacaagtttaaaaattgaagtgaaaaatgtgatgatcatatgtatgttgttgcattatatgtatagactatatatctatacatatcatgtatatatgtattatatatgttaatataattaaataaaattaaactttacataaataatccctaatttcacacacacatatatacataccttaattaatgagatggtaatgtcttcatagaaacctatgatctatatattatataatattatatattgtggctttaaatttttcaatctattataaatagtttcagtgttgtaaattagtctttctgtgaagttttatcacacgtgactaacaaaataataacatgactacttagtcagttgtcacactaataccatgtcaacgtgtaattattttgaaaaaataatttaatttttttttattttaaagttttacgtaattttcttaattattaattaatttttaatttaataattttttaaaaatatctaatttttatatattttagggtaaataccattttggaccccctgttttacaaaagttaccaattggaccctgtgttttgttaaatgacaaaata

SEQ ID NO: 393160 - DNA, 585 bp, Cannabis indica
tgtgaataagtatctatgaaagtttctaaaatatatttagatattattatcgttaaaaattaaactgtatttatctgcaactaaaattaattaattaatatcctactaatcaacaataaattgtcttaattaatataaaatagttaattattgatactaaaaatatttctataacttttatgtagtccatatttttttaaaaaaaaaaattataataagaataaactttgaactttgaagtaataaattataatatttttagtcttatgtgaaggaaataattagttgtaataattatctcaaaaatttcaatatatattattgtatctttattgtattatagcttaaaagtttaaaataataataaaaaagaataaatgaattattatttgaagtgatatatataatgagttataataacctcttctttcattataataaatattttaatttgatcccacaaattgtattaagagatgaatattgctattgggcaccagtggtgcctagcactcttacgacgtgtcgtctagcgatactctttaaaaactattatattaaattatatgggacttaatacttaat

SEQ ID NO: 393161 - DNA, 580 bp, Cannabis indica
tttttttagaaaaaaaaaactgattttgttttataataactcttttcccttttgtgaggagtgataagaagaatgagatattttagattgtgcaaatgggtgtgtcgagtatggacggaggagagtggtgatggaatgggccccaagtgggtgagtgagcggcttagaaaggaaacttgcgtaactccagcgcagcacgtaccaaagtccaaaactaaatcctcgaaaatgagaatttcaaagcacgaaaattcatgtctctaaataaataaattgtttgttgagagagagacacgtcatcaattatcctctttactctccactatataattttaaaatgagcattgttattgagcacccgtagcgatactccctaaaaactattacattaaattatatgagacctgatacttaatttaatcaatagtaatattaacacataagaggtgttagacaccactggtgatctttagtatttcaattttaaaaaagtactaattataatctcatattataattttttagtcaattttcacgttcgaaattacatgtcgaaatattttttcatagcggtattcat

SEQ ID NO: 393162 - DNA, 752 bp, Cannabis indica
atgtttggaactagtatgtttcacaacattattgtgtcatacctgtttaagtgattttcttacttccattctgcagaacctagtaatgcagcacgtggaccattctgccggcgatctcattcatctattgcaagggcttcttaggtatgaaccttctgaaagaatgactgctcgtgaagctttaaggcatccatttctgtcaagggatcactttagaaggtaaaatcttcatagtatgccaaaattgagcaatcatggtcggcggttttgatcattcagccatttagaatgggaacctgtattggcgaacctgtcctaggttgcgttacgtatgtgagcttttatggatttacctgtgtacatatcagattactgattcactggaagagttgggcaagctcccctctgaccgtcgaccatgtttattgtatagttgtattttcaaatgatctttagttgacatttgacatcgtaatcatataccccattttttacatccatctttagtttcttattaattattgtttgttttgaattattacaaaatttattattatttaaaaaaactcaaaaattgctcgggtaatcacttaattataatcactttcagtggttaaataagagccagtggtatgatgtttgggaatatttgtttaataggtagaaaaacctctccatttaacaaaagcaatgaaggtgctgttgggcacctcgtcatcaaaaataaataaataaaaaaattaaacaaaaag

SEQ ID NO: 393163 - DNA, 622 bp, Cannabis indica
aagagaagaagatagtagtagcagctgccatttctgtaatttattatagataagcacattttagggaagaagaaataaaatctatattttcacttattactatttttataaattaagtgtaaaaaatttataaaattaaaaattactaaccaacgatttatgtgttgaattttaatgttaattagaagtacatacatactatgagatactattagtttttagttttacaattgagtttagggtcaatattttacttgcgactgtgtgtttttctacgagaaaatgagtttgagattatcacattacaattattgattctctttcatggtctcaattggaagaagaagcacagctctaagaataatagctttacaaattacaattatagaaattgagaccattatcgtcttcttttaaatatattaaatacaatacaattagcacgtatataaataattctacacaaacaacttgaactataatgttattttctttctttttttctttttaactcagtcacaacacacaaaaatttagtagttggtgtaaatatctcaaatagaaaaagaccctaaaatgcaattaattaggctagaaaaaataacatgaaatatgagtttaa

SEQ ID NO: 393164 - DNA, 1106 bp, Cannabis indica
aaagaaattctaatatattaataaatcaataacatagatgtggcaggaaatagataaattatgagaattgtgagtgatgtattaatttttacctacttagctaaataaaattcttactcggtataaaacaaactattataaaatatatacagattgtattcttaatcgtcaactaatttataaatattataaaatattccactttattttctaactacatgaaaaaaataaagtacttttaacaaatttaatatattttaaatatatttttatattttataatttaaaatcttattttttatattaattatttaaaaatattaaatatagtaaatcgtacactgccacttgtcatttaaattatattaaattattcatatattaaatgttaaaaaatatcaactaattagagcaaatattatagttgactaaagaaattaaaaaaatctaaaactcatggtgttaatgataatcatatatagaataaatacaaagatgccaccttcaactacagccttctcaatgagaagggacttcattttcttcgcttggttttattggttgcatatagtagaatctcattaacttcatatgttctcatcttcttgaaaaattgaacgagtaaacaactaaataggtcactaccaaagtgagcttataatgattttctaatttctttaaatacaattagtgttagataatagaaagagtcaccaacaatattcttatattaatttatattttgagaatcaaatttattttaagacaaaggagaagcgagagtgaatcagaggaggaagatgtgctctcaattccaacttcaatcaaatctacacttttaccacatttctcgtagacaaatctaagaggaccacccatctgaagtagagctcaaaatagcatatgggttttccaaaatatgataaataagtcatgaccccaacaccttatatcacgctcttagataaatcatacttagaaaaataatttgaagtaatgcatttagagttggggtagtgccaaagactcaaaagtcttgtgtaacgccccaatatttttccttattttacaaaatactaattttgatgcattaattaaaaagattc

SEQ ID NO: 393165 - DNA, 2729 bp, Cannabis indica
gcctaacattacaagcctagagagaccttctgattcttggttgtgcattaatttatattagtggagaatagtaagtattgcaagcatatggaattttggggattgatgattgtaattggcatgcataaagtggtttaattgttagttaattgtattctatggtttcatgagctaaatgaaaataaattgaaatctgtcaagggtgtaattgaactaaaattctggataagcaaaaatatcacctatcgaggtatagatcataaactttttcccctgttttttctctctagcagctgaagctggcgccatggccaaaactaggtcgaaacaacaagggaaatcgaaagcgtctgttaacaaaccaagaaagaaaggccctaattcagaatcagatgtcattcggacgaagaagatggatgctgttctaggaattgctcccctggagctttctgaagaagatgaagagccagaggatgcgatggctaagaataatcgctcagatggatgttcagatttctttcgagcccctctatctcccactgcatcattgaatgagatcaaacgaacggaggaggctaggtcagtttttctgcagtttgtgcacgcgaataaccaatgtaacagtagcttgggtcaaggtatgtcttcgatccctcctgtgctgcgttctggatctattgttaagaatttagatcagtcttttgttagatctgagaggcctaataaggtcaaaattaatttcgaagatattgaagatgaggtgaatttttggagtccctccattgtatgctatgttttagggtctaatccccctctgcatattttggaaggatttgcaaaaagaatttggactgataaggttgacaaggtgaaattgcttgcttttggtatatttcttattcggttcaatacaatggagattagggatcaagtgttaaatggaggttacatatttttcaataaacgtcctgtgatcatgaaaccatgggatcctaacacaaatttcaggaaagaagatgtgaaacaagttcccatttgggtgcatcttgaagacctcgaactcaaatactgggccagaaatcccttttcaagattgttggtcaagttggaaaaccgattatggttgatagtgtgacaagagagagggagaggctgaattttccaaggattctcattgaggttcagatgaatcaagagcttccaaacttattggaatttgaagatgaatacgggtcggcttgtcatgtgggaatccagtacgaatggaaacctataacatgttcaaactgttctggattgggacataagactgaggactgcaggaatggtagcaaggcaaaacaggaatgagttataaaagaagatcataggaaagctaatcctattgttgataatgaaggttttcaggcagtgagtaaagggaaaagagtcagagagcatggacaagtttcgaccagaaaggtgcagaatgggttccaagcactggctgataatgaagagttgggaaatggtgactgtgagttagttgcagcaggacccgtggctgatgcagcaggtacagtaatggataataccagagggggggggggagttccctctttgggtaatggatagaatcatagtttgaaatgttcggggagccaataagcagtagaaacaacagtaaattaagcaatttattaataatcaaagtgctggttttgttggtcttctcgaaactagggtcaaggttcacaagcttggaaccttgtacctaaatgtgtttaaaggttggtgcttttcttcgaatatagcttggcatcaagggggtaaaattgtgatagcgtgggatcctaataaatttgtggttgatattctcaaatgcactagtcaaataatgcatgtgaaactttcagtaattgatagtagttttgagacctatttgacagtggtgtatggggccaatgacaatgagggaagaacttttatgggctgacttgtgtgaattgagtactaaggataattggcttgtcatgagggactttaatgctatattagccaaagaagaaagagtgggacatagagtttgttatcatcctgatacagattttatacagtgtgttcagcagtgtcaacttgaggatgtcaaagcaacaggctgctactttacatggtcgaacaaacaacaaggaagagacagaatagtttccaagatagatagaattttagccaatcaagagtggttggataaatatccaaatgctgaggcaatgtacttgaacgaaggcacctttgatcacagtccagctattttgtctttgcacccgaaatggaaaagtgggagaaaaccttttaagtattttaggatgtggtcatctcctaagtatgttgaaaaggtttcggaagtctggcaaaaggaaaagagagggaccaggatgtatcagttgatgagcaaattgaaagagctaaaggctatactcaaagagattaatagagaaggtttttcggatgttcatgctcagtttgagcaatcaaaagctgatctaaatgacctgcaagataagctacaacagggatccgctgaatgctgatctacatgaagcagaatcaaatgcccgggagaagtataacactgctatgaagaattatctctctttcctccagcagaaagccaaggctgcttggatacaaaaaggggacagcaactcagctctatttcatgcgagcatcaaacagagacagaggcaaaa

SEQ ID NO: 393166 - DNA, 775 bp, Cannabis indica
gaagctagtatgctcttcctctgttgcgtgcatgctgatttggctatagatagaataagcatccatgaatgtgaggagttcatggccagttttaccatccactagttgatctattcgtagcataggaatatagtcttcacaacatgctttgtttaggtcacttaagtcaacaaaaatcctccacttaccattcggcttaggcactagaacagagttggataccaaaacagggtagaaagcttccctaatgaagttgctctctcgcaacctttcaacttctttcttgagagatttatagcgctctttgtcaaggagcatgcgcatctattgcataggtctgaagttttctttttctatgttgagggcatgatagaagacctcagggtcgatttggatcatgtcctcatgggactaggaaaagatgtcttggtttttcctgaggcaagccataagagctaggcttaaaacctctatcaaatttttaccaaccttcactgccttggtcaggtccatcgtgttgaggggaatttccacgaattccttggatagaccagctcttgagttaatttttccaaaacaaggcttgatgtcgccccatcttgggcacactttcaagtggctttaagtgttttctctgtcttctccttggttacaaccttcgaggtgttcatcatctctttagcctcggtgggagaggtcttggtcgttccccttgatgttagaactgttgggttttatgccctaaataaaactctttacaatctgattagctatc

SEQ ID NO: 393167 - DNA, 1222 bp, Cannabis indica
caacgacaacaaaaacaataccagtatacctaccacctctgaaaccatcactcgaggccggtaagtttttctaattttctaatgaggttaattgataccatatggaaagaattgtagattgtaaaactaacatagagaaagacaattacgttttggccataggcaggttgcccagcataagattgttgaccgtacgcattactccctcttgaagaatacatttttctttcacatagacgaagcaataattataataaaacctgcgaaacgaaacaatacaaatacatatatatgtatgaaaatcacaaattgaggaactacgaaccacataatcaggttttcaataacagaagtttcaaaaatcctaatttttcctaaaaaatataaaaaataaaaataaaggaaaatcctaaaagaaatcttaccggaaaataaatatagaaataaagaaaagggaaaccctaaccaattgaggatagcgaaagatttggttttccaacagcgaacaaaaccctaactcggaggaggaagacgactatatgagtgagagatgttttggaattttcaatttcggtgtcaaaatcctttatttttcactgtctcgcgggctaacaaatgggcctatgaaagcccacgtccctataaagggctcggtatgcccaaatacgctacacacattagtagatatattttcataattaacaaacaaaaatattgcaaagccaatctactaattagtttggtctattaatctgatagtttggtggtagttttcaaagttctctccaaatggccttttcttttggtttattaattagtaattgcaatttttttttatgaatattacaaatcttatttcttatcttcttttcataattttcaaatttgttttatttcaagatctataaatatagatagcacattgtttagctcgcaacttttatttttttttttgagagcaatactcattctgccctttagaatcttataatgactgatttaccgtttaatgaaagcatccattttcattcaaaaaaaaaaaattataaatccaatttatcatttttattaatatttttaatgattatagatttggtaatctatctttctatatagaaaaaaatatacatactatagaattttgaaagttcttacgttaaatatgcacttttaagtttgaccaatttatatagtattttttatttttaggtctttttatggt

SEQ ID NO: 393168 - DNA, 921 bp, Cannabis indica
aaaaaaaatattttaatatatatgtactacggtgtatatttttgtaaccatttcacacttttcaaaatatgaatattattgttaatatacagtaacagtactataaaaaaatttagttttagtcacaacaaaatttatgattaaatataaaaaaattatgactaattataaattattattcttatattgtgactaaaacatccgtgactaaaaataatagtcacaaaaattacaatttgttctaactaaatgtatttttagtcacagtacttgttgtgactaaaactaaatttgtaattaaatactatattttagtcacaagtaatattttttagtgactaaaagtcacattaagtcacaaaaaaattatattgtgactaaaaaattattactaaaaataacagttttttatttgtagtggaattattactacatattgttttatatcgcatgcctcaatcatagattaatattatcacatctttttaaattatacaagttttattgtgatattagccactaaatctcttattttttttcttctttatcaactgtggtgttttagttcagtcatttcattttttattttagcttatgcgtcaccaactgttttgacagtagttggtacccgagtttgttgtccaacaaacaaccaactatacctactataaatagaccttgtaatacactttttactcatgttgtatgatcagattttactaagaaatagagtgaaaaagagggatgtataagagaatcaagtgtgtttgatcttgattccccataggtgaggttatttgcaatttcttctcatccgttctccattgtattcaggacactgttgtactaatttcaacatcaataaaggtctatgtttatctactcttggtgttaattttctctttgttttgttcattaagt

SEQ ID NO: 393169 - DNA, 659 bp, Cannabis indica
aattcttaacacgaacagatgtaacaaattttaacaagtttttgtcattacacctctatgtcatattattattaagttttattttgataaaaaattagttcaagattctatttgtactatgttagaaaatacatggtctatttagtcatttaacaaaacaaagagtataatctataatttttttttaaatacatgatctaaaatagtatttaccctcccaataatatttatgtaacattaaatatgaatgttaaacgaaacatgttataactaaaagtaaaaataattgataataatagtacttttggttgtattacttattgtaattaaaattaaattaataacaatttgtatctaaatactttattttagtcacaaattttttgttcggtaaaagttaccaattactcaaaaaggagcatcatataacttgtaaagaggtcataaaattttgactttaatcataattagtctttaaaaagtagtctttaaaagaaaaagggaaacttaaaattttccaactaagttcaaatatcaagttgataaaaggttcgatgtcgtttggaattaatagaattatatattttttattttatttttttagaaagaagaagataatagaatcgattttttagataattatggtgtcgtttggtaac

SEQ ID NO: 393170 - DNA, 2651 bp, Cannabis indica
aggaagattccttgggtgaaatgagagaaaggtatgtcagcctaaggcgatgggtgggctaggattttggtactttcaactttttaatcaagctatgttggctaaacaagggcggaaattatttcaatactcagattccttgcttgctcaaattttaaaatataaatattttccaaattgctctatcctagaggtcactgaaaaggatggttcatctcatctttggtcgagtttgatctggggaatggatttgcttaagtgtggtcttagagatctattggtgatggaacacaagtttgggcattcaaggactcatggctccctcatctaacgtctcttcagccaatcatgaagaggagtaatgatgattgtcgggtaaatgaatttatccttccttctagtgcttggaatgtggtgaagcttaatctagttttttttttgctagaggatgtggacgtaattcttgttattccattagcgaggcgcgagacagaagatggatggtgatggcactatgatcgagtcgggatccataatgtttagagtggttactcgtttgcgaggtcgcttcaggttgaggagggagttgtagattcatccaggctgattcttaagtggaatggaatatgaaatcttgatatgccaccaaaggtgaaagtttttgtttggtgtatgttccatttagcgttaccagtagcaacataatttatctcctagaaagttcaggtacctctttgttgttcacgatgcggagaagaatctaaaattcctgagcatgctcttttttcttgctttggtttgattccagtgtggcattagttggaggtgttgtcagtgctccgttgatgtgtacatggaccaatacaggaaattctcctatttctcttttacaggctatctcgtgaggcttttaaattgatgatgacaaccctctggtggctttggtatgattgaaactcactattgtttggtaacaagctattgagagtagatgttgctctagagttagcccataatcacctatcaaagtttaaggagtatggtcgacttggccttcatttgggagtgggccttacaaactcagttacaaacctacctactcgatggataccaccgcctcttgattccttttctctagctactgatgctttagcaatttcggggaggggctttgtcggattggggggagtgatacgggatgcggggggtgtggtttggttggcgtggtcattgatgtgttaggtgatttttctattaatgtggcaaagctggttgccatttttctctatgcctgactcttgcgcattgatatagtttcagtatctccattattaatagtgattctatagtgcaaattgttggatcaataagcttcacataaattttagtttttagtctattttattagatatctattcgttattagctgttgttggtggtagctcttgtagcgccattcctcgtttggcgaatggttatgcccacacactggcaatctctgttactagtttaggggattgtgtttggacagatgcttgtccacgatttttgagttcttctataacagcagatttatcttaatgaattatgtttttctttcaaaaaaaataaaaatacaagtgtactcctattcagtggcgaacccatgatttaagttgagagggggcgacattttttttaagtgaggaggggcgtttttttttttattttacattgtataatatattaaaaattaatgcaaatttgtattttagtattaaatgtagtataaagtaaaaaagataacaataaaaatattgggttcaataatcaagacaataaatacaaatttttattggtagaggttcaaaaaatgaaattcaaatgcgaaagcaaatatgccttttttgggattagaaattatgactttggatgaaatagttttaccattatgccaaagcttatattgtgtttaaacatatcacttttatttagaaatatatgttgtaactagctaaaatgcatatatatttttttctcgattttttttttcaggggccgactgtcccacctcgcctttatgtgggtttgcccctgctcctatttgtttcggtatttgacaaactttattagtctaattttttaatctatagatatgttgtaactagctaaaatgcatatatacttttttctcgatttttttttcagtgggcgactgtcccccctcgcctttatgtgggtccgcccctgctcctatttgtttcgatatttgacaaactttattagtctaattttttaatctatagatagtcatgtatattatagttatttaagacatcctgcaaaattttaaaaaatttagaaaaacttaacacgccaaaaataatgtacctttttaaaagtggtgcactcatatactcctatatgtttcggcattcgagagacttttttagtctatttttaatggtcgtttacattatagttatttaaggcatccttcaaaatttcgaaaaaatttcatacaccaaaaataaaattcaaattttctgttacacacgtgactaagagggctacattgtaaaagtactttattatattattatttttattaaaaaaataaatataataataaggaattttttttagtataaattttggtgttatgaatagaa

SEQ ID NO: 393171 - DNA, 706 bp, Cannabis indica
gtttgagctataattttggtattgtaactatttagaattatttgaaattaaattcacgagtaattttaaataattgtaccggatcataaaaaaattaattaaaatactctctccatgttgtactagaaagggtgctatcaaatacctcttttatgtaatttacaataaaatatcaattgtgataaaaaaaaaacttatttaatcacaaacagacacaaatatagtttatgttacgatacttattttttttagtaataaagttctttgtagttgaaaatgcatttacttacaacaaagtgttattttgtgacaaatacacttctattggataatacaaaaaaggtcccttttggtttaagaaattatgaaaaggaccatttgttattaaaatagtaatggttcccaaacaaaattttaatcttgattaacaatttcttattattatttttttgaaacattcatcttcattaaacagaacaatcacacaacaaaacaaacaataaatcatacaaaatagaatcttctataatcatacgatcaataagccattgaaaatttctggcaatatgatgttgtatctcactaacaaaaaatagagaaacattacataatgatcccaacaaagtttttccaaatagcctccactatcacactttaaaaaattctatttttagtcacaaaaaaattggtgactaaaaataaaaaa

SEQ ID NO: 393172 - DNA, 897 bp, Cannabis indica
gtgatgatttttgatgtgttcatgttggttatgtgcttatttgataatgtatgcaaattatgatttttacgatgattaaatatttttaatttcgtcgtggaatttattatttctagaaagcagattaaaaattaatgaattttagatatttataaagttcaatttggattttcctaaattagtatgatttttttgaatttgaatgaaaatttctaagatgggatgcacacgtgcgtgcgcggaggtaggatgtcactcggtcaagatcgagcttcaaacaatccctgtctgaggtttctcggacaagggctgtctgaagccctagtcacgatgagaatgctcggctaaatagggtgctctgtcttgcccatctctcccttgcacgcacatagggataatcctcggccaatgcatactccctttgccaaatcttgtttttgtgatatttttagtttcaaaaatcatttttcaatgaaacaaaatttaaaatttagtagaattttgtgtagaatctaaatttttaaataaaaatctaattatcagaataaaattaatttttattaatttttaattaattaaaattagtattagatattagtagcctttgaatttgaaaatttgatttttccacaaactagcctttatgattaattttaaaatttgattatcttttatttgttttgttaattttaattataagataagatatttacttactttattaataaaatttgaaatgaccttattttgacattaaaatattaataaaacttaaagataatctagtcagaatttcaaattgctaaccatatctaattttcaaaaattgttatttttaaaatatattttattaatttaaattataagataagaaaaatattagttttaacattttat

SEQ ID NO: 393173 - DNA, 569 bp, Cannabis indica
ctctctctctctcaaactctcaaacactttctctctctctcaagctttcatctctatttttatcccaaacggcaagatcgaaggctttcatctcccacattcgtcccttctcctttgtccctctcatctccattttgatctctgcttagttataatcatcgcttgtctcgagatcaaaggctcctccgttctttccatccgctcatgagccacctcaaaaggtccaatcttcgctcgtgtcgagatcaaaggctccccctcctctgttcgtcccagccgcgcaagccacctcaaagcttcgacagtgatagtaagttattttcttctctcactctttcgatctctctctatcacactctcttttgacctctctctctctctctcgctcaaccctctctttcattttgtatttattctcaatgtaacgtccccgcttcaagcctccattgggtccttacacccacggaatgaatggctcttatgcacgagtaccccactttgtctgctgcctggatcgatgactgaccctacagaccaacacaaatgtttccagcgtactttatcctcac

SEQ ID NO: 393174 - DNA, 795 bp, Cannabis indica
gtttttttttttttttttggaaaaatgcatcaacccaatacaaaaaaaaaaacccattttgcatttcatcacatgattttaaatgaatttttatttttattttaaataaaacaaataaataagtataataattttcaattgaggttatatgtgtaataaaattttaaattatgaggtgatagtgttaaaatttaaaattataagtgaatttgctctaaatattttaaaaattaaagtgtaaaaaaaattgattcctaaatgatcattattaaattagaaaaacttaattaataattataattaatttaattttaaaatataattaattttaattaatgttttataaaaaaaataaagtatcaagttatttattatttatttttattaaatttttaaatatatcataacaattcaatagtaaaaataaatataaccaatatgatagttacaaatttgatatacccattaaaatctctttttatatatattatcttttagaaataaaaagagaattgtattaattaacaaaaagaaataataataataattaaaaaacatataaaaaaacattaataatattaatacaatgatttattaatataaaagtagtctcacaaaatacataagctgaattaaagaaatgcagaatgccacacataatagatatagatataataaagcatcaaatattattttaggcatgcgtataaatatatatatatatactagtaaaaagttacgtgcaaggcacgtatactaaattttatgctagttttttctatgttagttgaaagt

SEQ ID NO: 393175 - DNA, 639 bp, Cannabis indica
attatccatatctgactacactttacatgaccaacagttttttacatattggcatgtcaaaacatacccatatattcactcccataggtttgaggtggagaaattccatccattttaataactttccactggtgttggtagtataaccctgtgaaaaagaagacaagttgtcaataacttcaaaaattgaccaaaaaaaagaaaaccaacaatctaactgcattccatctctgcatcacaggcttatatagtcacgtttagctcttacacaatacagtcacgtttggttgaagaagtaacattcgataagattataaattgaaaaaatataagagaaaatgtaaaagaatgataaagttgattatttgacaacaaaaagttaaataatagaaaacaagttagatgttaaactgtaaattgttctctatttgataagataaaattctggattcatctttccaacttcacaatagaaaatcacaaggtcctatatcccaaaaatgcatagttccccaacaaaaataactacactgtaggtgaatgcattggatatttacctaagctaattagaatttttaccttcgaagtttgacatgtaccaaatcatattccactgcactttttagacggttgaaaatt

SEQ ID NO: 393176 - DNA, 1454 bp, Cannabis indica
ttacttttaataaattcaaaacagagtctatgctgacgaaactggagaaaaattacaattttacaaacgtaggtacatatgctgttaaaataaatataaaatttatcccgcttacaaacataaaatttaaatataaatgctgctattttctcaaaagaaaaaataccaaataaaatcttaattcgacttaatttattgattattttttaatttatatttcagatttcaacatttttttgtctctcaacaacataactttataagtttccaaattttgtttcataatatttcaatctctttagttcatgaattttctaaaagtatcacttatatagtatttcattacactactataaatttgagctttaaaagtggtttttaaggcctttcagcgtcgattttgacaaaaatcgctaccgagactgatccacgtgaggctgtagggtctaaaacaaccgatgctaaatagtaccctatgccgtcaattcttttatagtaaccaccataggatacatatggcgtcagttatatactattaaccgacgccatatacccatataactgatgctataaatcttaataaacgacgccaaatctataataattatttttttttatttaatttaatttaattaagttatatatttattaatttatatattatattatttaatttaaatttaaattaaatatttattttttaaaagctaaattaaatattatttaaattaattttatgaacgaccaatgtacttaatttcatttcatagaagtaattaaataaattacaattatatattacataaatattataaaattagtccaagtattaacaagttaataaatctaattacaagttaaccaaaaaataagctaggaaagaaaaattcttaggcctttcagcatcattcgtccaagccttcgtgaattatcgccatcaactgatccactatcgttgtaattataataatttagtttttggattgtatccctgcttttctccaaactacaagaaaaagtaaaaatttatatttatttatttatattattattttttgttataataaatactataattagtaattaaaacttacaagttttttatcttgtatataacggttgggatttatacgtgtatttcaaaacataaaaaccacattcttagtttttaagttgtcttggacaagtgctagtaaaattcctgccactgcctaagatacatatttgatgcccctatatattaatatactctgtttgaaaaattatattaacatttcaattcattagttaattaaataatttgttacataaatagtcattaaattattgcctttctaacatttcggtaatttattagggaacattgtggccacgtatagggtctaaatggataatttttcctaacgcaccgacctctagcatccaatgcgcactaaaaaattatattaagttat

SEQ ID NO: 393177 - DNA, 639 bp, Cannabis indica
atgcatggaatgaagcccaaaacgggttcgtcaaacagttaccaaaggaaatgtatagcattagtagtagtgacactgttttgcatatatataatgaactaaactgagtaaaaaagtaattatttatttattatatttatatacatatcaattatttattaatattattgtttcaaaaatcgaatattgaattgcgtagtgctgtcgtatcgatgattggcgtcatatatgtaaaaatatagtaatcttctcaatttctatctactctttctttagcaaaagtcatcataataagatggaaccaaatgtcaacataactatatatataacttgtactattgcatggacattattcaactcacatatatatataaatatatatatgtgtgtgtggatgtatgtagtgtactttgttttttcccaactttgacagatttctacacgcaagggggccaagaagcaaaacaagttattataaatatatatatttagaataataataataataataatagtaataaacagaaaagtcgtcatggaatactaattataaatagagggcgactatagcaaagtagtaatagagataaataagtaagttgttgaagagagagagagagagagagagagagagagaga

SEQ ID NO: 393178 - DNA, 1043 bp, Cannabis indica
tctaccgaggatgacaatgcttgaatagtgatttcaagtaagaacaacaccagcaacaatagtggaatttcctcacattacttcttgaaaatggataaccagttgataataacactatgtttgataaagtaatatattgcattaattattacgaccaaaaattttaatacaaaagttatattatttaatatataataaatggtttatattagcttgtattaaaatatttacaaaggatccgaggtcaaccccaatctccaatctatacccaaacccgggactcgacccagacaagggacctatcccaaaccggaccccaaaccaaaccccagacctgaactttgagccccggacttgaacttggacccaaacctcaaacatggaccaggtccttgaccggacctcgcctagactggaccctggaccctagaccccaaacctcaaatcccggaccccagatccaaagccagaacccaacctgacccgagatcaggacccccgacgcaaatttaggaccctagacccagatccaggaccccgaactcggactacgacctgaatccggaccggtccttttcattttgagtgcgccataaaatgtcgaccacaactgatgcatacaggaatcacattctgattccagtatcactgatcggataaataccccaaggaaaagagtgccaggcatgatgagccatatcacaggtaattaagaaagagatgttcgactcctccctcccacaaagagggcatttgacctcctcaatatgaaatctcttcctaataacagatctaagagggagagcattgggaaggatgcaccaccaaagaaccttatgtcgttctaacactttactgttccaaagtttattctagagagaaggagctacaacataataaggagctctctccaaagcttgagagagataagcaaatatagaggagaaccgcccatccttttcaagagtccaaacccatttatcttcccccataccaaaaggagaccctcctctcaagatagccgacacagtctctcgatcgaa

SEQ ID NO: 393179 - DNA, 1446 bp, Cannabis indica
aaagacatggatacttgttcctcctacactagatatgaacatactgtcaaataaatgggtgtataggacaaagtacaataaagatggatcacttgacaagtttaaagaaaggttagtagtgaggggttttgaacaagcataaggtttggatttcaccacgactttcagtcctgtcataaaggctgctacaatcagattggtgtttactctggcagtcacctatgattgagatatccaacaaattgatgtcaacaatacttttctaaatggtgagttacaagaagaagtgtttattcaacaacccctaggctatgaagaccctgaaaaaccagattatgtgtgtaaattaaataaatcactccatggtttaaaacaagctcctcgggcctggtttaatactctcaagaccactcttattagttgggatttcaaagcttctatcttcgatacctctctgttttttcaatatcagcaaggatgtctattattggttctggattatttagatgatctcttaatcacaggtggagatacagcagccatatcaagattaattgaagctctaaacaacaagtttgctctcaaatcccttggatcagtaagttactttttaggatttaaagcttacgaaaattcttctggtttatatttgacacaatccatgtatgttgctgacttattggatagaacacattttgaagatgcaaaagagtgttctactcccatgattctagccaacaatttagctctcaatggcagtccaccatttgaaaaaccagaactgtacaaaagcaccataggagctcttcagtatttgactctaaccataccagaccttgcttattcagttaacaagctcagtcaataccttaaagccccaactactaatcactagaatgcctgcaaaagaattcttagatacatcaaaggcactcctcacattggtcttcatttcaaacccatttacacttgaagcctattcggatgctgattgggcctctagtttagatgatagaaaatctaccagtggattctacatttttctagggggtaatcttattaattggagttccaagaataaaaagcagtggctcgatccaacacagagtttgagtatcgagcccttgcttcagcagctactgaactagtctggatgcactctttactcactaaacttggcatcaagttgcacaaaacacctccagtattatggtgtgacaatcacagtgcttaagccttggccttgaatccagtttttcatacaaggacaaagcatatagaactcaatgtgcactacctcagaaagcaagttgtagagaacaagcttgaaatttgctacatccccactcaagatcaaacagcagacctatttactaagccattatcttctccaagatttcagtttttatgtaacaagctgaatttggaacactccaaatacagctt

SEQ ID NO: 393180 - DNA, 1176 bp, Cannabis indica
gtccattgaacattgtttattatcagtttgttttgatttatagataacagtggtaaaacaaaacatgaacgcacattcttatttactctaattatatgttaattaaattttaaaataaagaaataaaatagtaccccattacatgtgccttcacgtgtatgaaaataagagaaaactaagtagcattgtactatttaatatttgattataaaatgtggaggttaattggaatacagctcaaaaaagcagatcatggaataatgtcttgtatgtttgtcataacaccaaacttagtacctctattgagcattggtattaaatatatattaaatttattataatatttaaaacaaaatgtgttttggaaaattgcaatgttgtagatagttttttaagttacaatgaataaattacaataacaaaattagggacctctaatcctctctttataacattaatctaaatacttaacttcacttgctcttttcaatctcaaaaaccccttaatcaaaccatggcacacaacctcagtttatcatcaatctaaatacttgctcttctcaacctctgtatacactaatatactcactctgcaataacaacttcagtaattcttgttacaattatagacaatcacaatcacaatcagagtcaaactaaaagtaagcaaattaagagataattctcatcatattcatatgtgtttacttggtggtaactgacttcttccattcttcaactcagtcttccatttcactactcatataatttgattcccctgcaaaaacaggactaattaatagcttgtgttgtgattataaatttacatgtaatctcactcaaataatagaacccttgaagttttttatcaagtctactctcattttcttgcattttcaaaatatgccaatgaaaacataaattgattgtgtcaaacataaattgaagactatttgattcaatatgcaataaagcttttaaacagttaggaaagaagagaagagaaaacagtaaaatacctatactttctagtcctcacttagcaatggacaataagtgatgaagatcagaaagagaagtgggtagttcttttggtaagcaccggaggtaacgatagctttcaatcatcaactttttaagacgaggaaaaactccaccttcgataaatgaccactc

SEQ ID NO: 393181 - DNA, 1975 bp, Cannabis indica
tggaatggcggttgatggcgatgcaatggacggaggtggaagaggacaagagaaatgggcggaggaggaggagggtcggaggaaatgggcggagaaggaggagggtcggcggggattttgtgggggaaaatgaaaaatgatttctgagttaaggtggggtattttacagtgttttattaccgagtggacccgccggtattaatagggttccaccggtaattaaaaaaattgttagaatccttgactaataccggcggaacctgcctctagtaatccgtcgatataagtcatttcaaattttgggcagtcaaaatcccgcccaaagtattagaggcggattttctgccggtaatactctttttaatttttagaaagtaataccggcggattactttttctgcaagtaataaccccattaataccggcggtttggctccgcctgtattgaagctttttcttgtagtgaaagttttatcgttgtaatgctcatttcatgaacctcagattcaattactcacctcccctattcaatacccagtgatacatgcataaaagaggtaaggggatgtgagtaacctgacaaagctacaaacatcttctagccaacagttttcgagggtaccttccaggtaaatcataatgtataaggtcaattatcaaccaagtactatcttaagtacacttagtaagacacatagtaggtcctaagttatgttattaactgtaatggactcactaccgagccttatacagagttcccaagaggaatcacgcataagactatagttgtatatgcctctaaggccgtcacgagaccctagccgaggtcaatagagggaagaaaactagctgcccccttggagccttggccttggccggccagggttcaaggccttagtggctggccagaccccctaacccagcctagtggtgggccaggaacccttgttccaggcataggctagccagcctatgggatagacccccttggctcgccaaaccctctaatagccctccttggccaaccaagtcttgcataggacctccttggctggctaggacctacacggattgaaacttgtatttttttaagtaactcaaatatgttcttcgtgactcaaagagccaagaatcagaatgaagctcaaattcagatcaaaatactgaaaggacaacaatctaacgtaaaaatcaaagcatgttcaaagcaagaaaatattgttcaagcattcatggcaaaatcaaccaaatcatctaaaatagcaagaatagaaagcttacccactacaagaaacggttgaggaagaatgtgggaagatcggatcgtaaaaataatgcaaaaatcttaggaaaatgatgcttggtgggttcggccctctagagagaaggaggagctatatctaatgtaaagttttagcgagagaaagtagaatatgaaagtgaagagtgaaaaaggcttttcctcccaaatgtacttatgtaaacatgtgggaccttttttcacttactttacctacacatcaaaaagacaattaaagcagttattttatacaacaaatgagatcatacagtcaaggcaaagtatttcaaaaggctaaaaacgcagcaacttttatttggctaagggctacagcaatcctaactgcactaacatacctagtaagtctctatccgtacagacgtctacacatggacttaggggcaaatgttattccaatttttgtcctccttaaatggcagtgcttacgtggacaaaatcagtgccacgtggcagtacaactcatcaataagaagaccaaatcagtacctaagcaaacaaagaccccagtcaaatgggtatcgagttacagaccagcttcctcataaaggctagttggccacccctagctggccctatgtgtaataccctagaattaaggaatggattagaaaaaccctaattagataattatgaataattgaggaattatattat

SEQ ID NO: 393182 - DNA, 677 bp, Cannabis indica
aaaattacaaaaaaaaaaaacaccatcgagaagagaaaagaaaaaaaaaggatttttttctaccttgatggataaagagtgcttgtagaactgatgaaataaaatccaaggctctcaacaaaggcttgggtgtggaaagctaaatgggaagtgaaaaaatttgattgaaagctctcttatttataggtgagcttaatctcctaatcctaaagcaattggtagtcttttaaatttaaaagctcaaaagaaaaagaaaaaaatgataagaaaaagatgaaaaatctttctcttctccttctagttttgaattttgaaattcctatgagaataggaataggaattcttaatttaaaaggtaaaacaattcttaatgctatgaagattaaggaaaagctagagtcaataagaaaaagataaatgataagcaaaagatcaaagatattttatcttcttcttttctactttgaattacaaatggaatttcaaataggagtgggatttaaatacataaaaattttaagttttcaaacaaaaagataaaagataaatgaaaaaacgaaagtttttcctatttttctttgcttaacaatttttgaaaattcccatatacaagaacaggggaattcaaagtcctacttctattaggaatgtgaagaacaaaaacaattgtctaggat

SEQ ID NO: 393183 - DNA, 1357 bp, Cannabis indica
aaaaacaaaacaaaaaattaagacatggcataaaatttttgtttcccctgctctctctctccatggcgaggaagaagaaggtttgacggaaaccagtcacccggctcacgactgatgatgcggttgtaggttttgaagggcagaaggagggaagtgatgatctacgatcgacagagggactggaattgattgtagagatagtcgaatctccatacctaatcgatacagaggaagcaaatcgatttggaaaaactagaacgcagagttgggcagaggaggtggataacgaacagaggtcgtcggatgtccactactcaccggaatcagctaagagaacctgagagacattcacgaaggagaaggtgagtaatcgtgatcagaggcttttatttacagaaccattgattagagatggtatcaaaatagtacaggtcgatcttgatgaggtccgagaagaagagaattgctggaaatcagcagtgatttgtaaagttctgggagctaatccacccatttcaatttttaaaggctttgtgaaaagggtctggggacatcttggaattgttaaggttagtaaattgtccatgggattaatcatggtgcagtttaatgatgaagcaactcaggattaagtagtggaggcaggagtggttcaatttgataggaaaccagtcatagtacgcccttggtctacggatttgaacgttatgaatctggttcgtactgtcccattgtggatcagattacatcacctaggacttcaatattggggcactaaaagtctaagtgctttggttagcacaattggaaaacctataatggtggatcaacacaccaaggatcgaactaggttgcaatatgccaaaatcctggttgaaatggaagttacagacgctccacctcgattcgttcctttcttgaatgagtttgggcaacttcaagatcagaatgtggagtatgaatggttgccagccaaatgtactcaatgctcaaagtatggacacactaaagcaacttgtagacatgatgaaattatgaaaatgaagactgaaaaataacaacaacagcaagacaagaacaagcagaaggagaataagggaatgaaggaagatgcagcaagtaaggttcagcaccaacaagaatgggagaaaccaaagaaggctaaagtgttgtcaacaacacacatcctagtttgcctaaagaaaatgtcaaaagcagcaagtctttcatagtgctacaggaacaaaaggaggatggtgtagcttctcaggtagctactgaacataatgactctgttattgtttttgatgcctatggatatgtaatgaccgctttagtaatttggattagtaaaggc

SEQ ID NO: 393184 - DNA, 630 bp, Cannabis indica
tttttttttcttttttctttttggtagagaagctacatatgtttttcattataaattttcgtggaaaaagccaaacgaagaaagtagaaacggcactttttaatttggattttttgagaatatattacgacatgtcgtttttggcttctcaacatgagaagagaacgacatgcatgcttgacttgcttttgacttatatttgatcccaactctcaatttaatatgtgcaccatcctagtaaaaattttaattaatagaacaacctaaattacaactaaaatatatataataactcagataaaaaccaaaagaacaacttaaacaataaaattttaaaaaaattaaaaattagtatataaaataatttccttagtaataattcaccagcatcaatgcgcactatatctgatttctgaatctatacctcagttaatgtcttcaataaaaactatagaactagaacgtttactttagtcccatttgccaattaattaattatttctaaaataaaaagtaacacattactaaataatccgacctttacgaataaaataagtaaaaaaaagttgatattatatcttgtcaaatacaatatctttatatattaaaagtgtctatctaacggcattt

SEQ ID NO: 393185 - DNA, 1077 bp, Cannabis indica
gtacaaaaaaaaaaaatgaagatacaatagtaattctagcttaaactactttaaggatagtcttcaagttttctcctttacttaggaaaaactgagaccttatcctaattgagtaaaggaaaaactggttatacattgtttttggttgttaaaattgtgacttcaaaataagaacttagtttttttaacacaatacacttttggttaatgttttttagatttagaaaaaaaaaaaagaaaaacacttcaaaactcttgaccttggagctcatatttttttcgtgctaggttgtgcttgtgccttctgagtttgtactgattttgtgtcgtgccgaaaattttaacccgtatttacaacaccaaccacatgtattctaaaaaattgtaattagaatctaaatcaaatgtcaaaatattttcaaatatcattaaaatatttttagttagagtatgataaagtgctagattattgatgtaatgttatattaacactttttttaaaaaaacaaaaagagtaggatattaaattttgtgccaaatttatcataaaataaaatatagagtaaattttaacacaaaaaatacttttgaaaaattctataatggatcctcaaaattggtgcatcgatacacccttttgtattttcgacattcaaatagttttaatttcaaatcttttactagatagtgtacatgttagctatttaaaatatcctacaaagtttcgagaaatccagtataatttaatgcgctaaaataataaagttcaaatagtttgttgtatgtgcctcttttattttgtatccatgtaaaatagacaaattgaaccctatttttttacattgtaagttatttctaatttctcaaaactttctgtgatattttaaataattacaatatacactgtcatataaaaaaaaaataaggctaattagtaatttttcccccctgaactttaacatgtactaaatcgtgccccttgaacttttttggctgttaaaaattcttcctaaactattgagattgttaaatttaaggacatttgtctaattttagtaaaaaaattctaacatggat

SEQ ID NO: 393186 - DNA, 1259 bp, Cannabis indica
aaagagggagagaggacactataatagagatctatacacaaagaaaggaaaaagaaaatggtaggaaaaaaatatgatagaatgaaaaaaaaaaaagaagaagacgaatatgagggcagtacctaaatgtttcagtgacaaaaatctcagatctagtcgtcaaaaatagcaccttcaccatagtcaaatgggtctctggttgggccaatagcggctgatagtggtccatttgggtcaacggcggcgagcaatgctttgagtagcggagaggttgttctaggcctttgtttggctactggcatcgagaaacgccgatcatggccaatgtagttcagatcatctcttcctaaggctgagtctttgagtgtgaagcaaatgaaatgttgagatttcaaagagagagataggaggcgcaagaggggctgtgaaaaaaaaaaagatgtacggttagctctaggatttattttcttatgtataatttatatatttattatattatttatttaataaagaaatctgataccttatatatatatatttatgtatctcatatcttatatttaatataaataaataagataaatattatttaaattttataaattgtattagcatacagagtcacacaaggagggactcgaaaagcgtgtagacacaccaggcaagtagccacacgtttatctagtcacgcgtggtatgtctctataagtcaacatttttcatttaataaaaaatagaaaaattttggttttactctttagtgacccttcatatttttagtgacacacattctaggtgactaacaccaaacaataagagtctagttatgcatgtcactaaaaatcattcctatctttttagtgacacgtacaaaagtgcatgtcactaaatagtgtcactaaaaggtaaacttgtagtagtaataacatccaccatagaacttggaattgcactctcagttacatagaacgctctatatgttccacgatatagatacgctattaattattcattgttataatcccaattatcaatgattctttataaatgatctacattgcatagggacaaaattaccgttacaccctttcaatgtattttatccttaaaaacacttggccacctataaaatgatattttgtaaaaactataataataactaaaatgagcgctcattcatttatctctattaggctagctcgaaggaaatcattgttttacttctatgtcctgatagaagctatagattctatatttat

SEQ ID NO: 393187 - DNA, 967 bp, Cannabis indica
agaaagtgaatgagaatttctgagttgtttattccaagtgggtgaacccctatttatacaaatacaagaagtgagatattaagaattaagaaaaaaggaaaacaggaaaagaggaatgttcattacaattcatggtaaataaataaaagatttggacatccacataattattaatatttataacatataatatattataattttatagttgtaataataaatttatataacttaattttattattatatatgtatttttttaaaaagataatatgtaataaatgaatttttattaattaattttttgtatttggggccatttccttaaaataatggttgagatgtaattttattggtctcttaattatgttgtaaacgtgtgcaccaagttgggctggccagactccggcaataactgactttacattaagtggcacttgccctgactcattttaaaattaaaaaagaaatgtatgaaaccactcgtgttgattacaaaatatcatgtatatagcaaggtctcatgtaaacagatcctcaaagatttatacaagtaattaatatataaataggaaatgagttggaaggacttgttagcagggaacattgcctaaacattgctcccatgatattaatttagatccaaatttccatgtgttattattatgcattgatccatatttgaataagaagatgctttatgtctccttagcctaatgaatatataaatacatacatagttgatggcaaagtaatcaaaacaaactttgctaaacaatcaaaattcacaaaaaaaactctccatcttttgcttgagagaagaaaaaaaaacaaaaggctgccacaaaatcaaactttcatgtgcgctcaaacagcttgccctccaaatctcaccctgttattcaagagtgcaataaccatttgttgagattagggtcgttcttatgcaacttcatcatcatcttcc

SEQ ID NO: 393188 - DNA, 1150 bp, Cannabis indica
gtttaatttttagccgtaataatacttaattataatgctgcaattataatattgatccaagttattaaatttttatatttttaaaaaaataatttaaatatactaatgaaaaaataacacgtgaataatgacttaatatttaaccgtcagctacttgcagaattccaaaagtataatttaagtattattacggttaaaaattaaatttaaatatttatttataacttaaaattaaatttagatatttatacagtaaattatttttaattaattaattaatatgattatgattaatgaagtgggttttgtgtgtttttaacatggcaatgtctgattggtgtggttggtcagtatggtgggctccaaaagcaaaggacgttgttttgattctaactctgattcaaccttctttttttttctcttttttaaattttattcttttcttaaaaaaatatattgtgtgtttataatataattaatgattcagtgttttatgtttgattccaatgaatatgcttatctggcaaaatcctccttctctctattttttctttatattgcaactctagaatattcgattttattattttttttaatgaaaataaatttttatgccaagaaatatcaaaaagattttacacaaaattaaataaaatttggtcactaaactcttgtaaaataactagagaaagccaacttgataagattataagttataaaattcgaaaaaaaattataaaatttgaaagaaacatattcaattttattacttaaaatgaagttataatgctttgcttaatttttggcaaataaaacaattaaggtcctagataaaattctacttaaattggagctataactaaactatatacatacatattacttattattgtgttgaagtttgcttctaaagtcgtatcaaaaagctaaatattttccgggaaaaatactaaagtgggtttttctagggaaatttcaatttttgaccctaataaaataccccatttcaaaatatataccctccactaatttatacaaattaattccactattactcatttgtacccaaaatacccctcaaatttaattttcctattcacactctctttccgtctttccctctctttcactctctctctctcctctctct

SEQ ID NO: 393189 - DNA, 552 bp, Cannabis indica
aataattttgaggcattgtatagaaaataatgtaaataaaatataaggtcatttgttgtatactattaaaatagaagcccaaacaaataagaccaccaattaataggtatagtggctgtgcggtcatgttgataatctgtctctctctatgtgtcagttgtctcatcccttaatggtccctagcaagagatatagctggcccatttccatggcttatgtccgtggttccccctacaccatgatcctgaccctttctatctgtctctctccctattacacaaaaataaatatatgtatatgtatatatcagctgattaatgttcgttttcatgtatttattcccatctgaacctaaagattaaatgattttggtcaaaattctcaacttaattagatgcaaaatatggaattaatattgtacctatcctttatgaaccaccacaattcttgcataaatttttatgattaaacatatctattctatataaagtgtgcctatataactaaaattcttagtttttgagaaatttatgggtgacttttaatttttat

SEQ ID NO: 393190 - DNA, 562 bp, Cannabis indica
catcttgaggagagatattaggattagttatagttagcttttaatctcagttaagttagtggacaattcagttaggttgtcaactggttagttatatttttcctaactagctcaagtcatctattttatgtaggtttgtgtattcaaatcatatcaagttaagtaaatggagatacatttctttcttatctctctctcttttactcatgagttagggaagcaaaatgtgataaaaaagaagctaaaaaagagaacctggtattctaggcgacatattgcctcacttatgaagtgaatttacttttacacatgggcaaatgcagaaccaaaaaatcttgaagctaaagagtaggcaacatgtcacctagcccagtgaacacattgaaattgtatttttaaaacatcatcctttctatcattttgggctacaaatagattaatatatttgcagaaaattaaataacttgacacaagagatttgtacgtggtatcagtgttctcccgaacactcctagtccacggggccacacccagagaatgaaatcaattaataaagtatcaa

SEQ ID NO: 393191 - DNA, 1138 bp, Cannabis indica
ctactcagaattagtaacgataattataataaatagtaagagtttaaggagaagaaaagaattatgatgaagaacacttcgaagccgcgatctccgtctcttccttgctctctctctctaagtttttatctaaatttggtagctctaggaatctgaaattcatagcataaaaggttctatttatagtgcttgaaaagatagatgaatccccttaaaattaggataatttttttaaaaaaaagagataagtacggcgctatagcacctgagacttgcgctatggcgtccatgagatatttcctgaataacccaaatgctgaaattatcttcttctttttttttttcagacttgtgctatagtgcctagcaccatttttcatactccagcttgtttctcgacacaagcgacaacaatagcaaataaaaccacaaaacttgcatcattcaatttcttaaagttcaagaaaccataaaaagaggtgatggaagcttacctacagccttatatcacaaaaccttgctgagtttttcttgaaatgaagaagaaaataccaaaccctagctgctctagggattttcgagagagagttgtgtaatttttacctttttttatttttgtaaaaatgaataaagaaaatgtttttattaaaataaaatctggtattatcactttaaaattcagattaaaacatcccataaaagacaaaactccctcatgcaaattgaccaatttgcccctccacactaaaaatcataacaagtcattaaggggtattttggtcacttttaaggtttctactaattccgacattcccaatgtctaactttattgtcctgctataataaaaatactaagatgtgattctaatagccaaacaccgctttccaatgctgtcgggcacaaaacatgcaaaattatgaaatttctatacatgacataaaatgcattctgaattcaaataaatcatcataaataaataattcaatatcaacaaataattttcatatttaagccctaattatctgctaattttcaaattaaagctaatcagtctttacaattatccccccttaaaaggatttcgtcctcaaaatctaacctgaaaaactctggatattgagctctcatgtccgattc

SEQ ID NO: 393192 - DNA, 1189 bp, Cannabis indica
gctctttttgcgatgatagccaatcatggagcaccttttctaactatttgaatcttggttctatactcatccatctttgccttagagtgtgaaccataaagagcttcaagactgagcaagagcggataggagccacaacccagacttctgaggcaatcccatctatcattgaaccatagagccattcaagaagtaattggtcattgactagttggattaatttcacctgcaacaatctcactaccattaacattagtagtgattgctatatattcttgtggtgtagaaagagtacctttaaggtagccatcaagtttgtgcccccgtacaataacatatatcatagttttccataatgggaagttgtttttgtccaacttcaatgcaaatggttgtttcaaagtactcccgaatggaggcacaattatgcttggagtctaagtttggctacctcttgcagtagttttttgtctaccattttctctagagattgcagagtcaccttcaacgactactcgtgcagttttctctccaataccgaccatggataaagaagacaaatacttgcatatactccgatgccaagttgaaaaatacacacaatattagaagaatattttctcaactcgttgagtttgaggctacgacattacattatatagaggaatttgttattcaaaaatattctaaacttttcacagtacatatgcattctataacaaattagaggtacaaaattaaagaaaaataaaacgaatatcctaacagaattgtattgtattagttatcattataaaatcatgagttgtcctcaatatttggagtgttgcacaaataactaaaatgcacctctaatacattcattttttttttcacaatataaatttgatactgactcttaatttatcactacaaattatttgacataattatgtattaattttattatgtttaaattagttttaattaaaattttgaagtctggactttgggaggccaatgcaaaggcgtaatatgctttgttagttaaataaataataattaaaagaaattgttaccataggggatatttttgttggacttattttttttatatgtaaactaggtagtagtaatttgcaatgtatatttaattagagttgtattacttaattattaatttaaataataataataaaattaaatctaa

SEQ ID NO: 393193 - DNA, 869 bp, Cannabis indica
gaaatgtacagactttatgttgcaagagaagttggtttagttcaccaaaaagtggttgtaccaataagtatcttatggcaaatacctcaatatgttttggggggaacttcacaggtattcacttcaattgggcaaatagagttcttttatgaagagtcaccaagcactatgaggagtctatgcagtgcattattgctattaaccctttcattgggttactatttgagctcttttatcattagtttggtaacttacttttcaacaaagggtgggaaagttggttggataccagagaatttgaatgaaggtcatcttgattatttcttctggcttttggcagctcttagctttttgaatttgttggtttatatagtctttgccatgaagttcaagcataagaagtctagtgctttttaaggttttttactccatgcatgtatggaggttgcacaataagattagtgtcatacccatcactgaaattggttgattgttgctctaatttgtgccttggtgaatggtaatctgacttttgtgactctgtttcttggccttttgttctttccttaatatgagatggcttttttatgatttctttctctataggattcaagcaaagagttaatatttattattattaataataatttaattacacttaacatactctttatttaagtaattatcaaaatatatacttaggagctgctaagtgtaaaccccacaaatcacactcacatgagcgatggacattgttattaaggtattagtaaacatcattgtgataatgctttatttttatactagtcggaggcacacgtgctccgcacgtgtattcaacacgactttttattttaaggggactcatt

SEQ ID NO: 393194 - DNA, 1421 bp, Cannabis indica
aataatttacataaaatatcatcaaataataataatttttataaatattgtcttacataaaaacattaaataatatgatcatctttcataaagtattcatattatcttacaaatatagttaacaaaaaatggttaaaaagaatatttcataactttggtatacttacaattacaaatatatcatagctttggtatacttgcaaataaagtcaaaacaaaataaaatctagaacaaagttgtcctacactttatttgcaatatactaaagttatggatttaccttgaactatggacctcaaagtaatcaaaaccaagaaattgaaaaaatttcataaaatattacaaatcattaaaacttttaacattaatttgtcgccttcactgtagatggcagcaattaataagtcttggatcaaaatcagaaattgtggttcccctaaattttggaatagtctacaagcttgtttagtgatggtgtcaaaatataaagattttgatggaagaatttgatgcccttgtgtgagatgtatacataataagtttgaaaaattagataatgggagagcacacgtatttgatcgagattttatgaaaggatatgagaagtagacttatcacggggagccaaaggatgttgttgatgatgaagaggttggggattatgaagaggatgaaatgatccctattcagcaagacttcgtttctccgacaaccaaagatgtataagtgggaccaaccacaaaccaatattttgatgacttatttgaggaaattgaagttgaattgtatattggttatgattggatttcgtctctcaactttttagcaaagctattgcatctaaaagtgagagggaaaatccccaacaacacatttgatgaattgttgaagttgttaaagtttgcatttctaaaggaaaataaaattccatcaacgtactatgaggtgaataagagattgaagaaattaggattggcttacgagtctatccatgtttgtcaatgcagttgttgcttattttacaatgagaatgcatctaaggaggcttgtccagtttgcacgagtagtcattgggttacttttgagaacagtaaagggaaaaaagtttcttgcaaagtgatgtgatactttccattgacacctcaactcaaaagattatatagttcgaggattacaacaatgatcatgatatggcatcatactggtaaatcaaaagatgatggcgtgatgcgacacccggttgatggtcttgcttagaaagacttcgatgcaaaacatcataagtttgcaagtgatccaagaaatgtttgatttgggttagttgctgatggatttaatccatttagaaacatgagtcttgcatacagtatgtcgctggtggtgttggctaactataacctaccaccttggttatgtatga

SEQ ID NO: 393195 - DNA, 748 bp, Cannabis indica
aaaaatatttaaaattctgtatatccgtatttttataaatttcttttgttgtttttatatatatatatttttttaaaataattcaaaaaaatcgagacctctttttttttggcttaatgaaaaaaataaaataataatctagacctttttagtaaattaatattaataaaataaattaatagcatatgttcaagagagtcccgaactttggcaaaggtgaaactctttatatgtaaattaatattttttttataaaagaaaattaatattttactcaacgagatctctggattaactttttgtttctcatttcgacaattcgcactagtttatgttatatcaatatgatattttattgtgtgccacacaaaaaaatgatatatataaatatatatatatatatgtgtgaaaatggataaaaatatataaaaagtaaaaggaaaagaaaaggtatattcttttttatttttatattttgagggaaatattcttcctttttgtgataattaaatattatttacgcacgtggttccagaataaaataattaatttataagtaaatattacatgtggtcctatggacacgttgttaggtcaacttagcactttttttcattaatgtgaattcgttggtccacatggcaaatgtggacggctaattttcgagggggactcgttcaagataagaaaaggttttgtagagggaaatttcactatttgcccttaataatatacctcatatcaaaat

SEQ ID NO: 393196 - DNA, 567 bp, Cannabis indica
  modified_base (498)..(498): a, c, t, g, unknown or other
tatatattgataaaatgattttcttctcaagaatagagaggaagactaattacctaccactattatggagtggtcttcttgccatatgttggtcaatatatttctaatttttttttttgaaagaatatacataattataaaatttaataaaaaatagtatgtaagattatgatggataatgtatcaaattttacgtaatatttaggataacattttatgtgaacaaatagtttattcatcttatatatatatgataatttatctctacacattagtaatgtgagactaattttaatacaccttcttcacgtttggacttaaaaaagtgtgggtataatgaacgacctttaagagaccacagagctcaggccaaatcgagaaatttatgggtgtactcatcgagaattttgtgaatttttgaaacaggtcaaagacccaacactgaaaactagcacacatgggccaaaagatcccaaatggagggttaaaggggggggngggggggagcgcagacagcaggagttatcttttggactggcagtcactttggctcaacaacaaatcacg

SEQ ID NO: 393197 - DNA, 1247 bp, Cannabis indica
aaccattacctacagtcactttagctttccctttgtaatcggtagaagtggtgagattttatgagtctatttgtcatgtgagtgggtggcgccactgtcaagataccaggcattggatagatcaggagtatagttagtctcagttaggttagcttgaggggtagaatcattggtttgagactgggaggggttggggttttgttgagaaccagtaaagttgatgtaaatctatgaaaatatttcatcacagtatggccactcttccacatagttggcagataggtctattcccacttctacctcctctgtttgaacctcttcctcctcgtgatgccccacgataacctctgttggattgaaagcctcttcctccattgttgaaatttgcattggataagtttgcttgaacatttgttaaatattcagttgtgagttgctgtaatcttatttctttactttgtagcatgaattgaacattttgtagggagagagactcagatcgagaggtgaggttgattacaacggattcatactcagatcctagtcctccaagtatatagagaacccgatcttcatcggacatgacttgtccaacagtattaaggctgtcagcatactgtttcatctttagtatatattcttcaattgacagagatcctttcttggtagattggagcaatcctctcagttgcagaagtctggccttcgatttagtgacgatgcaaaagtgctccaaattttaagatgttcgaccatggatgatatgtccaagcatgtcgtcagaaacagagttcataagccaatgcatcaagaactgatcaaatctcatccattgttgataatctggattaggattgttacctacaagtaaaatcagtggagctggacgtaatccaagtatatatccatcaagatcgtaggcacgaatgacagcaagcaccagagatctccaaatagtttaattagttctatcaagccgaagattaagtgtaagtagattgtgttggggaggattattcttgcttgatcatttgacatgtgtgcttgtcttgatcatgtgcatcaacgcgtacctgattgttctgttgttgctgcatctattctggctccggcggatcaattctttgatctgacatggctctgataccatgtgaaagctctgttaagacagagtttggatgatgaaaaacttgagagaaaggagagagagagagagagagagagagagagagagagagagagagaga

SEQ ID NO: 393198 - DNA, 931 bp, Cannabis indica
atagtatttacccaaaaataaataatactataacattatttgtaatgattattaggcctattttatagtcatttatataattaagtttctttaaaaagaaaaaaggatgaagaaatgattagtttcaccattcacttttagtgcataattcatgattatgaatataaattagggatgaacatgaattagtgacgcctcaagataattagtaagtaaactagtaatattctctgttatacctatattttgagcaacatcatgtatagtatagttggaatatgaactagcctaaaattatacaacaataaatgcatttagacaactcgtcttaggaaatacaattcgtagaaatattcgaagtcactcttttaaagacaacgacgatgcataaataataactaccaattgatgggactagcgggacgaacaaggaaagtccatcttgggatacacaaaatacatcaacagaattgtttggaaagggtagataatgagttatccaaagagcttgtacctcattgacctacatacacgtgagtatattgaaagactaaatacaacactttcaacatgattcatctcgcaattgtcttggtgtgacaatcgtctcatgtatacctcactcaacatcaatagaagaatgcgagaaatacaacaacatatacttagacgttggcttacgataaagtgtcaaaaaaaattgtcacattgcgaggaagatgaaacatagtcagcataaccgcttgtggataaagttgaaagtgtgattatgggatgaaattccatattttaataataccagtttattaattaattaaactcttaattaaatgcagaataataaaatgttgggttttatgccctaaataaaactcattttaatataatcagatttacttattagtatagatcagaaataacatttaatgtt

SEQ ID NO: 393199 - DNA, 695 bp, Cannabis indica
ttacatttataagataattatataattaaggtagggataattttggaaatttgttttattgacgatacattaataatatatatattatctctctaaatataaataatacacaaaaatagaaatatgatcaattccatttcgacaaaaaaaatctgtaatttattttaactttatatcttttttgttttttgaataattaatagatcttttttatatatataaaatacaagtttaaacctaatttatttttgtcttttatttttattctaattcagttataattataattttaaacattttactatataagtggaatgaagcaaacaatattaattaacataatattcttctatacgtacccaactatagctatggaaaatcctccttcttcttcttctaaatctaataataatagtaataatactatgtcgtttggtggttggagaggttcaatgaaggtaaagctttggaattcatgggagtggaactcggtcaagaaaactatttatcaagattttaagaggagcgtcgaacataacataacaaagaatgtctcttataattcggatcacgatatgtattggttaagtttgcacattctagattaattttgtatgacttactatggactataaaatattttaaaatggttagatttagtttttgatcaatttgtaatttttatgaatttactt

SEQ ID NO: 393200 - DNA, 760 bp, Cannabis indica
taaacttgaaagattaagtacaagtgagaaataattgaaagaatttaatcgctaaaaactctacattaaaatataaattgattgcaagtttttatttaattttttaagtaaaagctataataaatttaatgtatacaaaaatgtatacaacgtaaaaagttattttttttaaataacttaaaactatttattattattaattttttgtaatattttattagtttcttttaatattcagtactaatattttttttgggttgatcactacacacactatttttaagttgctttttttattattctttctcatataagtgaaaaatatttaataaagaaaataaaatttcactccaatatagtatttttcaaatatttttaattattttctttatttagtatagcataaaataaagtttttttttttttgaacagagcataaaataaagtttaataaattaatatgctactttgagtttgcatacataattaaatgtaaattattagaattagatgatggagttcacttttatacttcacggaactcaacggatttcaaatatgtaatattatcaagaataattatcttttttaccccttgtacttatgacactatactattatgccccttaatctattcagcttgttacaaatagtccttgtataattttatatgcatacatttagtccttcggtttattttgtttgaaaataccgtttgtattaatgatgtaatatattataacaaaggatagagtagtaa

SEQ ID NO: 393201 - DNA, 1345 bp, Cannabis indica
atgctactaacagtaccacacctgtaatcccacacaccacactcgccaacaccagcacgtgcctcacgtgatctccttctcctccgccgccaccgccgcggccatctcggatcccgccgttgctccaccacgatgtatcgttcgagttcatagccttcggcaatgcaacatcggaagacgaagacgaaggcctcgaatcgctgccttccgatcctcctccaaagaacgtcaccatctccggcgatttctttcccggcggcggagaatcctggtactccaatccgtgttccgatggcctcagctctctaccttccgattctccggccataattaagatgatgatcgtgcaaattgcgacgatcgccggtcgagaatagaatgacgccatagatattctctcctctttctctctcttattcccctttctctctctagctggtaactactttgctttctctctctattaagcagtggagtttagtgagtgtgggggcctttttatataagagcttaataatatggataaagctcagaaaacggtgtcgttttaaggttgaaatgcttgctttgtcttcacacacaaaattcgtcactgttttttttttaaggataataataataatattagctcttttattaaattttaaacaaaggttttaataaccgccgctacctactttgtcctctattgcttttgctaattaagtaaaaagggctaaatttaacgttgtttttcactattaaactttaatttttggtggtaaaatctaaattagtagtaaatttaaagtatcattcaattcattgttattatagtttatttatgtgtaacatattacatatttatattaatacacttatattattatttaaaaattattttcaaaattcaatttaaaattaaataaaattataaaaataaaaaatatataaattttgaaataatttttatattttaaaataataatgttaagtttaccaatataaattttatacatgtacaaaaaagtacatataagtattttatattggcaattaactgtaaaaaaataaatgacaccttaaatttacaagcaattcagtattttaaaaaatgttaccgtcaaaatttaaacttacaaagctaagtgcaagtggagtaataattgagagagtttaacggcaaaaaactcaaataaaaataagaaagttaatgcatagataagagtaccatttttttaagggagttcattaacatctcggaaatactccgccatagttagagcagttaaaccaactctcatacgagcccctggtggttcatttatctgaccatagacaagagccacttttgattcggcaatat

SEQ ID NO: 393202 - DNA, 531 bp, Cannabis indica
aattttgagataaatttatagcaaacttttaaaggattatttcagtagattattttatatatttcggcatctaaaagggttttctaatccaatttttttttcataatcatgtacatttagatatctaagaaggaccacctaaaaattctaagtaatttaccatgctaaaaataaaatttgaatattttgttatacatgtaagtttttttttacacactcactgtttaaaccttaatttcgactttataaactattcacaaaatttaaattcataagtgaccgtaaataactgtaaaaatgaactaaaacactcttttggatttcaaaacaaataaagggatctactaaaacactcctttagagaagttatacataaattttcttacttttgtaacttttaatatgtattattaacgaagttaaataggagtatatcattaattttattgacaaaaattaaagtatttatttttttattatacatatatatatatggaacacttcttaatgggtaatacccatcaatgggta

SEQ ID NO: 393203 - DNA, 1606 bp, Cannabis indica
ctcaacctcctgtttttactcaaaatcagggttttccccaaagtcatgcttttactcaggaatcctttgctagccagactatcgtctcatcccctatttcatcccaacatgtggaggcttctgcctctcttttctctggtttccagaggcttttatgtgccgtttctcaggtgactgtgaatgaggctccttctatcatccatactgacaaagggaaggggattcaaaccccttatttctgctgctttatctttggcgcctatggacaaaggaaaggggattcagcctcctacttcctttgttcctcagcttcctcctaggcctcttactattagtggaggctcgggtactaagagatcttttgctaggtaggaggttgttgttggttcgtccgttcgaagtatgctgaaacgagctcgggctgctaggggtgttgagctgatttcttctgatgattctgatcatgttgtaccactgggtgttgctgagcaaccccgcctagaaaaatgagttttatttgttggaatgctcggggttcggggagtctccgagcattccgaaatctctcccttcttgtgaagcagcataagccttgttttctttttgtaatggaatctaagctagggactggttgtagtcttagttttaagtctaggctttcttttgataatgttttggaaatacctagaaggggcttagggggggggggttacttctgttttggactgctgctatcgatgtacatattaacaattactcctctaatcatgtggattgttttgtatctatgactgataattctaatactaaatggcatgtttcttgtttttatggttctccttatgtttcggaaaaacctcatacttggactcttttgcatcgtttgtatgatattgcacctagtatgccttggcttattcttggtgacttaaatgattatctcactgttaatgataaatctagtactaataatcctcctgtgtatgccatacataattttcagagttttatttctaaatctaacctttctcctatgccttgtattggtaataagtttatttggaagcatggtaaatcttttgaaaggcttgattggtgcatagctaacgattcttggttcaatcttttcccttttgcttccctccaccatttagggttttttggttctgaccatcgggctcttaaaattttacttagtgatcctcatcataagcatactcgtagtcatcattttatgtgtgagaacttctggttttctgaaccagactttctttctgttgtggaggatggatggaaggacaccttgtctaatttttgcccttcagatcctcttcgtactttcatgcttaggcaagagtcctgtcttaggtctgttaagaaatggggtactaataaaaataattttaagcatagaattaatttgcttcaacgtagccttgatcaagttttgtcttgccaacctttttctgatttgaacaataaaaaagccaaagatcttcagtcccagattgactctcttctttttaaagtaggagatcttttggaagcagtgttcgagagtcagttggctcagagttggtgataaaaacactaaatattttcactc

SEQ ID NO: 393204 - DNA, 1622 bp, Cannabis indica
aaaaaaaaaaaaaaaaagtggaagcctgcacataagtatggtgtgcgtcaactgtctatacaattctaattgtcccccacttacatgtaccagtaagcttaacatatgtacaaatgtttaaaatatttagtttgatgtacaagttctacaatatatacaatatattgttttgcttaataattttgacaagaataactctacaaactttattattgtaccttatatttacctaggaaatctactttttcttctatattcttactatatgttaagactgaacattttcactgggtttgacccggacatgaccaactcgctcggatccgacccgctaaactcgaaaattttaaaaaacccattctgtttggccgggtcaggttcatcccagtacaccatcaggcgggtttgtagattggttttttatggttatcgaatttcgggttgaacccgaacttgcccgccaacttaatcactttttatttatttttatttttattacatatataatatgttaaaaataataaaaaaaaaccctagaatctacccattttattttgttacatagattacatattaaaaataacaatgtatacaaattttatctttatatattaaaagtagctatctaacgacaattcttgatttaacgattcattttaactttttaaaataacgctgttaacttgtcgttaacttatgataatattttttacatataaattaaaataaaacattttgttaacaaatttgtttctattcgcttctcttgcttattttagaaagaaagaaaaaaactatttctctttcaagaatgaacgtgaattgaagtcgctcaggataaaaaaattttaaaaacaaagaacgatttgcatttcaactctctatcttggtctaaaatggccagagtcaaacgagaaagcacgcggtaaccctaaaattgagatttaggttattttgtattggtttttaatcttgattagcagtcacttgttgctcagggggaacaaaaaattatctaatttgtttgtttttcttggtaatatctaatttgttttttcttacagataaatatttttttataagagaagcggagcccatttgcagtgacactcttccaaacgtcaagcttcattgttttttttttttttgaaaaaattcatcatctttattaattacaacccatagtgattacatgattaaaatctggagtaacatcactactcctgataacacgatcaacaactaaataggatgtttgagctaagaaatgagcaacactatttgcagaacgtctaataaaattgacctaaacattgcaagtcatttaacaacatcttacaatcagaaataatactcctaaagtatgaaaccataggaataaagctacgtaacgcttgcaccacagtaagactatcagtttcaatgacaaccttcctccaatctttccgtttaatccaactcagtgcctccttaacacccaaagcttccaccattttgggttgcaacacccctgaccgacagcaggtaaaagcttccaccaatgcgccagtttcatccctaattacccctgcaaagctataagttgcagttcctgaaaaaaatggcagcatctacattaatct

SEQ ID NO: 393205 - DNA, 590 bp, Cannabis indica
atttttttaagttatatgagattaatatgtttaattatattaacaataatatgatacccacaaaaattctaaataccaataatatattttaacaattgtcttttaacaatatgtgtttgatttaaaatgacctttggcaaacatgatcaatctaaaagaagttgcaggtagtagtataagtataaaccactacgactgcgtacaacaaaccgaaaggaaaaaagaaaaatcaaacaattaatgaaagaaagaacagagaagactttttgatgaacataatatgtaaaacgacaaaagaaagatgagactttaaaagagttgaattgaattgaagaaatattgatgaacctaaaatataaaacgacaaaagaaggatgaataatagttaaaaccctaaaaagctaaaatgaaaacattatttgttacatgcattgcacaaatgacgtggatatatgaccgtgtgatggggctccacgtggacaagttggcggctgccacttgccaaccaataatttctcccagacaactcacacgtgaaccccttgtgttgtggatccctcatctaccataagaaaattctacaatgtatt

SEQ ID NO: 393206 - DNA, 1016 bp, Cannabis indica
tttttttttctcttaatttttctttcttcataaattttttgcagctatgagattattactttaagcttaaagataaactgattgaaaagatttctttctatcctaattcaaaagtagattttattgaggtcattaagaaaaaattgtctacagaacaacttaagctttttaaggaaatatgttttgatcattttctagatatgccatcagtttcgatgcaagctcagttgattcatgcatcattgtagtatacctatcatgggttgagggtttcgctgaagtcaaaacagatggaaaagaagaagaatttagatattaaggagaattgtgttaggcaatacggaatgggggactttccattagcttatcaagtttggttgtatgaaatacttccaattttaaagaagaaaaaaatattttttcgtatgattctgctccaacttttagaatttgtaggtggactgatagtacttttccaaattaaaataaatttgagaaaaaagtattttcatcatctaaggtaaaaaaaaatgtaaaattagtcattagtttttttcattttgtttatgtatattatttggtaacaaagattttatgctaaactatttttttttgttaaagctgaaagctgtactaattgaaccaactgattcagagaaaaatttattggatcttttttattttgagtggtatggattgagtacttctgatgatgatttcgtaggaccagccatgcccaagaggatagtgaaaggacaaacatctggtgttaaaaatattacggagaaggttgccaaggatgtgctggaaggtgtttacactaatattttgaaggagatgaaagattttatagcagtaatttcagaccaacagaagacaatcattgattctgggttactagagtttaaaaagcttattaaggagaaattctaggttacaaagtgaacactatatttaggcatgcatgattcacatagaatcaataatgagaggttataacaaatcgcttaatctcc

SEQ ID NO: 393207 - DNA, 1083 bp, Cannabis indica
tttttggatctttcgtaggcacctagttgttatgtgtcaagttaatggcttgatagtccttaattgatctaagttattaaatttttaatttttatttgaaaattaatttaaatataccaataagaaaataacacgtgtataatgacttgacgataggtacttacggaaattctaaaaatataacttaaagattattattttaaaaattaaattcaggtatttatctgcattaaactaaagtatttacgtcacaaattactctttatattgaagtacacaaatatgtcgctaaattttgcgacaaaatcaagttactaggcattcactaaaaaaatgtaagtaaacattagaaatgcgcttccacgatgcccatgttagagtgtcgcaaaaagtcactttgtgcgataaattaatgcatcacaaaataatatataattgaaaaattgttttataattaaatttattattttgtgaccatttgcaacacaatatttgttaaaggcattcttaagaaatattgtaaacttttgtcgccaatgatttatttataaaatattaaatttttattgattgtgatatttgacattactaaaatgtgtcgctaaagataaactaaaaataatactaaatttatgatcattatttttaaattaaatttttattcaattattaaattatttttagtgtgtttttaatttagttctactcttgtttggatcaattttacgttttttatattttatttttgcagatttaaaatagaaaaagattagaaaatatcaaagaaataagatggaaaaaaatataaaaaaaatctacaaaagatgatctataaatagagaaaattgtagcaagaaaataaagctagaaactttgcgcctaaattagactatgttagtgatcaattttacgagaagtaaaaccacaaagttttagatctctcttttatctttctaaaacattctttaaatcgttcctaattttcgagtctaatatttgagagtagaaagtccaaaatactatcagtcaatgcagcaaaaactcacggccaaataaggggtcatgcctaggcatggaatccca

SEQ ID NO: 393208 - DNA, 588 bp, Cannabis indica
tatatatatatatgtacaaagttgcacttgtgagccagattcaatgtacttcttgttgttgtattgttttggtgtattccatgattcctttagcaaacttatttttattatttcataccaaaataaattaggtaaaaatttacaaaattataattaatgtacgagtaattgagggcgaaaatttttatggtttaatttttatatacttaatctttttatttatttatttatttatttattttttgacaaaacttctataaatttactttttttatatataaatttgaagcgtcaattaatatcattattaaatattaactggatgactactgtctacatctgtgtatatgtgaaattaaaactttaaagtcaatacaataataattcaattgaaatttaacgatgacatccagctagcatctcaaatttataaagaaaaataaatataagaggattttgtcactaaaaaataaataaatgagttaaatgtaaaaagtacaagtataaaaaagttcgtcacaaataacccttaataagtagaacttctatttaagaatactttattcaagaataacctctaatttgtta

SEQ ID NO: 393209 - DNA, 535 bp, Cannabis indica
gaatgtaccatcaaaaaaggctcatcttacacatcacgagaaataagacatcatttacaactgagctcttataaggtttacaaattgaaaaaaggacttgcttaatgaggagaggaatccttttagccaaaccttattcttttaatcgacaaacaagaagggctaatccatccttgttatttgcgaggaggatcacgattcaacatatgctaatcactcagcgtattttttgagaagtaatgaagttactcgatgaaaacatgatgaatatttagataacaaaataacggttattcattttaaataccaattgaaaacagttccctcaaattgataaatatatgaaatgtggagaatgtccatatttgataactatattttagatcaaaattagatactgctattctaatcctataaatagcatgactcatgttgtagaggggacgaccgattccctaacataatgaaattctgccaaaatatattttgtacacaaaagatccaaaaataagaatgactcgtggagtatgtagat

SEQ ID NO: 393210 - DNA, 531 bp, Cannabis indica
tattagtatctagtattttttttgttattagagtaattaagtagcgaattttatataacttaaaaaaataatttttaaagaatgtcgctaaccaatcgtaggcatgttaatttgatgagaatgagaattaattgtatagtattggttcctatacatttgtttactaaaagtcatcactagtttctagtatcctccttggtgtcataccgttaatagtgtaattaagtagcgggtctcatataacttaagaaaataatttttagagaatattgttagccaatcgtaaagtgctacctatcgaatgtgttgggcaccacatgtgtccaacaacaataataattaaaaccaaataaggagacacttgcttgtatttcacacatctgaactcacaagttgcaactttcctacatatctatgttgatgacttgcttatatgggaaaggatcaaaaccaaataagcaaactaaagtatgtccaaaacagtgagtttgagatgaaagacatgggagttgctagaaaaatcctaggcat

SEQ ID NO: 393211 - DNA, 1485 bp, Cannabis indica
atttttttttttcaaaagaatataattatccaaaatagtacatttgtaaaatcaaatggcaaaactttaaaggtcatagttctaaaaaataaaaataaaaaatacatatttattctagagacactagtccttcatttttttaaaacatatataacaaaatttcaatattaatttttgtagaatacattatagcaatttaatcctttttccatttttttttatgataaatctattttcctttcccaaaactattattcattacataacacccaccataaattagatatgataaaagaaataataataataataaaaataaaaaggagatgatttatgggtaagaaaagggtatcaaaatcagaaattctaattggtccaaccaatatcaccttatccacatcatatccacaccatccaaaaaaatcaacaaaaataatcccttctaaatcccaaattgatcaaatatcatatcaccactcctcccaaaaaaacattaaccatataccaaaaccccaactcactcttccacgtaccacaaactcaactcatcatcaccggccatggccatggcaacccaagccaccaccagcctcttagtccccaccaaaaccggcataccctccgccgaccgatcagccaccgcctcatcatggaagcaatccatttccaccaccacctcattcatcgccacccccctcaagctctctcaccacgcctcatcacgctccgttagagtcatggccgccgacgagaagacatcgaccgaggctgcaccggcaccggcgaaaaagaagccccagttgggttcacaccgcctgagctagacccaagcactccctccccgatcttcggaggaagcaccggaggtctgctacgaaaggcacaggtggaagagttctacgtgattacatgggagtctccgaaggaacagatcttcgagatgccgaccggtggcgccgccatcatgagagagggaccgaatcttctgaagctggcaaggaaggaacagtgtttggctcttggtactaggttgaggtccaagtacaagattaagtaccagttttatagggtttttcctaatggagaggtccaatatttgcaccctaaggatggagtctaccctgagaaagtcaacgccggtcgccaaggagttggtcaaaactttaggtctattggcaagaacgttagccctattgaggttaagttcactgggaagcaaccttatgatttgtaagattaattattgctattattaatacataatttgtgctgttattaattttgatgttgtatttatcatcatgactactacgtacgtaagtttgtgaatttcaacattattgttcattcgtagtagtgcttaattccttgcgtaaatttcgaatgtttaattcgggagtgttttatttgattgattttgctataactatcaattaaaattgaatatagtagttatttttgtggtttttataattaacaatatat

SEQ ID NO: 393212 - DNA, 868 bp, Cannabis indica
caaaaatttaggacacattattagagacaaagatgtatcactaatttagcacaccattgaatatgctactaaaaatttcaaaaatataattgatcactgttatttagatatttaataaactttagtttttaactataatttttttccaatttacaaaaaaaaaaaaattcattaatttttttacctaatgaaagagttttgattattggataaatgttatgttagttaatttttttttaaaaaaaaaaacttgtgttgtgggtatcaattattgctcgtgcatgagtgatttgtgacatttatattatactcatagctaataattaatcctacctttataataaaaaatttagaaattttagtaattgtatatatattatgtgcctgattgaaatatataaaaaaaaatgtctatttaaccatttagtatggatatatcccaattattattgcattatttttttcaaggattgtggaaattaaatggtgggtgatgaattatttgtagagaggatcgaattgtgtacataaagatgattaggtctttgatcatatctcgtcttcaagttggttgactgcattgattgtcattagacatgaatgcacatcaatggctccctacatgactaaaccacactacatcacttgaaatgtgtagattagatggaagtgcttatcagttttatgatatgacatgttataattgattaacggtttttataatttttattaaaataagtaggacgtgatataaaattgtatccatagtaataggagagttctatttgcaccacttaaatttataaatacaccctattattaaaaaaaaaaacaataaacttaaataatttttaaaaattattcttaa

SEQ ID NO: 393213 - DNA, 1131 bp, Cannabis indica
atcccatcttccttttctttcacaacttcttcaccattacatgttaccacctcatccatacgcctacgttttgtttccaaaataataatcaactctttatcacgttcataactccctcccgtaagttgctctgttcattattctccatatataaaccagatacattattctcaacatcatccaaatgtatttgctggcctataatttcggatcctccatcagtgccaaaaactatgggattgacttccataattttagcacgattagttgtcgtgtcttcctcaatgttccaacgaagtctcccaccatcctccgacgatgaatcctccctagtcctacctgtttgaagccattgtgctccgattagatagatcttcttcctcgtttgtgcccgcattccattcccataaggtttaataatttgatcaacatcttgatcaaaccgtttttggcaaaaatattctgagtgacctatgataccacgaataaaacaaaatgtaggaagatattcgtacttaaacgtagcccatatccattcaccattatctttacacaactttattctacgcttcaatagtttctccacatctatcgtaacttgcacccgcagataatcgcgctaaattccattaaaattctttggatcagatttaacgaatgtacccatgtaactccctgcactacgcaccaccttttccaacataaagcacattatgagatcatgaatctgcacccacatattcattttatgcaaatgaactgccttaggattttcaccacgtttcagtctatgaaaaactagaggaaatctattaaaagtccacgaactcccatctataacgctttgaacatcaagtttatggtagaactaaaatagatacagattaatatcaaattccttaacatactcctttgcctggttcccaaatgggaagtcattaaatgcctcattgcatcaaagtcaattgatctacccgtaaggaacttcccaacaaggcaccatctatcatctaacaccatttcatctccatctgatcccccttcaatcaaaattccttcttcctcatcatcaatctttatttgtgcatattgttcctcgagtgcaatattttgcttactactcgacgccat

SEQ ID NO: 393214 - DNA, 594 bp, Cannabis indica
ttattagttaattgtctaactatggagaaaaaatgaatacatatttgtatgtttaatttttttgggtgcacacattaagatttttatgttatttttttgtgtaatttaaattactgtcttatttttaattgattatattcttagttatctattagttaaaatttagataatttattattatttttatcaactctgtaatatatattatatatataattgtgtaatggttaatattatttttatttttataattttaatttaattacatttaccattttaaaaaatattatcaaataagatatacacatatatcatttttttttaatattttattaatctagtcctatctcttttgtcaaaattgttgtcgtgcaacaaaaaataaaataaaaaataatagtagattgttgcttttaataagtggcaagttctcttgcattatgtactttcataaatatatatattctccacactaacgcgttccactcacttgcccgcccgtgactctttgttttttttttttttttttttttaaaaaaaaaatttaacgttttataaataaaagtaaagtcagacctcatggtcattacaaaa

SEQ ID NO: 393215 - DNA, 746 bp, Cannabis indica
taaaagtagctgagttcgattgttgagtaacataaaaagttagtgatgatccaatcattcctctttcccatttctttctttcggtccttttcttcttaaataaaaaaataaaaaaaaaaaatcaagtgagcccaactactttttttcttttcgttttccctcttccaatctcaactctctttctacgaaacttatttttttttttttggtttttttttaaactaaataaaaaattgagccaaaggtaaagaaagtaacatttattgtaattaaaaatggtgaaggaaaaagggaaatttcacagaaaaggcatgcccaatgttacaaaaataacatagataggaaaaacagtacaattttgtaattaagggaaagtaataggacattactgcaaaaagaactttcacagaatcagcatgctactacatactttaatgttgtggtaatgggacccactacagactaatctcatgtaactaattaaaaaaaaaccaaaaatatttattaaagtatttttaaatgggaaaatcaaggtagtttaagagattgattgtttatttatttatttaatttatctggaaaaatattaatattctattaaagatgagtttttgtacctgaaacgaaaatggagagaatctagagtctctttaagacaaactcatataatttctttctctctcgaaaagagaaaaataaatcaaatgaaaacctttgaatggaggaaagagatggaatgggaggat

SEQ ID NO: 393216 - DNA, 2368 bp, Cannabis indica
aattaaggttgtaataaagtacaggacatttatgatgatgagagagaaatcacaagctggtcccatatgcaatgcatgcacagttaattgctaattttgcttaattaattaatatatttttaatttgaagtaattaatagcaaattagacaacgaaattgggatgacaaatcctctaattaataaataaaaaaaatgaataaattttattcatcaattacaactgtcttggcaaaattaagggaatgttaaaatggaagtaacagcaaacttaatctaataattttattttattaatatcaatctctagctatttttgttagaatgacaattttattcttcatcaatttttttccttatataataacaatttttttatataaatttttctcagtctcgatgaagattaatattatccaaaaaaaaaaaatcatataaggaataatatatagcaattatttaattaataaccaattattctaaaattccaaattaccatatatacaaatttacaccaagtggaaatttatttgacatcttatcttatcttatagtcatgacatattatacttgtgaaggtcttgaatggtcacaaaaattataatttattgtgattaaatgtatttttagtcatcaaaattaaattagtgacaaattatatttaaattgtctgttttaatcacaaataattttttgttgcgactaaaaatcacatttagtcaaaaaaaattatataacgactaaaaagttatcactaaagttagcagtttgttgaactgggaaaaataaaataataaatacatataatcaacaatatatagtttcatatgtgtacaaaaagggaaaggaataataattatttataacaaaaaaaaagaaagcaaaaagagtggaaagtgaagctaaatataaatatatatatattaaatttttttaaaaaaaattaaaataaaataaaaaatccactctccatgtggaaatgtatatttattctaaagtggggtacatacatgcattaacttaaataagaagtacgtatactagatctaccttaatttctattctaattaaataatatatattactaattattagagtatatattgagtaaagttaataataattataataaacaaattgtttcatgcaaatgggtttacgttacataaaagttattaataaaatatttaaagtcaatatatataataataacaataattgtgttcaaggtggaaatgctctatatattccacatcatcatccctataaaaattataacttctaatttttttctcatattgctaaaaagctagtatttaataagaaaatattttttataaaatattattaaaaaatattaagtactactaatatgcaataacaatactcgttcactatagttaaaattaggaaaaagaagaacaaacaagaagaaaaaatctatttattatttttattcattgaaactaaaaaaaatgacaatttcaaagtaacaacattaattaataaaaaaaatttgtataaagcataccatgcatgaatcaacaagtgggaaaagagagaaatttcacctgtaaaaatatgtataataaatattcctgctttgataaaattgttaagctctgcatataatgaatatatatataagtttgtatattattcacaattgagtgaaaaaaatgatatatttataattttctcgggaaagtgaaggaaaaaagttaggagagtgaaagtagagaatgttatggaggcgatttaaagagagtaatgaggctaaggatagaaagactcaagagaagtgagacacttataaattgattcgaaattagaggagttatatatatatatagagagagagtgctgttacacacatataacaaatgttttggattgatgtccatgtatcagtggtaacacatatcctttggcctttcaaaaccttcctcaacttctctttttcagataagaacatttgataaatgtcccttgcaactgttatcctagaaggagggtcgaactttggttgcatatacttcacaaattgtcgaaacccttccccttcaacatgtataaagggcaactcatctagaataatatacttagctaaggattgtctagctccttctttgctccatgaaactgcaactaagctactagcacactcctcagtatcttccccaccagattttttagtgagtgataagagtttttgtttcttatcttccactcttacacttagtgggtacttcttacactgattttctatgtgattacgcagtgtgctagtcccatttaattttgtgtctgctgcataatctatcccacaataattacaagcagctcttggtttgtcattgggatgtttc

SEQ ID NO: 393217 - DNA, 1066 bp, Cannabis indica
acagtgtgacgcagtatacgcgttaccataaggttccacctacgtccccaaaaatcttgaagggatgtagaaaggtacggctcattaaactgtggctcgacctcgagtcccaccacggctcgagccaagccagcagtaatggctaaaataatctcgagaagtaaataaatcaaaaaacaataaagaaccaaaacgagtttgatgaatttgttgtttgtaatgatcaaggaattgaattagaatagccaaaagaagtgcttttattgggaaattgattagttgtcgttttggggtttcttttgtcgttttgatctctattggtagacaagcaatagcaatgaaaagaccaaaagattggttttttaaagctagagggcctttttgaaaagctaagagtaaaagcttgaaattggctaaccaagaaatgaaaaaggcagtgccaccacataaatttattgagtagagatttagaggaagaaagagaaataatgagacaattgggagaaaaagaaagagtctttttatgccttttgagattagtttagttataatgtagcaataagataaagagagtaagattataagccataccttgatgaagttgttaatttcattattctccatagttttgtattttgtattatgaaaaggtttgaaacaagaaatgaaatggtgaaaggatatgaaagaagaagaaaaagagaattatttgagatgtggatatgaaatgtggtatacattgaatgtgggacccacgttgtggacctttatacaggtacaaattaagatttaattaatgtataggtttttcaaccatatacattaattgtagagtggggtgtcaattgttgactattgggattgaagataataatagtatgatattagtcacgtgtgataatagtgttttaataatttgtgggataaatatataagtttaatttttaattgtaaatatgtatgtttaatttttggcggtaataatacttaagttatatttttagaactctgtaggtacttgactattaaatatcaagtcattgttcacatgtcattttcttattga

SEQ ID NO: 393218 - DNA, 875 bp, Cannabis indica
gctatacatggcaggtgcaaacaatctgaatttgagagctttaaatccggagagcttacgctgcgagctccagctgagggatatgccaaaacattagtaagaggcttggtggaaggaaaacaactttcagaagctgaggctatggcatacatcaaaaatagttatacaaggccactataactgcctagtcttattttctcttgtatacaagtacaactctatcttctctaatgatgagaagctgttattattggttctgaaggcagaaccttgtggctgtagtatattttaagtaacttgtgtggattgtattatttcagtgggcaatggggattggattgttagtattttaagacttatgacttgaacttaatttggatatcattttatgagaacacaatgtggtcgatctaccttgtacgaaggtcaatgtcctcaatgggaggtattcttgtctaaattaggaacaaaattgggacactccgatcttgacttccgttttataaaagattttctacttctctttatgttttttatggtagtattttggtgacatttttaaaaaatttctaatttgatttgagaccatatcctatattgttgaggttgaaatttggccaacactcgttcgctaaattggcgagaagagaaatgtgtttaagtaaatagaaagacacaaaaaatttatggtagtttacttctcatgtcgcgacggtaatggatctacgtctacttcaagattttatttttcatgagatttacaaaaaaaaattggccaaggcaaggcctctaatttctagagagggaaagtaaagaaatatgtttagaccttatgagaacttagaagaatttgaaaaagaagctaaaggagctct

SEQ ID NO: 393219 - DNA, 1631 bp, Cannabis indica
aaaagaacatccaacaaacacttgttattttcggtcaaatgattaatattctcttgtttactatcctttttatgctcatttacaatgttatcaagagttgcttctattattttgaccttcttttccatattatggcccgagcgactaatccaatgcaaccacttttgtgaagggaatgcttcggtgacactaaaaccggcagcaatctttagaacttcttcaacagtcgatataaaggctctttggtctttacatttcttaccaaaggctgcccttgcagtgatgctatatgtgagtgagaatatttttacactaagattgaaagactctccttcttttgaatgcacatattgaatgaaatcaaacacttcttcttctcgaatggttcgaaaagattgtactcgtctagggcttaaaaactgttctaagcaaatcttccttatttgtctccaataatcaccgtaatgtgcaaaaacaatatcaataccataatacttaccagcaatgaggagaaaaggcctttcagaaaagttgacatcatgagttttcatcatctctttcgcaatctcaggtgaagaaacaacaatgtgaggaacttcaccgagttgaaggtgcatcaatggtccatattgcttagccaaatccctcaaccggcgatgagggagagaagagcctataaggttgtgtagatttccaatgagaggtagcttcattggccctggtggtaactttggtgttgaggaaacattgcttgttacaatagctttatcatgattggtttttgatgatgatgtcttcataatcaatgggatgattataagaagtaatgtgagaaggaataagattgatggaaagaggtagtccatgatataaattagagatgaataatggaaaagagtgagtgggagaagagaagagaagagattattgtttggaatgtgaaacaatgcatgaaactctactaactcagtttgattatatatgcaagttgttatgtactgtccatgcttaaatattaacgaagtatatttttttttaatcagtaaatcattaagatgcatggaaaaattaaacaaagagaagaagactgagaaattaattctatgtgtagagaagatggaccatgatgatgagatagctctcatagctaggatgcgatgaatcatggcaaactaatgcatgcaaagattataatttgtcagtatacaattaattaatattatatatgcaagttgactctctgtcaataactattcattattaattaatttgtttataaaatatgtatattatatatcaattatactttcaatttgatcatataatatacatattttcatgcacattcattgagatttcagcttgattctttgagcatcatgtataaataataataatatataaataaaatatttcctaccaaaaagaatattttagaatttaatttatcggaattttacactatatgtttttagtgggactaattaggattttttccttcggaactttgacatttaccaaatcatgcccctgaacttttttggcccttaaaaattccacctgaacttttgagattgttacatttaaggacttttgttcattcaattttactgtttcagtgattgtttatg

SEQ ID NO: 393220 - DNA, 641 bp, Cannabis indica
tttttttttttaaattgaaacattctgattatcttttctagttatgtaaaaaaataatatttttctttccgaacaatttagtaaataacataataaaatattatctccgattattttctagataagatttctataaatactcccaagtcatttattccgaagacaacgtttcaatgaaaataaaaataaaaacttaagtacatctagtaaaattcgagtgtgaagttttgtgttgatttaaaataaaaataaagtgctactattcctagccttttatataaaaagctgaaaacatgacattgaagttttttattctgttagaaaatattgtaagagatgtattattgttaatttcatattaaaatctcttagtcaactcttatatatgcccgaaaatacatgtcaaaatatattttttttcaacttatttttcgtgacggtatttattaatatttacaacatcatctttgtgaaaatttaaaatttttttgaataatttacaatgtccaaaataagtttaaagtttttttaacacgcgtgctaattaaaatttgatataaagtagcactcctcaatatgagattgccagtagcacacctcaatatgatattataattataacgaataccgccatgaaaaaa

SEQ ID NO: 393221 - DNA, 933 bp, Cannabis indica
aaataattccgttaagtactaaaataataaatatcctctttaataaaattaatttagctagttaattaaattaaattttttccaatttaatttaataaaattatattttctaatttgatttaataaaatttagttttatctaatttatgcaattaaattagttttgtccaatttattttaattaacatagcctaaaaaatttatcaagtgaattgaattcattttcatatttaatatttatttttgatgcaatgacgatgcacctcggcatgggtctaatagtggtcgaggttatttgacgaggtggtttgcataaagtggcttagcccatgtcatagtgatgtggttgacgccatgaggaagcacctcaaccatgaatgagataaagcgtctcagtgtgacgaaacagctaggccataaatgaagtggatgtgcgttttgtaccctaactaaaactctatttcaatgtaatcttgaatattcatttatcaataaagaaacagatttatttcatggttcacatgtttatttcatgatcatttgtttaatttataatttcatctataaatccttatcacattgatatttatgattaccgtgttgtctacacattggaaagtaatcaagattatgtaatttaataaagtcccacgatttatcaatacacaagagttccactgatatgaaaatcaacaatgtagtttgctcacaccttagataagtattatgcccttttcagggcattggtaaagtaagcttggattgtatgtattgttatcgttgtggcatgttcaacacacaagtatacgtaatcgtttgtattgctcacaaagattgaggtcaattccacaaggattgtagttaagtacgttaaaattaaactcttacgtcaatttggttgaataagatcatttaagagaaaatttaaactag

SEQ ID NO: 393222 - DNA, 1571 bp, Cannabis indica
atggattttatcaaaatttaaaaattaataatcatgctgtaattaataacaaaacaaaatataatcgaaaatttaatgaaattaacatagctttttttccctactaattaaaccacaacacttataccattaataattaataaataaaaaattatttattttaatatatataagataattactgataaatgaataactatataagattaattatgatcaaagtagattaattaattttttaaattattttgttatagggtttctaaattaattaataattaattactatatataatacgataattaaccagcaactatgatcactacagaagatttattaattttgtaaaaaatatttttgtctttatcgcccaaaattgttatagcttctagcaatattataatattattcatccaaggttcttaatttaataattaattaatcaactatatcatattataaaccaataaatgaactaagatcacaaaagattttctctctaattttgtcttttatcgcccacaattttttatttttatttttattgcccacacacacgaaaaattgttagctatactctttcttcctaagaaaaaaattaaatattattaatttgttctaatctagggttttttttttttttatttttattaattaagtgtgactgtgattctagagagttaaaattattaatgttcactaattaattaaaatctcacacaagattcaacaaactatcccttcattaagctatattttaataatttaaaatctaaaaattcgcaagctatagcataaaataatatacatatgagaaatgttaaaggacaccagtagtgcctagcatcctcctatatgtcaatatcgctattgtctaactaagtatcgggtcccatataatttaatataataacttttagggagtttcgttagccaatcgcaacgcgacatatttagaaaatggtagcaccactggtgtctaataacaatattttatacatatatataatgaatattaattaatctgtagcagttagcttcaataataataattaattaattatatcattataatgcgcacgtgagacactaaataaacttattaattactattacaacgttgaaatattattactagtaataataattgaattaaggttttttattgaacaaataattcaattaaggtttatttctcttaaaaaaaaatgttacttagaatttttacctcgaactatgacatatgtattattattatgtcactaaatttttaacatgctataaattgttcctgaactatttacaatattgtaaattggtatcaaattttgtcaggtgataaacaaaaggataacatgactattaattagctaattactacatcattatcacatgtataatttaatattaaaaattaaaatatatgtatttttaaatatcattaaacttaaaatcaattaataattgaaaatattatgtaaaacttaattaaaaaaaatactaacaagaaatgtcacttttgccagcacatttttgtactgataaaagtttggtattgcgttggtaaaat

SEQ ID NO: 393223 - DNA, 1710 bp, Cannabis indica
acagaatagaatcctcaacaacataattaataaattgtcaaaatcagaacactaattggtatgtaaattcacaaattttgccccaatttcatgactaaatcacacaacatataatccaaccccaattcaaataatctatcttcagtgaattaggtagccaccaacatcaacaggcatgcaatcccttgatttatcgttgcccctgaaaaatcaccaaaaaaaaaaaatttaaatctttattacaaacagtacccaattcgattaaccaaagccatttaaagaaaaccccctaatattcaattatagagaaattaacaatgcatcatcatatttttcaagacccatatttctttaaccgtaattcgacattaaccatggctgcattgacatatattatcaaaatttataattcaaatctgttaaaaaaaaagctgagagaactcaccgttgctggtggagccggaaccgaagccggagtagacgattgagccgtaatagtcaaaatagagaagcaacccctagaatgaagaataacaccctggaaatctccattatcactgaaatacacacatagcataaactctctctgcgatgaatcaaaaagggtggaaatggccatcgtcgttgtttttgtctaattcgttgtcattatcatcctcttcgtagtcatcagataccggcaccagccagcaagctctatggaggcggaatacgacaccgtgcaagagagaacgtgagcgagagagagagagaggcggaatagcagaggataaagagaagaggattagggtttccatactttagggtttttttctttatcactttctatttatactttttaaattttaccctcaaaactattttattttaataaataaaaatctgatattaattttttttttttgaaatgttaaatctgatataattaaggatcctagattaaagactataaatatcataatttttaattaaagattctaaattaattctctaattatattttaattaaaaataattgtccaataatattttagtcctctttcataataatttttttaaacaactttcacataaatttttaaatacaactaattttcaaaattattcttttattgaaaatatgtaaataaatttttcaattttataaattctcaaattataaatttattaaaaaaaaattacttttttttttttattttttaaatttgaagttttatttggtattttattttattaaatacaaaatttttttaagaaaagaaaaaagtacaaatttctttatttttttaaatttaatttttttaagtattttttttttattaaatacaaatttttttattaagtataaaaaaattctttctttttcaaaatgtgaaacttttttttgatatactaaaaagaatatttcctaacagtttatgactgttgggaatactaagtatagccaacggttgtacttagtattcttaacagttataaactattggcatttactgtttttttaaaaaaattctatttagtattgcccacggttcttcactgttttggcatttgtttttcccaacagtttttttgcttcagttctaaaccgttgggaaaaatctttgcttactttttccaacagttttcataattgacccccttatttttttttgatgaaataattgacccccttataaaccgttgggaaaagccaaatttgtagtagtg

SEQ ID NO: 393224 - DNA, 1136 bp, Cannabis indica
cccaaatcattcatttaagcctacctatattgagagttgataacatccatggtgcgttatacttgtttagatttcaaaatatgtgattctaagtactatataaatacatatattagatgctcatttagatactaatttttatctagaaaaatattgctacaactttataagcttaattgttttcaaagcgattcccttagtctttgcatgtgtttttcttcaattgaggaaataagagattgtttgcatgtgtttttcaatttttagaattgtatttttaaaagtaagagaaaaaaaatagttttttgctattttaaaaatttaatagtatttatctaatgctttttaaaaactatttataaagttttcttactaaaaaaaatattaatattctacatcatactacgacatgaatctagctcaactcggacccgacctcgatcccaaaactcagactccaggcctagatcccaaacccggacccaaagaatggagcccggacccgaaccctggagttggatctcgggacccgatactcggaccgtgatcccaagtcgggacccggaactggactcagccctagacccatggccgggtatgtgagagaaaatataaatagaaaaatatgttagaccaaaaataaaaattatttttgaaaatagaataaacatcattttaattttgtctgttttttttatctttttcttaactttattttcagaattctttttttaaaaaaagaaaaattgaagccaaataataatccctctaagcttttagataaaagtgtaaagcaatatattgttcaaactttggtaatccttactagcttttcagtcgcgaggtgatgagagtaattaattaagatagttctttcttcttattaacattatttttgttctttattttcttgttactttgagttgtaatacattatcttcatttcctacttttcttatttacttgtattttaagtatttgtattacaatatttatttacactcaatatgttagtacttgtagttttatgttcaggaatgttaattacaacctcctattacaatttcttagtcaatttctatatctgaaatcacatgtcgaaatattttttttcatagcggtattcgttataatta

SEQ ID NO: 393225 - DNA, 1722 bp, Cannabis indica
gcctatgactaagctgacacgtgaatttctacatatgtaacatgtcattctgtggggcaatccttgtcagctgccacatagaatgacacatcatcatccacatcacttgcttactcatcatcattgactaagaaaggtggatccaccatatttacatacctacaaatataattaattgtaggtgaaaatctttctccacaattttttatctacaaataaaaattatttgtttatttgtaggttaacgtatttgcctacattttgggaagttttatcgacatttatagtttgtaggtaatggccctattttcttgtagtgagaggtaggggcggagggtttcataaatgggaattttttcagttcagaggaaaatgaaggagacgaacagggttactgaatataacactacctctaatgaggacaatgtcctcattagaacccatgtcctcgttagaagaacttcaaacccctacaaaaatgcgcgaaatcttaccgccaatgtgaaatttcttctatcgatgacatttttccaatgtcctcggcaaaagtgttcacggtacagcctaacatttttgtagtgggcactataatcatgaacaaaaatatatttatatatgttctacatttaatagaatttatacattaaatataatcatgaaataaattatgtgaactatgcaaaatagaatgatttctaatttttattaattagtatatctgattatattgaaattagttttatttagggcacaaaatctaacaaaataatcactttttttttttaacataaacaaaatagtcacttgaaaagctcatttttacactaaaatacaaaaataaattcaatcaaatgtcgacaacacatttttgagtattgaaaatgcgagacttaaaaaaaaatgaacgaaaatcaacccaaaaacgagtaaacaatacaggaataaaatagtataaagatcatagaaacaaattctgttcattctcttacaaatttttattctcgaattttataataatgctcctaatttatatttgttatgtttgatttagttgtgcatatatttaaacaaaaaataattaagttcggttagaagataaaacctcaatgtatagtatttgtatagaatgtatgaatgtcgaattagtttgattagaaagaaaataaacattaatgtatagtataaagaatgtgtgagagtaagatacaaataaataatataaaattgaaatatacaattcacttagaaaaagaaatatgagctctaattgtcaaaaattaatataaatttgacacaatctttttataatacaataaaatttgcatcaccatataaataaattattttctttatatatttatgttatttattatttaattattatatttagttataatatattgaattatatatttttttcatttattttcttatatttttaataaaattatttattatattattaaattttaaattaagtttataattatgcattattataaaataattttttatgctaaataataatttttaagtggtatgattttataatatcacaagaaatgtcacttttgccaacatatttttgtgctggtaaaaatttagtattgcgctaatataataaaaattacttttaatgtgtcggcagaaaggattggcaaatcaacgttggtattagaacttttgtcagcacaaaatgaaaagcgctggcaaaaatgactt

SEQ ID NO: 393226 - DNA, 579 bp, Cannabis indica
agcccatgaatctcaacccaaaacgcagctttattcatcagaacaccaaacgaggccccgtcgagaggccattccttgattttcagaagttgcctagcaataatccaagggcgatgtttaaggacatcctccttatcttccaacaagtcaaagaagaaaccccatgtccccctctccaaagtcttcattctccatttacccttcaaagggcaaaccccagtgagaatctgtttaactcttcctttggcaagaggacgggatccaaaaatcttagccaaaacccttgttttcacgacctcagagttaatctcgaaatcatcttcaatgtaaagaccacttagctttaatttggaaattagcagataattagggtttaattattaaacttgtttattagtcttgaattatttaattatgttgatttatttgaattcagaatgcatcttatatgtcatatatagaaatttcataattttgcatgttttgtgttcggcaacatttgtacgcggtatttggctattagaatcacatcctattatttttagtatagcgggataataaaattagacattgagaatg

SEQ ID NO: 393227 - DNA, 566 bp, Cannabis indica
aaatgctaatgaaaactttaaaggtgtgtcacattaaaatatgatcatattattattggtatgttttaatattggattctacatttttcttaaaaaaaaatcacaaaatattgaaatcttaattttgataccttgattattaagaattttttaaaaatttataaataattttaaataattataacatacacgttaatggagaaattatattaaaaccttttaaatgcataaactgataaagagtgtcacaaattatttgaatcatataattaatattgtaaattattcataaattttttgaaatttataaataatcaataactacaacaatgatcatcaaaaattaaactaagaaattatttaaaaataaaaaaatttaatttacttaattgataaatatagaattgtaggaaaaatcatttcaggaatgtactataaaattactcaaagttttatcaaaaatttacttattattattttggaattttatttatacccaataaagacacccattcaaataattttttatgggaattttgattttatatgcttaaataattaaaaaa

SEQ ID NO: 393228 - DNA, 660 bp, Cannabis indica
aatgttgtactaaatatgagattttttactattttaaatggatttatatatgttctggatggttattttctttttttattttccattgttgtggaggtgttaatcaatggtgaaatttaatttgggatttatgttttatgggtaatgtcttttggtggaagtggataaaatggattttggaaattgatagagggttgaaattggaacaaaacccctcaaacgacgttggatttggtggtcagacatggtctatccgacaaggtcatgaactgggtcgcgtcgatctgagttgcagacccgcagacccacgagttggggttttttaaatgacagagacgataaaaacaacatgccatatgcacataaggtccatccccctttgcagcacaaaacgacgggtcattttatgatcttgctgcatgtcattttcacccaacgaaaaaatgacatgtcgtccgacagttaaaaaaaactaaaatgggggcgtgggggcacgtgcaaggtctttttttgggccacttttcaccagtttattctttttttttttttggacataccaacaattctaaaacctaattttattgcataatattaattcatgaatttatttaataatcttagttattaatattatattgttatggcataaattaatgttta

SEQ ID NO: 393229 - DNA, 1491 bp, Cannabis indica
tactaattagcctatattttaaaccattagattgatataaaatatgtacttttggtatcttatgattaagatagcttcatttatagtaaaggtatatgaattttagctgaaattggtaaccggccaatattagtgtaccattatctattaaataattttttaaaattaaaaaagtaagtacttacttaaaaaaatgaatgaataaataagtagtagtagcactttaattaaattacaataacctatttttttccaaaattacagtgtaacttatgttattttttttaagtgacacatgttattactaaatgtcattttatttactacttgcttgaggctagctcaagagagcctcaagtgaccataagagagtatgtgtgtgttggaggtcctgagtttgagtcccaaaatatacattataatatataaacgcttaaaattaaaaaaaaaaaaaaaaaatctcattttattttgtttgttttttttttttttcctattttgtgcttgtaatatttcaaacttcaattattttatgatgttctaaaaatttaggtttttctaattagtttttgttagaaacaaataataagttagtaagagattattgggtaagtctaccatgcacttaaaaggtatttcggtagacctcttatctatttcgacatctaagacaagaccatctccaatagatggtgtatattttggattaaatttgacctattttttgtatttgtcctccaatacacaatgtgcaaattagctataacagtaaatattaccattaactgtcgcacgcgaagcgcggcctgtttcctagtatctatataaagaagagatatgaagcgatgatgtgacatttttaaaaattactccaaaatacttctaaattattaattttttattagggtaaaatgatttaaaatacattttatccttaatcttctctttttttaataatttataaatatttatatacaattcaaaaaaaattaattattttaatttttttcattaaaaagaaaaatacacgttaagtatataaaataattatatatgttaacaagtctttttaaatagtttggatattttttttcaaaaaattaattattctaatttttttctcaattagttttttttttcttttaatttagtattaagttcttcactataatattattttcatagttttattttttttcaaaaaattattttctcaacaggtacataactttttttaatatttgatataattttattatttacaacaatcaaattaattaaatataactattataatgttaactatatatagatattaaagtactagtattttgttatatacacaacttatagtatataacaagataacatctaactaaactacacaatattagtatgtgagtatatgatatttactctgaatataaattattattcattatatgaaatattgctccatatatataaattaattttctaaatatattctgt

SEQ ID NO: 393230 - DNA, 1509 bp, Cannabis indica
caattgcagcaactcaatgggattttccatataatccattgttcgatgttaatgattagactaacaaaggtatgttatattatatgcatgtaaaataaataactctgaattataagtaaatgatatgatattatctttttttttttcatttttttcccttttatgcagagctcgatttctcgaagaaacaagaattttggggaatttataatcagaagtgctaaaagcatacatgtatgtaaagtgatgttgtaacttgtaatttttactcataatatatgtacataatgcattttcttttattttttattaattttctgggctatttttatggatactattgtgctctttttccttcttcttcttatttttattttgcctctttttgcataaaagagataaaattatgtaaccctatatccccctagcaacatgaattagaccctagcaataatattaaaagcttataaaagataattctaataattagaagataattactctccaacatattataattaaaattaaacttatcggtaaagttgttaaatcataaacactctacaaaaccaacttacaaaataataataaataaatattggaaggatatgaaaaaataaattgattctttgatgagtaaaaaagaaagaaacttataaagcatgtcaaaagagaaattgcatatacaaatagtagatataagtggggttttcactctcgttaacttccttaactctagccaaccgtcgcgtggagtttttctttatctctgaccaaaacccgtcgaccctcctctgggtttagatttggctctcttcgagttttttgatttcacaaagtagggtgttttgagttgtctcttctattcgttgctttcaatggtttttggtcagtgtctctttgcctcgctgacaaatcgagtcccagacagttttagtttggatggtatgagtctgcgttggaggtgtgttttctcaacaatgcttcctttttgtcgatatgttcgaagggtttcccttctgagaggatgggtagagggtcgcaagattgggattgtcgttgctggtggagccatcacacaaccatagttttgattggcaaagatcctttgttgaggatcatggatttgatgtcgtgggggtttggggcatggctcaagctaagaagtcttccaagttttttgagtgactgagagatggttgttaggctagttttggcatacttttgagtgttttaatctctgttttctttttgtgaatacatatttttgggacgaaaatcatgcttgttttccttgttttaggcttaaatgataaagttcataatatgaattgaaatgggaagaaatatgttaaatgaggtgaatatgatgaagttatcatagaattttacgttctaagatataatgggtgaagaattctaagttttgtatgctcaacacgcttcgtctatgatcgaaaatcaagtctaaagcctcaagctaatttttgactatgatgcgttcacttt

SEQ ID NO: 393231 - DNA, 834 bp, Cannabis indica
aaaaaaaagatggcgtaagtatcatgtagtaacatcattacatcaatataattttgaatgatagtatctattttatctttaataatatagtatttttgtattttgttaaataagtaagtatcttttaaaatttaaatttgatatgttttaattatcacataaataaaatatgtgaaattaaacaaaataattaaataataattttttttttatttttttttcagaaaatgaaaactacacaatattagaagaaaaaacatgtttgttaattatgtattaaactattaaataggattcacatttaaaagaattataatgttttaattgaattgggagatgggaacacacaaaaagtaggacagaagatttgggtccgcccaataaagctcacgatatggtaaaaaattacaatagaactcatttaataaaagtgtactttaattgtgtgccaaaaaataatataaatttggcacataataaattttaggtcaaatttagcacaatattttttatgatgtaaaatttacaccacaataaatgcactattaattcatttacatttatatcatttctattattttattagtatatttaactatcacattaaattatgaaatatttatattattttttattgtcttatatattaaaataataataaaattaattataaagttattaatttaaattaaaaaaatattaattagatattaattttacattaaaattttacaattgtgtattggagcacaaagttaaaatttaatgtaaatttactacaaaactattttttgtgacaaatatagaacaatttttacatctctcattggagat

SEQ ID NO: 393232 - DNA, 2025 bp, Cannabis indica
ggcataaaacccaacaatttactatatatcttatttaataggctaattatgaattttgtcccctgaattttgacatatactaaattatgtttttgaacttttaaggccgttaaaaatttctcatgaactgtgagattgttatatttaagaacttttgtttaattttgataagaatagttaatatggataaatgtttaatgggcatgatttgatacatgtcaaagtttgaggtacatgatttagtttataaacgatcaccaaattaatgaaattgaatgaaatttgacaaaagtccttgaatccaataatcttaatagttcaggaagaattttcaatagtcagcaaagttcaaggggcataatttagtacatatcaaaatttaagggaataaaatcctaattagcctttatttttattttttttttgaaaatttcaacttctctattttttgtgctgagtattattaacttgtcttgttaaatttagtgcaatattaaaatattagaaatggtcttaccttccttaagagcatctctaatggagtgttaaaaatatagtgtattattatattttagcacatttaagaaaaactactattctaatagtgttctaaaaggtgtgttaaatttgacacatgctttgtaacgtcctaaaataagaaacgcgatgtggtgagactaaatatacactaatcccgctaatcaaggatatgctagagctaagagcggaaattatactttaaaatatagaataaaataataacttgtaataattaaactttaaaatatatccaaaaagagtacaatttatttcgggatcccataaaatgttttcaaaatattacaagtcattagtacacgccgacctatgcagcaaacaattttccccctggcagacccaaccctcgtggtttagcttgacccgaacatttacaatacaccacaaaagccctcgacctcatagctgctcaacagctgacttatcgtttcctagacaatagagcacccgtgagccaaggcccaacaagacactatgaacaacaattataatcacttaagtgttgatgccactgcatctatagtctatttgacatagacctacctcttgcactcacacgtctatttacaataagaccttagaatagtttatctcgagtctaagtaccgagtctaacctaattatgccttaaccgcataatcccttgtatcaacatatatattatattattacattcatattcacatacattcaagattaataaccctagaagaaaaaatagctaaacttagggtagtaaccctagtctcagttttctgcataatatacaaaataacatacatgagtgccactgcgctaatctctatgtgctaactcactgtcttatttgataatccaagtgtgtggagattctaaatcctcgggtgctcctaggccagcaccagtaatccaagtcacacattctcgatatttcacaaatagggttaatccaaaatttattttcatacaaatacaaaatatgaactctaatcatagactaacacaaagagcgcaaaatgagctttccaataataccaagaatgtccaaaatagagttcggagttaaaaattatggccaaaacaagttttaaaaacattatgccctactaaacacatagcgggtcgcgacactcaagaatcgagtcgcggctcttgggttaaaaacccagaaaaactcatatttgagtatccaaaaatgcaccaaactcaacactaaaataccataacttgacaacaagcttccaaataaaaatgaggtattttctaagcatttcatacaccaacatacatccaataatcatgcacaaatcaagatttactctcacataaccaatgtaacttttgtaaggaattgagctcaacaaataactcaaaacagcaaatctacaaacacaacataacatacaataagaaattgttgtcgagtgaatttcgcaacaccaaaaagtattatttaattgataaaaaagagaattatttgagaaatga

SEQ ID NO: 393233 - DNA, 1167 bp, Cannabis indica
ctctctctctctctcgtctcacacacccacaccttttcaagtgtgtgtgagatccaaaccctaatctcattgtagtgtctaatgagttgagtacacattgttacacctaaatatgttcattctataagatcaatagcccactctattcttgagtattgaggctgacttggaaaatcaaggtgtggattcttcattcaagttcttagattggatgtttggttattatacgaaaagaataaaggatacccgtataggcatcaagaggtaattgaatttctttcagtagattagatttaatctatattcattatgttgatatccttgggcttatgattcatattagataaaaattgttgtatcaaaattctgcttctgcttttataactctgatatggaccataaaaaccaacataattctcataaacatgtttctagttcttctaattctcccaccagaacaggtaggcaggttggtaaacctttctattttcaagattatcattattatttggctactaatgcttctactcatttgtcttagggttcttctgtcactccttaccttttgtctcaagttttatcttatcacaagttatctgctactttcagagctactgttttggccatttctagtcattttgaactagaaatttttacccaagctcaacgcattctagaatgatataatgcaatggacacagggatagatccacttgaaaagaatgagactgttggaattattttaccaggatttaaatttactaacaagtatgtttctaacatcctaaacatgaactgccataaatgcagctccaacgggtgcaaggcagctgtgatcaggcgtcatcgtacagtgggaatcgtaatcgattcgtattctgcagatccaacagttgggataaatgctcattagggcggttaaaaatgcttgagtaccttttctgacaccaatttaatgcgtcgtattattaatagacgagaagcaaatcgttgcctgcaaagggaaataaatattaatgatgactgccataaatgcagctcacgcgcccgaagcacgtaccacggaatcgatgagcctcccggaaacaccaaacaagcctcatttatttcccaacaaacaatgcttggggggtaaatatttcccttcattttgcccaaaatacgtgg

SEQ ID NO: 393234 - DNA, 1040 bp, Cannabis indica
tttatgaacatgagagaagtgggcagattagtggaggctattaaaagttctatgccaagaagaaacacggaggaaaaggttgctacaacatctgtcttaaaaagacgtgaacgagaggaggagatacgcattactttgggcagtgagactgtaactggggagatcccttcagtccaaactatgagacctggcgcccctttggtgccatctgctcggcgtaatactgaggaggaatgtacacctattatttttacagtatctccatcgaaagatgttcaactgcaattttacagtaatctgatgatgaattatgggctgatacatcaccactgttaggggtgcatcacccttaccctcctgaataggtacatcgaattggcgaatcacatggcaatgatgaaattaaaagttgtgaggaaaagttgttgtctgctctgagatggtggtaggaattgtttcaaagcacttttgagtcattggtcaaagcccaaaagaagaaaacttggaagaggcatacactctccctagatggatatggtgttagtagttcattagctgatgggatgtctacataacaaaatcaagatatacggtctcctagtggtgtgaaaagaaagaatgttactgatggtaagatagaaaagagaagagtaaaacaaaatattccaccaattgttagtcctatcgtggttgaggatgaagtggcgcagtctgcggagcaaactcgacagccccaatgagtatcttatgctggaatacccggggactagggaacttaggtgcaatgttgcggactattgtgtgtaagcattccccaagcttggtctttttgtctgagactaagcttagtggtaattgggcagaaggaatttgaagacatcaatttttttaatagctttcatgtagattttgtagggagtagtggtggacttttattgatgtggaatgatgactgggatgttactattaaaagctactttactggacatattgatgttcttgtacatgttgggttttgtgccctaaataaaacccattac

SEQ ID NO: 393235 - DNA, 1003 bp, Cannabis indica
ccccatctgatctccatcacgccacggcagacttcagacctgtcaacctcttcaagcaaagatcattcatgctcgatgaaacactgatcaacgttctttttcaaagagaaagatccacaggcaccccattatgaaaagcgtcattccgaacaagccacaatttatgatacaacacagcaccataaaggaaaaatctagccgaatcctttggctggaggagagattgaaaaggaggttgtgagagccaagaaatcaggtccctgccattctgaaaagaaagagcatcaggacgaagaccccatcgggaagagaaccaaaggcgagtagtaaccgggcagccagacacaaagtgtcctacatcgtctccactctcacaaccacaaagagaacaatcgcccaggggtttcccaaaaaggctctgcagcttagagccaaaaggcagagcgtcttgacaaagtttccaaagaaaaactttgaaccgttcatgaatatttgactgccaaatccgcctacaggcctcatttttttcatcaaactgagatttgttatagtcccagtaagctgccttcaaggaaaaactcccatcttttgaagacttccaacaagccacatccatgacaggaagcaaattcctatccgaggacttaatcaaagaagctgtcgcaggaacaaaaactctctccaccatctgatcattccatcccgaggcatcaatatctgtcaaatcctccaaagacgctggggacttaatcaacgggttgagatggcctttatgcacaagttgagacatcatttttggctgattgatagacattataataatttatggtacatattattggtttttttataggcctaaactaatagattttgggtttggaggaactctgcttcatcattctgtaacgtccccgcttcaagcctccattgggtccttacacccacggactaatggctcttatacacgagttcgtcactctggctgcttcatggactgatgact

SEQ ID NO: 393236 - DNA, 743 bp, Cannabis indica
tatatatatatatttatttgtgcttgcagcttgctgtgtgaaattttatatgttataacttataattaagaagatagaaatacaggagtctgtactgtacacttacttgccctaccatcccaaagactaccacatgcatgttggtgtggccatcatccaaattctagtaattagtactgtccattattatgaagattttatattgaatgacaattgaattcaatcggttttagactaaactagatgataaatgatactttacaataaaattaagagtaatttacggtataaatatttaattttaactttcgtttaatttttatggtaattatacttttttttatggtataaatatttgtggtaagaattttttttatagtaattatacttaagttatattggtatatttaaattatttttttaaaaataaaaatttaataacttgaactaattattaattaattaaacttaaatattattttttataattaaaaattaaatttaaacatttatacagcaaattattccataattcattattaacggacaacttctatccaattatatgtgtatacatttatatatatttatatcaatttctttaaaaactattaattatctattggtgttactattactatatatatatagagtagaaaaaaaaagggaaaaaaacagaaaaatacaaaaaaggaaaaaaaattacaaaaatactatgggccggcccattaaacatttataca

SEQ ID NO: 393237 - DNA, 1133 bp, Cannabis indica
catacttggattaccaagtaagagagtgggttagcacataaagattagcgcactggcgctcattatttggtatatatgcgggaaatcgagactaggattattactctaagtttagcaattatgtgatttagggttattactctagaatatatgtgaatatgaaggcgatcatgtattatatatgttgatataaagagttatgcagttaagacgtaactaggtaagactcggtatttagaaccgatttaaaccattctaaggtcttattataaacaaacatgtgaggtaacacgtaaatctatgtcaaatagaatatagatgcagtggcatcaatacttatgagagtgcgatatttagtgcagtggcacctattttgtatgctgaggcatgctatatgaaaagtgattatcactgttattcatgttgatatttatactgtcctctaggcctaggctcacgggtgcttgtgcaggaaaggataagttggtagttgagcggccatgagatcgagggcttttgcagtgcattgtacatgttcaggccaagctagactacaagagttgggtctgccagtgaaattagttgtaaatctccgcatttaccgcttaggtcggcgtgtactaatgacttgtaatgatcgaaaatattttacgggatccctgaataaaatatttaatctttttggatttataatatcaaatccaacaaacatctattcatgatcataaaactcacgtacccaaaaaaaaaagaaaggaacaaatagaaaaagaacaagaaattatatatattatcataaaaatgccacctaatcaactcatcaataccacaaatttaattattatatgttattgtttaaaatattattatcgctattattaattaaatgtagagattcttcgttttaaagtgttgcatgtgaagggtataattttaagagatatgaaatcaacattggggcctcaatactagcaaatgtggcatacatccatcgaaaggtggagaaggaggacacttgttactttttcaattataatttttattttcttttttattaattatttggcttattaaaaaatcacaccccaaaaaataattaattataattataattgctattaagtagtcaagaa

SEQ ID NO: 393238 - DNA, 974 bp, Cannabis indica
acggtttcgttttttttactttttaataataaataaaaaaaagagtagaaaaaaaagtaggtaaatggtgttagaggtgaaatgataatggtccagatatgcttttccacgtcaagttttagtcaattttcagccttttttataaataaaaatctatttataaatagattttttttgaacaatttggagagaaagattaattaagggataatttcatatttaataatttatatttatttgctcccaattttcttttttaagagataattaattattccatatttattaattagtatttttcatactatttttatttttggacatatcaaaatctaaatgttaatgttaactaaatatataaccctaaccaaatctttaatttgctttggtggaattcatttccaaataagtaaatactaattttatccattttttagagatattttagtttggatcagattaatggatgtaattactttggaacattgctattagttactatggtgcctagcacctagctagggatagaaatttaactcgtagatatgggacctgcatgtactctgtcaaaataatctgttaaacttgaatttggtcaaattatttttgagtaagatcaaaatacatattttcaaatttataaattaatcaattaaaacaaatatttaaacaatttaaacaaaataaaataaaaatataatttttaatgttaattatattgtatactgaactaaaaataaagtgttcactgaaatttcgttggcggctaaaccacctgaactttactgtttgtaacacttaaccacaaaaactgaatttttggcggctaaactacctaaaccctggttccgttttgctctgcacacctccgtccaaaaattacagttaagtgccatggtggactgtccacgtgtacacacttgtacacgtgacaaatttttagtggtccacgtaatattagttttaaaaaataa

SEQ ID NO: 393239 - DNA, 897 bp, Cannabis indica
tatgtaactgttatattttagatagaatttttaacaaacctattttaaaaggtaaaattaggtagtatcgaaaatttatgaggcaaaaatgtttaatgttcaaaaagaaatatcaaactaatcctcaacaaatgtcaacaaacttattgtatttttttctctaacttgaagggacaatcttataattaatttgaagtaaataaaaattgtcaacttcttgactaaattatccaccacacaatttgatttttgaaattattactttatcttatattctattgtagttaattaggttataacttgatattgctaggctttgtacataataactccagcaaataacatttttttttgaatgtaataccaaataaataaataatgatgacttagtataaattttgcaacataaaaccgtgtggttctacaaatttcaaaatcttctcaccatcttaaaacacatgtctggaaatctaaaatctagataattaattcaaaggaaaataattcatatttgttgaataaaatttatcaattaaactaacacaattctagccagccgactattaaggttgtgtttgaaaataactgtgtaaatactaaagtagtaattacattatattttaaaatataagatgtgtttacatataaagtgtggtaattacatataaattcttaatattttatttagcaaaataattagtaattccacgagataataatattttttagttcatatttaaaatgaaatttttttagtaattacactgtaattaaactcaattctcatggagtcatgaaaattggagagtataattgaaacttctcaattacttacagctatataatgtaattccatggtcaatcaaatataataaattatataattacctctaatta

SEQ ID NO: 393240 - DNA, 657 bp, Cannabis indica
tgggaacagaaaatatattttttgcaatttttaaaatatacaagacgcatttggttaatgctttctaaaaactttttagtattttttttactaaattgaatataagatacaactttaatattccagacctcataatgaaccccacccataacccaccttgacctcgacatggacccaagacttagacttgggcccgaatctaaactcagacttgatctcaaactcgaacccctacccaaaccctagaccagactcagacccaaacccagatcttggacctgaccctgggcatgacccagacctcggtctgtgccatggccctagactcgagtatatgagagaaaatatttaaaaaaataagttaaacaaaaaagtaaaagttatttttgaaatagaaaataatattttgatgttttcttatttttacttttttttaactcataagaaaactatttttaaaaaaatttagcaaaacaccccttattatcttttaaaaacaattttttgtttttaaaaattgaaaacaaattttttagttattaagtcacattcccaaagtcacgaaagaataattttgagaacacaataaaatattattttttattttaaaaaataattagattttttgtcaatatttttctttaatttatctcacat

SEQ ID NO: 393241 - DNA, 355 bp, Cannabis indica
attctgttctttcaaaaaaaaaaaaaaaacaacattcaaattatatatactatatttacattacatacaataatatataattaatttcaatacatttatatatggacatatttttcaatgtttatgtaaatagatagtaaaatccttttaaatttttgatgagatagtaaaatctgacagttgtttgcaaaaataaaattattttatttttgttgagattttatattttttagaaattcttctttctctttttttttttttaaaaaaaaattacttctttcttaaaatatccttttgatattttattttacacatttacagttatttttttgtcagaacatatttactgttacaa

SEQ ID NO: 393242 - DNA, 1190 bp, Cannabis indica
atttattttatattaatttaaatattttagattaattataatatataaatattaatattaatatattgtttgtagtattattattttttattgttgtttttaatattaggagtatgttcaattttaatatttttaaacttcatatttattttttcaaatttttaaaattttaaatattattttttttaaaaaattaataaataatttcttttaatttataaattttaaaaatacagtattttcctttgggaaaaaagattgcagacaccattcaataattttctctccacgtttttttttataccaaactttagttttacttttcttacctatagtttctctccttctattcttcttctataccgaacatttttatacaaatatatattttaaaaaaaatacaaaatgatttttaattttttatattatacacatttcttctaacaaaaagttatcaaattctttttttttttttttaagtgtaaaagttatcaaattcttaatatatgtatttaaagaaaagtcagaaaaaaatatatttggtatttttctcagaaaatatataaagatattattatatttcttaattacttggtactctattaaagaaagaaatcataaagtaagttttacacaataaaataggaaagcaaagtctctactaaaacttcaaaatctatgatattagtaatgtttcctttcggattgttgacatataaattagattcatttccctagctggtacgcaatttatatcccaatctacaaataagttacataatatttttttaaggagagttacataatgttttaaaattttaaaagaatataaattataaaaggtatgtattacgaattgattaatggtatagggtggcacagcttttggaaaaagctaaaaagctggtttttaaaaaaaactgtgataaaaatatatttgacaaatcgtcaaaaaatagctttttgaagaatttttggagaagctacagctaaaagctaaagatgttaccacccaacttttagaaaaagttgttttgattaaaagactataataatttttttttgtactaaaaccatatttacttctttattacatattaaaaaaataaaaaaaactaaaataaactaattataataaaataaataattattaaatctcttattttttaaaaaaataatttatattttat

SEQ ID NO: 393243 - DNA, 1118 bp, Cannabis indica
agagagagagagtgagtgagttgaagagagaggaaagtgtttttcttaatctcttattttttgtaaaataaatgaataaaaatggattttatccaaacaacatcaaccattaaaaaattcagattaataattaattaaactctcacttaaggacaaaaaatcccaaaaaggcaaaaagaccataatgcccttgccaacgccaaaagtcatcaaatcacttagtggtaaattggtcaattctaaaatctctactaatctcgacattctcgatgtctaacatattgccccactatactaaaaatactaaaatgtgactctaatagccaagccctgcgttccagtattgtcgggcacgaaacattcaaaaatatgaaagtctatatatgacatataaaatatattctgaattcaaacaaatctccgtaaaatgataattcataactaatatgcaagttttataattaaaccttatttatctgctaatttctaaattaaagttaagtgatctttacaattatcttccaatgttcctctcctagattattgatacatattgataacttcctatcaacaacatgtgtccattctaatgcatacttaagcatacatgagacctctcattgttaatgcttaagtaattctttcttgattttatattttcttgaatagttgaaattgatcctcagataaattttttgtctagaactcaagtgatatcctttagagttagccattgaaaaggtccctcgcatcttcctaatgtaatatacttgcgaatgagtaaatacattaccagatataccacaatccatagattttaatgatctctaacctataatactaggaaggagaagctttcttaaggcccatgaatagacccattaacataatttcccttcttatccttgtatttgaaaactttaggttgttccatgtgaatgtttagaaccacagttctatcagctttgagtattagttccttattagagtattcattgcttgtttaaactaataagaaattgtcatcactaatttcatccaagtcataagtgttggtattatatttatccaggatcttagatctattgcaagtatgttgatttaacaacctaatattg

SEQ ID NO: 393244 - DNA, 772 bp, Cannabis indica
ttttgaaatggagagccacaaattggtttatgtaagtgtaacgtaaaagaaagggaataaattccttagccatgcatctatgactatgatgcattatgtttcacctttttaagacagtttccaaatattgctcacttgctattgattcacgtcatttgtataattaagaatgtatatgcttatttataataataataataataatataaaaaagagtttatgcttagcttaggctatgtatatgaatagacaaaatatacataattctagttttttttcttcctaaaataatttttttttgtaactaaatgttattttagtcttaacaaaaattaatctatatttatgactaaatatatataatttatgttgacagaaatcatcacagtatattctaagatcacttatgacaataaattatatatacattatacatatatttttttactaataaattattaggtatgcattctaattgtttttaccaatgttatgaataaaaataattaaatggtaactgattgtagagtgctcatacttttctttttcttcagttggtacgaaaatttgtaggttgtattattttatgtaagacttcataagatcgatcagttgatgaaattgaatttttctaaagggttagatcacatattgaaatttttaatttttttacttttttattgtaaggtaaatttctttttattgtaacttttatactgtatactgtgttaagttttcactgttgttttacagttattttttagttatttta

SEQ ID NO: 393245 - DNA, 734 bp, Cannabis indica
tagttatgaaaatttatagcaagaaaaaaggtgtttttacagattcaacaagttatagggcatagcataggtcgattaaacaatttttaattcatgtaaaacgatttctgccatcaatttcaagtgttgaacatagaaaaatagggaaataacagccttgaacaacaacaacttcaaaaagaaagaaaagtaaagacaaggtaccataccagcagttgaaagatcatcttgtttgattacagagttttgatcttgaagaagcttcttatgtttcttctttttcttcatatcgccagccttaacatccagagcctttcccttaagcttcagcttcccaccaaccacgttatcatatgctgacatgttcactgccaggtgatacaaacaaaacaaacaagaaaaaaattgttaccaccaaataaagaactaagaaaatcagttcatttcaatgttattttacattatcacaacatttatattagagtgtagagtgtggtctaacaaaatcagttccataacataacacacagcaaaatcacccacaaaccaccatcaaattttgcatactattaaaactaaacacccaattcgagaactcctattataaaacaaaaatgcaaataaagttaaatatgacaaaataagaaaacgtaacacactgatagcctatggattacctttttggatgcggtacaatatcagaagttacaatttttgcctacacccatataatc

SEQ ID NO: 393246 - DNA, 669 bp, Cannabis indica
ggaatcttaaaaattattttcgatgagttaccatgtaatataacaaactaccagttttatatactaatcattttatataaattttgtactttgaaagctaattagttattgtataatataatataattcaattaacaaaattttaaaataaatattaactaagattaaaaaaaaatatatgaaacagtaactaatcactatattagtaattaaataatttttttttacaaaaatagcgaaaaaaatatatgcttcccataatttaaaatgttcatattgaaagtagatcacaataatatttcttttaagtttaactgagtaatgatgttgaccagaaattatttttaaacatggagagaagagagagatagaagaaagagagaaagaataagtaaagagacggtgaaagtcaaaagataaagaaaaggggaaaagacaagtgatatattacactgtattgaaacatacccaaaaaagaaaaacgtcattaatactaaaacaaaatgctgaattaaatggccaaatcaatatttacaattaaatcaaaaataaggtgtcaaatgtaaaaattttaaaactttattctctctgaccgctactcgtgctggaacttggtatgctataaatatttagaaaagatataaggttatttgacttcataacttaaaa

SEQ ID NO: 393247 - DNA, 1057 bp, Cannabis indica
gacaagaacttggagtttacagtaattcttaatagatctaagtcattaaatttttatttaaaaaatagtttgaatatactaataaaaaattaacacgtgaataatgacttaaaatttaacggtcatgaagtacgtatataccgaagttttaaaaatataacttaagtataattatcgctagaaattaaatctaagtatttatttacaatcgtgtattaaatttaaatatttatgctataaattactctaatttaacatattataatcataaaataagaaaaaaattatttatttatttatttattttacaaaattgaaattatttattatttttatgaataagtgaaagtcggcaatgtgaatatgtcattttctctctcacatatataccacgactaaaaaaagataaagaaaaagaatattcagctaattaatttaataaaataattgaataaaaatagagaaaaagccaaattattgattttaattgaaggagatgaactcacgtgactgcacgaggtattagccgtctttcttttatatgtaagtgtatgtaagggtggacaacatctaatccaatctaattaaattgaatccatcaaactctcgttacaaaattttttacttttagttataataaaatttgtagttaaagataaaaaagttgtggttaattataaattatcattattgtgttgtgactaaaaagtctgtagctaaaaatattagtcacaaaaattacaatttgttatgactaaatgtaaatattgtgactaaaactaaattagtgacaacttgtaactaattaaatactatgttttagtcacaagtaactttttgttgtacagtaaaagtagcagtttttttgagtatctattcaattacaaaaaaataaatatctaattacaattaaattagattagattgattattaaagtcattttcaaaatctaattaaaaattgatctaatctaattacattatatatattaaaaaaattatttatatttaattatatatgtaatcaaaatattaaaaaaaataaaaaagaatatat

SEQ ID NO: 393248 - DNA, 1541 bp, Cannabis indica
tctttattcaattttagttattctataacaaaatcacatccacacaatacatgtggagaagtgctatataaactagctaggaagttgtaagttataagcatagagagaattgtgtgagtttttcttttgatcaatttgtaataagaatcatattaattaatgatgagttctattaatgataatactattactactactcaacaattatctttaggttatgtcaatttgtacaagcatatgttaagctatgcaagttccatggctctaaaatctgctgtggagttaggcataccggacataatattcaacaaaggcaaagcccaaaccatttctcttcatgagttggtctccgcccttcaaatccctccatcgaggactaactttcttcgtcgtgtgatgcgtgtactagtacactctggcatcttcacaaacgaaaaaggatacaacgacgacaaagaagaagaagaagtatatggcctcacaccttcttctaaattacttcttaccaatggtaataacagtgaggtcccaagcgtgggcccctttgttctttcagttcttgagccagttactgtaactgcatttcatttaattggaaactggctcaagaatgaagatagcccagccacgccatttcatttagctaatgatgatgggttgggcttgtatgagtattggggtaagaatactgacggatttggtgatcgtttgaatgaaggaatggaaagtgattccgggactttgaaatttgttctcaagaatttcaagtctacttttgagggaataactacattggtagatgttggagggaataccggaacgatgtgtaagatgctcattgaagcatttcctcacttgaaatgctcagtgtttgatctaccttatgtggttgaagccaattcacataataatactgaaaacttgaagtttattgaaggtgacatgtttcaaacaattcctgaagctgatgcaattctattcaaggtgtgtgtatattttgatctcatttaattaatgttattatatatatatacataaagtgttataatatatagctaatgttttctttttatagcttgttttatgtggttgtagtgatgatgaatccataaagattttgaagaattgtagagaagctatttcaagaaatgggaaaggaaaggttctgataatagaaaataatgtaataaatagtgaaaaagatgagcttctagaattggaagctaagctctactttgatatgttactaatggctagtgtgacagggagagaaagaagcaaaaaagattgggaaaatatcttcttccaagctggtttcactcactatgaaattacacctatgtttggtttagaggcactaattgaagtttttccttaattaatgatagattaatcaaacaaaatgagtacttgtgtgatatgattacgattgtgactataattgagcacaataaaatgatcaatatgtaaattatgtttcaacaagggaaataaaatttactttttttaatggtcttgaatgagaatatattcatttaggg

SEQ ID NO: 393249 - DNA, 597 bp, Cannabis indica
tttttttttttttgttattctttctctagctactaggacagataataaaataacattgcctaaagctcaaaattactatggaagatatatattaataaaaattttatagtaaaggccaatcttaataaggatagctttacacaaaggctaagaggaacaaccaatttgggcattttcttttactatacttttcagcttggaataacatgtaaacatattatatatgactttgtatttcaaacacctaacaaaaaaaattaaaattaaaatgcttaaattgtataggtttggggcatgttgtacagatacattacatagagtatactacctgcacggtctcttgttatatatataaaaatttgatgtagtattaataataagttaataattctttttctttaagatgaatcactacaaaaacagatacatttagtgtaactttttagtcacaacataaaaattttgtgattaattgtgactttagtcacaacaaaaaattatttgtgactagctaaaacataagatttagatataagttgtcactaatttagttttaatcacaacaaatatagtgactaaaaacacatttagtcacaa

SEQ ID NO: 393250 - DNA, 1960 bp, Cannabis indica
ccatccagactctttcatccacaaccttcaagaattctcacatcttagtcttctaataaggatagttagacccttctgacatgggatgtctagaagtcgacccaccttccctgaacatttccatttcccgatgatctgcacacaatcaataaagaaactatgttgcacaacgagagtagactcgcagtggattagttttccagaaaatcacaaacaccagttctgattttacaaaattaggaacagatccaagatcacaatttttttacatgaaaaaattagctttgataccaattgaaagtcctaatttctacgaaagctaattgatagatcttaacatattattactatgaattgaaccagaaattataatcaaagaacacaaaatttacaagcttccttcacattgaaaacacatttcaactgagtagtgcttgggttcccttgaactgggtaaagtaacatccactataaaatcaaatcaattacaaacaccagttctgattttacaaatcaaacaatgtaatctgaaataacttttgcacaatgttacctaacacttgaacacactcaagttttgagacctaaactcatttagatctaagaacacaagaacaccttgcatccacacagctgaagaacctccagcagtttactttgaactcccctcagatcaagcagattcaatctccttcttcaacctcttgaagactcgtggaatttccatctgcatataaaccaaacaagaaacaaaagaatattttgccctagcagagcaagaatcaagaaaatgattctaacagaagagagttagttagaaaactaaaacaacagaatatatatatatatatatatcctgaagagaaataaatcgactaactaacaaaccagaaaaggacagctggcacaagctgacaaacacccagaaaactgacatggtaacaattacagatctaaagagatcagatgcaactaaacacaacttagatgaaaaatgacaaatattaagacagtaatactaagcacaaagtatttacataatttgccacacaaaataataacacttacaagttgttaatgaatgtagaaattattatcctctctacctgatgttcagttacgttttgtcagacgatcaacaaatcgtacgacctactttgttgctaggcacgcacgatcctcaactgggatcgtagcatttagggggttttttattcctcttaatcttcaaactattttgtattcagaatgctaatttaataaatttgcaattttatgtcaaaaaaaattaatgtaaaataatatgtcaaaaagtgttaaataccgtagattacattaatgttcttgacttatataatttgaaacctcttaacatctcccaattcatgtccaaatcccttaccacatataatgagcaacaactcactcgagagaataatcaaaccaccacttcccaacacaatcaacaacttgaaccaaaccaatcaggagtttcaaatcattgaatgctccacattatcttgcatattaaattaactattcggtgctaaaagtgtccaatattttgtataggtaacgtcttatgagattagtgatattctttaaaaattattttttcaaattatatgagactcaatacttagactcaatacttaattacattaataaagtgtgtttagcatttctcttaaattaagtgaaataaaaaataacattttatgtatagtcttaagcaaaactgcttacatgtaaataaaattaaggctaattagtaattttttcccttgaattttgacatgtactaaattgtgacccctgaactttttgggccgttagaaattcccccgaactattgagattgttaaatgtaaggacttttgtctttcattcaattttactgtttgagtgattgtttatgtactaaatcatgcactacagactttgatatctaccaaatcat

SEQ ID NO: 393251 - DNA, 1446 bp, Cannabis indica
aattataagagtgacctccgaatgagggcaaaaaaaagggtcccttagaagattcaattcatgtagggtaggagagtgaccaaaatcatcatatggatgtcttacgttattattaattaaatagagagattatttatatatttatattacaaagacatttcatccatgactcaataacttaaccaaccatgcttataaaggcaaagtgtctaatagaaattattttatatataattaaatataaaaaatttctcttttttttttcctactatataaatatatattacgaatagtacttaaaaaaagaaattttacaaaaatacttaattttaagtaaatgattacatttatactatcacacggtaaaatttatatttttactgccttgaccatatttctttttcttttataatgtaaacaccgaaaataaaaaaaagcttccatcttccacacccacagacggaaccatcacagcaacacgacaaaagctgaaaaataatcattaattctggtgagacgaaacaaaaatattaaaactgttgtggctcactacaaaattttcttacttttagtcacaacaaaatttgtcactaaaagtgaaaaagttgtgactaattataaattatcattcttacattatgactaaaaattccgtgcctaaaagtattagtcacaaaaatcacaatttgttgtgactaaatgtgtttttagtcgtaatacttgtgactaaaattaaattagtgataatttgtgtctaaatactatgtttagtcacaagtaacttttttgttgtgactaaaagtcagatttagtcacaaaattttttgttgaaactaaaaagttgttactaaatgtgatacatttttgtactggctgtcatggtttttctaatgttatttttggcttgttccactgttatctcgtatgtttaacaaatattggtttcaaattatacaagttaaaccaaccactgaatatttgattgaggtaaccagaataagaaaaatcatggactgtagacctcaaagagagaatacatgcgtgcaataggttactgcacaagctctattcagattactacaccatgaaaaattagctaacaattaattaaggaacagtgtacccaataggacaccaaaataagtgggatgtagcacaaaatgtgaaagatgtaatagtcttacctcccattaaatggtgaaatcttaaaaaccaaaaaaaaaagaggatggaagctggctagaaaaagaaataaccgaaaaaatgcaacaaatgtggagagttgggccacaacaagagaccatagaggagaaggcatcaaaaatgaaaagaatcggaacaactaaaaagcaatagtgaaaccaattatcctgatcatattcttatgtttaaaccaattgttgaggagattatttctcttttagctactgttggtggtggttcttg

SEQ ID NO: 393252 - DNA, 1078 bp, Cannabis indica
catgaaagcattgatgcctacaatgcttgcgatgcccacaatgactctactggacataaaggaagtgattatagaagttgtttcagatgaggtaaaaataccataaaaaggataagcacagttggacgaatgggcttggttacatttgaagccaatgaatgaagaaaagagcttgaagtccatttcaatgcagtcattccagacagaggcactttaggtcctggcacctgcagaagaggtaattctcacttctgtttattctgcactccacgtctggaataattaaatcacattgattagggaggatatgatccctttttcttggaactaaaccatcttcgatccttatgattcattattatgataagatagacaaaatagtaagaagtctaaaccattttctttcaccttcccaatgcattagagtagacccttttggcttgatgaagaatttgagtttcttccaatattatagcttcttaggctaggaagatgttgcattttttgctcaagaagatctaaaataaaataatgttaatggttgtattcgaatcagtccttgttttttttttttgttgttgaaactaagttttatgtatttactacttatgtatttactacttctttcatgtgtctgacttttatgtttttcttgtagagaatccctagactatgcaaatgggaatactgaatgacttcatgagcggtattgagggctacattgaagaggtcgggaaaacagcaaagccaactagtgggaaaggcaaatctagatcatcttcccatccataaaataaggaattagcacccttgccaaggtgctataggctgttccagaggtttgtgtccaggggattttctcatctcctgcccttaagatggagccattgcagcaggttccttataatatcctgataagcctaatggtaaataattagagtttttatatatatatatatattatgggctaattaggtaataagttggattatgatcctactattctatttcaacataaattttaattttgttataagtggataaataagcgtaatttattaattacggagatttatat

SEQ ID NO: 393253 - DNA, 767 bp, Cannabis indica
ttttttttttttgagataaaaaccgttgtatcattaattaagacttgaaatatcaaaataaaataatataaataaataagatatatagactaaggtagtatactttaggattgaacatagcgcgttcgacccggacaagcaacccgcccggacccgacccagctcacccgcaaatttaaaaaaaaaataataaataaataaaatattatggcgggtcacgttgaacacggtacccccatcggacggattcgccgttcgtgagttaagttttaaggaccatcgggtttcgggttgaaccctgttgcccttgattttgtccaaaatacgtggttctggataaggatgacacgtagaaccgaaaagactaacagttatgaaaataagctaagtcttagacgagggaagagtgactcaggaaaggggtctcccagagaagacacaaagagtgtctttatgctcccgaaggccaaagacctgctaaggcagctccgggaggtactggaatctattgaacaatcacctcgcatttaatgccgcattggggaagacgtattgaattctccataaacgacatgacagatggcgtaaccctcctttgtcagttattacactatgatcgataaggctagtgacgactactctatgaggaatcacatcaatcaagatggaataaaagattatatccacctaactcctaagatacctacagtataggtcatgtatttcctattttgtatctgctgggaatatgttgttgggttttatgc

SEQ ID NO: 393254 - DNA, 983 bp, Cannabis indica
ctaactgagattgtaagcctaaccattcgaacaaaatctcaaacattatttaaattaccatcaaattatctcagaactaaacaaaaaatacgctcaattcctacaaagtgaatcaaaagtattgaaattgtaagcctaaggattcaaacaaaatctcaaattctcaccaaattaccattaaattatctcagtcctcaaacaaaaatatgttcttctctacaaattagcctaagcattcaaacaaaatcttaaatttcttcaaattaccattaaattatctcagaactaaacaaaaaaaagttctcttttaacaacgtaaatcaaaactagtgaaatcgcaagcctaatcattcaaacaaaatatattagagagagagagaacacttactagggtttcgcggaactcctgctcggcgacctgacgctcctgagcacgagccttagcagcctcagctttgagtctcttacgttcctcggtttggagcctgagagcctccttgtgagcttcgtccttgcgaagcttttcgagcctcataagctcaacctccttaatgtactccttgcgaacctccttgacctgtttagcgtagtctctgcgaagctgagctagtcttcgctgggcctccttggggtttttgggagcctcccagcttcctatataggaattgggctccgagtaggtgtggttgtgactgtgatgattgtggtgagaaggttttggagcgctgcttgtggagaagaaacgcaccgttttggagatttgggagagagaagaacgagaggacgccattgtagagagagagagagaagagttgggagttctgtgagtgttacagagatgagtttcagtagggttctaatatttgggctagcccaataacatttaatggaccaccccaataagttataatgggccagcccaataactttcagggattttcacaattttttttaataattacataaattattatttttttaaa

SEQ ID NO: 393255 - DNA, 947 bp, Cannabis indica
aaaaattcaagggggtctaggctttcaaagcctgtatgatttcaatgtggctcttttgggaaaacaagcttggaggctactcttgcatcctcaatctttagtgggtaaaatatacaaggctaggtactttcctaattgctctctcttgtctgctgaattgggagggaacccaagttttatttggagaagtatcatggaagcccaacctttgattaaaaaaggtgctgctattagagtggggtctggttcgaacattaatattgtcaaagatccttggctgcctaatgctgaagacccgtatattcacactgtttctgaatctttggaaggaaaatcagtttctcaactgatggaagttggtcaaaggatgtgggatttagaggttctgcaggatcttttcattgatagagatattaacttaattgttagtatccctcttgacaatatggatgatgatactttgtactggaaaaatgaaaaacttggttttattcagtaaagagcgcgtagaaagtgttgtaagaaattcatggccatacgggtattgatgcaaattcaggattttggaggaagctttggaatttgaaagtccctccgaaggtgaagaattttctttggcaagcttctacagattgcttacccacaaaaacccagttgagaactaaacatgtgcctatcgatgacaaatgtcctttttgccttgctgatcgtgagaccatcagccatgtactggtcttatgcccattttcgaaagcttgctgggcaggtttatctttgggggacccgtcttctctgcaaggttcctttgcagattggcttcatcaaatgtttgagagatggagtgggaatgagagacatttgattggtatgttatgttggtcccttttgaagatcggaatggtttaatttggaatcaaaaaagtgttgaagttgctgatgtgttagtg

SEQ ID NO: 393256 - DNA, 913 bp, Cannabis indica
agaattccaaacatatatttgataaattatttaaaattgttgaagtttgccttacccaaagaaaacaacatacctacatcacactatgagaccgagcaaaagctaagtaaattagacttgggatatgaatcaattcatgtgtgtatacatgattgttgcttattttataatgagaatgcatctaaagaattttttccggtgtgtgggacaagtagatggatcaatgaagcaactaatagaaagaagatactgcaaaaggtgatgcattacattctgttaactccatgtttgaaaagattgtatagttcaagacatgttgcaaaggagatggtatggcatcatactgggagagttagagaagatggtgtcatgcgtcatcctgtagatgcgatagcgtggaaaaactttgacaataggcatcccaatttcgtgagagaccctagaaatgttcgcttaggattggctgatgatggatttaatccatttggaaacatgagtcaatcgtatagcatgtggcctatagtgttggcaaactataatctcctaccatgtttgtgtatgaaggacaataatttcatgttgactacccttattcctggagctagatcaccgggaaaggacatggatgtatttctaaggccattggtggatgaattgaaggaattgtaggtgaatggggtagatacaagagatgctactaccaattcaatgcttaagatgcgtgcgactatgttgtgaactgtgaataattttcctgcttgtagtagtttatctgggtgcagtggtcaaggttacaaggtttgccctacttgtaacgaagacacttgttccatgagagtgctcggtaagacctcttatgttggccatagacgatttttaccgtctaatcatgaatgagatatgatcgcacatt

SEQ ID NO: 393257 - DNA, 1273 bp, Cannabis indica
atccaactcatcttcttttgccagttttggctcaatactttcacggaccattaacaacgataaatgggccgcgacattataacactacttggcctctccctgattgcccctcacggtccccacactggcttcctgggtggggaatttcagacacaagtgccgaatggacataactgcgccaaaatccacctgggccggccgaccaacgattgcgttgtatgtagttggggagtctaccactacaaaggtgcagtacttgaaagtactctggggtgtatcctggcacaaggtgactggcaacctcactttttccattaggagaagggtggttccattgaatcccgtgagttgggaaccgctcggtgataaatccttgtttgtgaggcctattattgtgaaggcttctttaaacattaagttcacggaactctcattgtcgatcaatattctagccacgatcttattggaaatgggagtctctatgactaggggatcatggtgagggaaacgcaccagctttgcgtcttcttccgtgaaagtaattggctaatccatgagtcggggcctttgagctggaagctgggtgactgcccatacttcgtcatgtttaatggccccgacatagcgcttcaattcttttcgagtggtccccccaatatggggcccacaaaagatcatagccactcttccgttgggtcttggtggcaggccaggtgtttgctgtgagatcactcctccggagggtacagctggtgccaacgctcccggcgtacttcctagtgtcccttgagttaatggaccccctgctggaactgggttgagatgggcagcccgctcttgatccactcatataggtgacccaatcaaatcaagtttttgatctcatctttcagatttttgcactcatttgtactgtgtccaatgtcgttgtggtattcgcatctcttgctgggatcccttcctgaactgtctctgtacagaggtggaggcctttggtagtgcgtattttgccttttggcaaaataccctttctcttgtgtgtctgtcaactctgtgtactgggtatattggggagtatacccccttttttggcgcttgtcctccgtccggttgctgccttttgaggacctcttgctccgagagccttgaggagggtcggttaggctaggcagcaggaccggagtgagacggggcttattcgcttatccctgcgcggttcccgtatgcgagatgcgggagccaagggttggctctgattgtatcctagggtagc

SEQ ID NO: 393258 - DNA, 541 bp, Cannabis indica
aacattttgacatactaccactacggttgggttgtgtaatgtcattatgttgtgtataatatgttaaagaataaagttgtaaatatagtaacctaaaacaatcatgtgtaataaatatgcaactccttaatgcatgattgggttgatgttattatttcgccaattctcatgatgctaccatgtgagtattcgattaaacaaacacgttaaatctagtaagaataattataacataaatacttaaagttttatgttggtataaatttaataaattttttagcggcataagtactaaatattagtaaaactataattttcgttcaattttaacaatttagagtctgttttaaaatttattaataaaagatttaaaaataactcatattacatattttcattcaaactcaatcatttagaatttgaacgtgcatccaatttaagacactaactgatgaaattaaatggaaatgatactttcactaatattgaatacttatgccgttaaaaaaaactagggaaattatagtaaatggcccaaaat

SEQ ID NO: 393259 - DNA, 1237 bp, Cannabis indica
agggcataaaacccaacacatgagggcctaggtacaagccagtattgcatggtatatatattttatgcatatcttagtaagtctgttgactcatcagtttgctaccttgtgtaggtaagggaatggctaaagtggaggaacggtgagatggaggctcgacaatgattgtaaatattgcggcagtgcaacctaaatgtttcgatcatattgtattttgggataaatgttgttaccatcatgtgatatatgaaatatatataaaaaaaattatatgtatattttgtattttccaaatgtggttttgaatgcgggatcccgacttataaaattttatttatatctatatatggttataactagttttatatggttaaagtcttaaataaataattttcgtttgggttttacaacatgacacaaaaagaaagaagaatatgtaaagaaatcaaattgtaatatccctgaaaataatatagtatttaattggacatattttattaaatatgtaattattctggtaatggagtaagattatgatcttacttagagtaattagtgtgaatttattaaataattaaataaagcgtaacttattaattacggagattattttggcatacgtgggtattgtggataccatttttcaaataaaatattttcgggcctagcaactgtggaacttgacggggaggtcagtaatgtcacgacaatatgagatgaattattttggaagtattaaaattaccaaattacccctagaattttattttaagtttaaaggtgtgaaaaggggcaaaatattcttttgggttttttttgttgttgtcttatatttgttatctaggctgaagtaggaattttgtttgtattagatttattagttttaatttataattaggaattgaggataaaaacctaaaactaagaaaaattatacacatatattgctctctctcttctctttctcgaaggccataaaaacccagcagaaaactagggtttccttccaattcaatcatgtgtaagctgaaccaaccaaggataggagttgttcatacttgaggttaagttcctcacttctttcctttgatttttataaggtttaagctgagtttttggttagggtttgtgtgattttggggctgaagtgtaaattgagtttagaatgcgttatggtttgatttaaaattgtttaagcttgaattggttagaaatagtggctgattgatttgaattg

SEQ ID NO: 393260 - DNA, 945 bp, Cannabis indica
atctcaattagaatataatttacctgatctcaagtgtattcttgaatagagattatattgtataattatctattactactactactagcattgatgacctatgcagcaaggaagtgcaccagcattgaaagtaatggtcccaatcatagaagatttggcttgcaagcttgaggctctagcatgcttgctgagactccacatggggtgaagtaggcaacattcaatagaagatcactttttgatccccaattccaattttcccaacaacaacagatttctctaccctctaaagttacctgcctagaatatataactaatttatgtttaaataaataaataaataaataaaaactttaattattagagtaatgcagggcatcttaaagtgtttttactatcatcataaaacgtgacataatgttattgatgtattttaatattagattgatatatagagaactgctaataaattataaaatatcattatcagtgtatttaatgtgcttaatatcaatgcttgaaaaaacaaaattttgagattttgtatttgttatttattattttgtacctcttttgcaaaacggttggttggatagctattaatggtgggattagcactaccaccaatggcatacatctctcaatacgtgtagtcattgtttaccacatggaaatatctgtctacatctctgttattatttcaaaactcagttgatttacattaaaaaaaacattaattatttcagttttaaaactatctttactgtaacagtcagtagtcctatgatccgtaaagaaaaaaactgggtaagctgttcaatctcacatcgcctggggaaagtcaagtgtgatgattttaagacaatgtaggtatgagactacacagttgaaaaaagcttaaatggattaattgatactacctatatcaacaaggtgcatcttatt

SEQ ID NO: 393261 - DNA, 1626 bp, Cannabis indica
gaaaaataataaaatttatatgttagttattttcttcaatatcctatgctccaatatatattcaacttttcatctgttgttccactgttattttttagttgttctacttcttttcttttttgatgtcttctcctgtgtgttctcttgttgtgccacagctccttctattttgctgcatttgttatgttgtctcttttcccaccaacttccatcctctctctctcttttttttttatctttcagtgggaggtaagactaatactgtttataattctttcataatggttacctcaaccaaatattaagtggttggtttaaccaatgtaatttaaaataaatatttgttaaacatacgaaacaacagtggaacaacccaaaaacaacattaaaaaaactatgacaactccagtattaatgaatttaatatttctacttcatctcgctagaattaatagttgtttttcaactgttcaggtgttgctgtggtggttctgtctgtggttgtggaagatggaggccttatttttttcggtatttacagtatagaagaaaaaaaaatgggggaggacagtataaatataatttctactgtgtggcagtaaaattaaaaatttttgctcaaaatttattatttttataaaaatccccttaaatcatgaaggtatcattgagagagactcgatgcccacctctttgagtgaaaatgatctattattaaagtttgggtttttaatagtgcgaatgacatagctaaagctggaattgatccgaaaaaagtaaaaatgagggaacagacaaaaatgtagactatgagatggagaggaaatatcttcacaaggggaaacaaattcaagctaatggtaataccgagctcatgacagtggtaaattttgttcaagggacctctcatgatgaatatcagaagctttcgaacactatggggccaagaaataaaatttctatgaagactcgtgcaaggttggaacatgtggaagtagaggttgtaatgatgtttgaactggtcatgggaatgcaagaggagagggtggcagaccagtttgttttggagaaggaggaaatatgggtcacacacaaccaactattgagaatgctactactgaggtgagtctttttgattctttggatttaccatctcaattctcttttagtgaaacagcgagccttactgatcaagaccaccgaacacaataaaaattttaagttgaaatatctaaggcactgggaatcctgggacattacgtgctctacaattctatctccgagaatttagcctgactattattttttcgctgatgtaaactaaccaggtatcaagttgaacgtcttagcagtactcttcagttaatttttagatggtggattgtgtgggtcttataataggggactgtttgtaaagaccgcttagctttaatttagaaattagcagataattagagtttaattatgaaaattatttattagtattgaattacatgtttatgatgatttatttgaattcagaatgcattttatatgtaatatatagaaaattttataattttgcatattttgtgtccggtaatattggaacgcggtgtttgactattagaatcacatcctagtatt

SEQ ID NO: 393262 - DNA, 947 bp, Cannabis indica
acgctgtggttgagcatgaatatatagaatgcactggatcagcaatccaagctctagttttgttcaagaaattacatccacaacataggcaaaaagaaattgaaattttcataaaaaaggcttgtcaatttattgaagacacacaaatggctgacggctcatggtaattatacaaccttcatgtatcatatcatcaattatatatacatttactttttcataagaaaaattaatggtaactacagttgacatataaatgtatataatatatatttatataggtatggaaattggggaatttgcttcacatatggtgcatggtttgctctgggaggattgtgtgctgctggcaagagttatagtaatagtgaaactatacgtaaaggagttgaatttttacttaaaatccaaaaagaggatggtggttggggtgagagctatctttcatgcccaaataaggtaatctatttggcccaaattaataagttaatccatatatactcatttttctgtcttggttgatttagacacttaataaataacaaagtaactttgtttactttaaatgctgattatgtacgtataggcatatgtagctctcgaaggaaatagatcaaatttggtgcatacttcatgggccatgatgggtttaattcatactggtcaacaagaacgagatccaactcctcttcacaaggcagcaaaattaataatcaattctcaattggaaagtggtgattttccacaacaagaaataactggagtcttcagtaaaaactgtatgctacattatgcaacatatagaaatatttacccattatgggctctagctgaatatcgtagacaagttccattataatttatctttgttatacctaaattagtcttcttctaagaaagaaaatattatatacattaatatatataataattggtgagaatattta

SEQ ID NO: 393263 - DNA, 903 bp, Cannabis indica
aattaaacttaagtatttatcaataatcgaaaattaaacttaaagatttacacgatatcgttattgatacagtaaaggggtggtgaagtgaggtgagcttaagccttaaagaatgacattttggcaaacagtagaatgaaaatgatgtgaaggtgagtaataacccaacaagtactcaagtggagatacttataaaaaaaaaaaaaagttctcaagtggagataactatagtgttacttttttctttcttctttttttttaatagcataaaatacagtacaaaatatcaccaacagtaactcactttaatgaaacaggtggcagtggaatggtattaaattcagaataatgatatatcctcacctagaattttacagccaatgatgggtcaaaaaatatccattaatgtcaatcagaagataaatgttcatagaaccaaatcaactaacaaagcatttaaatatggaattctacataattctcaaaatgtcacagtattaaacaacactaaacctataaaaaaacacctatagaaacatatcattattcaataacaatattaaatttcatcaatttaatttcatatattttattttacggtcacatgagtagcatagaaatgcacgagcaatgttatttatgccatctctaatcatcatgtgaatcaatcttattttaaaagtataattaaaactattcttattataataattttactaatatctcttttaaattgtcttaaaatggctaatattcttacttattgtaataattttactactatctcttttaaattgtcttaaaatggctaatagtatttcacactcttttttcttttgagattttttctactgagtttactcgaggggttttaacaaggcctttttctcaaaaaaaaaaaaa

SEQ ID NO: 393264 - DNA, 1431 bp, Cannabis indica
tccctctaaaaaatcgacggtaataacctactagaccctggaaacttctaactctataactgtcttggtctcagccgaccctaacgaattcaatcttcctggatcaacctgattccatctttactgataatgtgcccaagaaaagacctttgagatagccaaaactcgcacttcttgaatttggcatacaatttatgcgctcctagctactgtaaaaccatccgaagatgttgcctgtgctcctcttttcactaagagtacacaaggatgtcgtcgataaaaccaattacataaatatcgaagaaatctttaaataccctattcatcaggtcaataaaatttgttggaacattggttagtcctaaagacataaccaaaaattcatagagtccatacctagtgcgaaaaacaacctctataatgtcctcctcttagattctcaactgatgatagaccgataggagatcaatctttgagaagaccgtcttcacttgaagttgatcgaaaagatcaacgatcctaggtaaaggatacttgttattgactgctagtttattcaattcccggtaatcagtacacatatgcaatgatccatctttcttcttgacaaatagtacggcagctccccagggtgacacactaggtcatgaaaaccctaggttaagcaaccgctgaacctgaattgttaattccttaagttctactggagcgattttgtagggtgccttagaaactagttctgctccaggtgctaaatcgataatgaaatctatttctctctactgtggtaaacttggtagttcatctggaaaaacatctaaaaattcccaaaccacccttatgtcttttggccgaactgtcttaggctgtgtggtatccaataccacagttagaaaccctagagaatcgtcttgtaacaattctttagcagttaatactgaaatcaatagaatctgggatccctaaactgatcccataaaaacaaacggttcctcgccctcgcgttggaagatcaccatcttctgtttacagtcaatactagctgagtaattggataagaaatacattccaattataatatcgaaatccacgaaacccatttctattaagtcagcactcaactccctatcctcaattctgatcggcatacacctaatccaccttttggagatgtctaattctccgccaggcagtagggttccaaaccctttatcataactatcatgcggtccatccaacttactaaaaatcctggccaccacataagagtgagaggctccagagtcaaacctatcttggggtggagtagttattttggagaagtgtaaaaacctatttgaagtctctaagtctaccaaagatactaaatgttaaagttgcaagaaagatacttattcagtctaaggagagttctatatattttaggcattg

SEQ ID NO: 393265 - DNA, 623 bp, Cannabis indica
aatattgagtcttccatgagtctcatgttcataagtcttgattaagatttcacctagaaatcttctgctgtatttttattttgtttaatattaatattagtatttttgttattgttattttatattttcaaatatgttcgtattttaaatcaaatattattttgtaatacaatttaatttgaggactaaaatataacattattttttaaaataaaataaaataagggttagaatgtaaaaaaaaaaaaaaagttatacaccaaattgttataaattcaaaatctaacaaaatttggtacactgtgcataatttaatatgtcattagagtgaaatggtgtaacaattttacacaaatttagtgattatggtgcaccattagagatgctctaagaccatctccaatggttacaccaatttagtgtagaattttttacttttgatgtaacaacttcaatgatttacaccaaacactacaagaatttgtattaataccgacggtattattctcggtggaacagaccagcctccaataataggggtattactggcggaattagtaatccgccggtaatagttatttaataaataacattttaaaaaaataaataataatttattttaa

SEQ ID NO: 393266 - DNA, 985 bp, Cannabis indica
ctcaatcctaaaacacaatgtctcttccaccgccaacgcaacaatcttttctaccgatgcgaaacgaaacggttgagattcggcggcgaagcaggactaggatgaaaaaagatgagttgcttagatcgagaatagcggttttagtcggcggcgctagaagattcgagctaaccggacttctattgtaaaaatattctgaaacagtatccaaattccgatctgtttcttcacagtccattggataagaacgcattcaaattctctctcctcaaaaccgcgccgaagctcgcttccgttcgaatcttcgaaccgaaacccataccggagactgagaccgaagctcgagttctcaccgctcataactcgcctaatggaatccaggttaattaatttaattattaattaattaattagttaattaattttgtttgaactatctctatctgtgtcttaatttactgtcgttttattcgtagtatattgccgttttggggtgagtcttttgattatagtcaaagaaatttgttttatgtcttctgttcttcgatttattaatttaatttaatttttatttgaattaaataattttaggcaaaactgaaagtgacctttttaccaacttttgaactgcccctatatgctatttcttgttggcctattcactctaaaataaatgttttgtttggtagaaaaaaactcttaaataaatttatttttttttctcctgagaaaataaaaaattaaaagtgaactctaaaattaggtacacccgtacatcttcatatatttgttcagtttacatatttgggagtgaaattataaaaaaaaaaaggataaatactattttagaccctttgttttacaaaagttactaattggaccctgtgttttgttaaatgacaaaatgaaccctctattttctaaaatagtacaaatagtaccctgaattgattttttgtcaaaataaagtttaattataatccga

SEQ ID NO: 393267 - DNA, 544 bp, Cannabis indica
aatctcaatagattttgttaagcttatcatatctatcatagggacggcactaaaggtaggtgaagtgatcaatccataatttctagttttttatttttttaataaataattaatgtgtagctaggttctcttaattacgtatatggcccccaaatttaattttcctatataccttagcaccaacagtgtctattattaacactgaataatattttttcagtaataagcgtattatcataaaaacgaaatagttagccctcccaatcattacaaaataagttctccggtaaggaggaaaccgaaatagagtcgttcaaatggtgagtaaaagcccacttaaccacgttgtgggcaacaaaattacaagacctactgatattaataaaattacaactaatcataatataacattttcgcacattataatataacattacaaaattataatataacattttcgcacattggttggatacataaaaaaaaggaaaaaaaaatatatattggctctgccaggaacatagatgattttttctctgtagac

SEQ ID NO: 393268 - DNA, 1107 bp, Cannabis indica
aaactttactaacatggtgtatacataatgcttatttataaaacaataaatatattaatttcatctgaattattaaatatataattgatataaagaaaactgtctcgttagtaaatgtatatatcattacttaaatttaaatggtaaaatataataatataacatgaacatgcaacccatactatatataagggttctattacactattcaataaactcaaaccccctataactaaaaactcttgcttgtatgataatgaagtctcccaagccaatattttcaagcctaatcctcttcttcttcatcatattcatcaatgaatttaacaatgccctaccccaaaagaagagatcatcatcaatgataataaataagcttaagccatgtaaaagtctagtcttttatttccatgacatcatatacaatggaaagaatgccaagaatgcaacctcagctattgttggagctccagcttgggccaacaaaaccaaactagccgggaatgaccattttggcgacgtggtggtgttcgatgatcccattacactcgacaacaatcttcactcggccccagttggccgagctcaagggttttacatgtatgacaagaaggatgttttcacttcttggctagggttttcgttcgtgtttaactcgagtgagcacaaaggcagccttaattttatgggagccgatccgattttgaacaaatttaaagatatttcgattgttggtgggactggagattttttcatgtcaagagggattgctactttgacaactgatgcttttgaaggtgaagtttattttagacttagggttcatgttaagctctatgagtgttggttgtgatcatgatcatcatgattcatagaccaatttgacaatttgagttatattaattgtttttttttttacatattggaagatagatttttgaatttgggatttatcaagagatgtaaaatcattagactatgcctcttatgatcacatctatatttttatgttttatgttatctgtgtttttatttttatttgtttttctattttttggggtttggtgttgtttgtttttgatttttttttttttttttacctttcgt

SEQ ID NO: 393269 - DNA, 1700 bp, Cannabis indica
aataaaataaaaatgagaaatcgcatgcgacttagtaaaaaagtcagcaagctacaactaacaagaaacaaaaggcaaagtaatagtgctcaacttcagatggtgacgagtaaactgacaatcaatctcaatatgcttggtgcgttcgtgaaaaattgagttatgaccaatctggaagagtgaatgatacctatatctactagtaaccatctctcaaccaaacaatctctttagtagtaaatgtgatggcatgatactcagctttcatagagaattgagaaacaataaattgtttcttgctcttccaacaaataagggactttctcaaaaagatttaaaaaaaaaaaaaaaaaaaacaaagtagacatattttcggtatgtgaaatcaagccatgatcagcatcaagctcgcagctctagagaagaggtggaaggtagtagtaggctctgaaagatgataccccaaagatacagtagaatgtgaacaacaacaacccttggtagaatgcaaagagtccaaaacccatgtaaaaaatgacatacttgaagtgtcaatgggtggttaacctaccaaacaagagactgacatagcattaggttgagtaacaaggaacttgtgaaactcttctaacagagcagcaaagttgtaaaagccacatgggggaacagttacagcaatactaaattgtggaggtcaaatttagttagttaactgtggttggttgcccatatgaggaggtttgggttgatatctatgttgctaaagagcacgattggcaaacttaagacattgagctttccaatgacctttctgtttgcaaaacctacactcatcaataccaacctttgtgtgacgcttgttctcttgtgaaggaaacagtgtaatatgagggactgcaaaaatagaataattgggtgttgagagaatacctttccctaaccgagacttgagaccaattttatttgctaacaatccaccgactattgaatcaattgaaggaagcagataatgatgcaatatagaaccacgaagtctctcaaaattactaggaaaacccattaaaaattgaatcaatcgttgttcctctttatgagcgatatatagtgcaaaagcatgtagctcttctgattcagtgagtgctaattgatcccaaagatctgtcattacagaatagaactcttgaatgctcatatatttctgttcaatagctctaatatcaatttcgaactgaaaaatgctttgcaaaattagacaatgtatataatctcgcaagatggtcccaaacttcttttgttgtctcgtactttgctaatcgaatactaatagattgttcgatagagttatttatccagttgagaattttcgaattgtctactctccaattttttaacagatttgcattaccatttgcaagttttcttttagttccaaaatataaccccacactttttttcctttcaaaaaatttttcatagcatagttccaatatgaataattcttcatcaaaaaatatatagctagttttgattttgtaaggtcaatttgatctaataataacgtatccgatgtactgtagtcacatttagcaatgaagatgagaatagataagttctaatttttacattagagaattttatgtgacaatatttatataaaatttcatattttattaaatatttgttatatattaatttttttt

SEQ ID NO: 393270 - DNA, 1101 bp, Cannabis indica
tattcttaattcgtggttttaagagagtttttttggtgcaatagtattttttgcttaccaagaaaaaatacacattattaaaatttgagacactattatttttatttggaggtattatttgtaattataatgttttaattacatttttgtttaattaattaatatttcatccttttagaacctttaaaattatgcctctaataaaatctaacttttttttcttaaaacattttagtttttttaattaatagtttttttgtaatattaatttatgtattagtttttttcattgcaaaaaattatgattggaggtcataatgccactaaatgttttgattgaaagcacaagtacaaataacttaaaagaatgggaagttttaccataaatataatatggattacaacaactctttactaaaaggatttggcagcacaaatgattgatcgaatgagattttgttactaattgtttttttttttgtgtattagtttttttcacgagaaaaaattatgtttagaggtaataataccattaaattttttaattgaagacataagcgtaaatgacttaaaagaatcggaggttttaccgtaaataatatatgaattacaacaatttttgactaaagggatttgacagcacaaatgattgatagaatgagattttgttactaattttttttatttggaaggttaaagtgtgtcactaactatataaaatctattttttttcttaaacattaatgtttttttaattaatagttcttttaaatattaatttatgtattagttatttttatgggaagaaattatgattggatgtataatgccactaaatttttcgattgagggcataagtccaaatgactaggaggttctaccgtaaatatattatggattacaacaacttttgactaaagagatttggccacaaatgaattataaaaatgagattttgttactgttataaaattatataaaataatataaagtaaatgaaaagaaagaagaagaagatgaagagaaagagaaagtaaatgagaatttttgagttgtttattctaatggggtgaatccctatttatacaaatacaagagtga

SEQ ID NO: 393271 - DNA, 577 bp, Cannabis indica
aaaaaaaaagtgattctactgtaaaatcattctattttttctttgagagaaattaagttcatattttaaattatgtatgtgttaattgtttttatttaattgtaagttttcataaaaaaacataacaaacccaacacaaattcatgttctaaaaattctacaaacacattaaaatcataaatctcaaattaattaataatttgtccaaaaaaaaatatatatcaaactaatatttatgtcgtttgcaattagcaccccaaagaaacgacacttattttttgtcttaaagatttactaaaaactacatgttgtttgcaatgatgaatttttgctgccattcctattttcaaaatttgttgtcgtttttattgaattacaataaactacatgccgtttgtaataataagtttttgctgtcgttctaattttcagaatttattgtcgtttttatagaatgggaaacaaaacgacatgtagttaatagattaggaactgaataaaaaacaaaacaaaaataattaaaaacagcaagaacttttttgagtctccttttttttttttttttttctttgtttaa

SEQ ID NO: 393272 - DNA, 1227 bp, Cannabis indica
tgtttggtaaaatagttattataaaatggaaagttttttgtaatacttaatttttatagagttgtgaggatttgaagtgtacttgaaatctcttaattttcttccattacaaaattactgtgtaattacataacaaattgtataattaccttaaattagagtcaaattcattcctcatttactttgtaagagacctagtaaaaatatataaaggcttagtaaaaaggttaaaaataataataataatataaatacattaaacttcatcagattttagtattaggatcgaacttttgtccaaaattatacttttttcaacgattcaagattctcaaaaggaactgcttatttataacattccttatgtgtaaaaattgttactcctaatgatagctttttaatttcaaaaaaatgaaaaggatagcttttagaaaaataattctcagttttatttttctttttgttttttttttaaattgtctaaaatattcttagttttatttataaattaataattatagttctaattatacataaagataataataataagaaaaaaacagccacataaaaaatatgatacctacattttctatttatgggaaaaaggtgacgaaagcaacacaaaaacaaaatattcagatataataaaaaaaaaacattagagattttcaccggaactcataaaatgttataaaattgtcaaacgagaaagctttactaagcaaaatgacaaataataatagttttatttaacaacttgtgggggttgataaaacattaccaatttattaaaacaagaaaaagacaatagacattataattggaattgatgcattaggtgtgtgtgagagagagagtgtgaaatatagtcaaattatatatattaaaggccttgttattcctttttttgttttttttttttttaaatcaaggccttgttatttaaactaataattttttttaagctaattagaatttttttcattcgaattttgaaatatattaaattatgtctcttgaatttttttgggattaaaaattctttctattgagattgttatatttaaagacttttgtctaatttaattcaatttactgtttcattgattgtttatgtactaaaccatgctcccaaactttgatatttaccaaatcatgtccctcaaattttgatatatattaaattatacctctgaacttttatctatgttagaatttttttac

SEQ ID NO: 393273 - DNA, 1105 bp, Cannabis indica
tatatatatagtttgaaagttctaagtattattcctaaaagaaaaaattactataaaaataaaattaaacaaaaagtaattttacggataaaaattactgaaaaaatagaagactgcatgagtgagaaaatttctataatggtgagtgtgaccaatttgctaaatgagattgatacatgaatgctttatatagaaagggaaagtgcagaatgggagttgggagataatggaatcaaattagattgctactgcaattggcaaaaatcttaatcattgttgatacaaattacaaaaccctttggagagtacattctttcttctagaaattcataggctggatcaataaaactctaatttaattttagtggagatcgatatacctctcctcctactgtgtattgttaacagcattgatatgcttcttcattttggtcaaaataacacacatatgacttatgacaactttaagaacaaatgtactttattttttatgggtgtttattcatatgattggatgcaatgaatagattcaatacaattcttttgtattaacagacctctgttaaaatttattaacaaagtgttaaaatttactaacaagtgttaaatacacaacaaagtagagttaaacatttatataataggtaagatatgggcgtgtgtctgatgttttaggctaggcaaagcctcctcgcctcgcctttcaaaacaatctgcattgcatatgacatcttaaatatataatttgtcatatacttatagtttgtaaatttttgtttggctgtgatgttttggtgatatatagtattactttagttcattgctcaaaagatggtcctttgcccgtcatcttataaatttaaaaataaatataaatgggttggaatttgttttgaggcgtgatgactattttggcaataagtaatatgactgacttgtaaagtggcaatagagagcattgattctggggctctggtgtattgagctcgagagctgaaagtcatatcttgtttagaatttagaataaataggattttcaagctgatgatagtggtaagatttgttcaccagaattatttttttgtacaaaattttcctcgtcaaa

SEQ ID NO: 393274 - DNA, 927 bp, Cannabis indica
acctttttaaccttttcgttaactaaaaaaaaaacaaaaaaaaaaataaaaaaaaaaaaaaacctaaaccctactaaacttaaaaaaaaaaaaaaaatctaatcataccgctagttgtttggcctaaaaaaatagtactttttcgatatacttttcaatatcttcatattgagatataagaatcatatattttttagcctattttaaaatcaaagcaactatttagttatttactataccaattatatattcattagttacatttctaatactgtatacaaataattataaaactaaaattttataaataaataacctattgaaactgcgtttatttaccaattaaaaaaaatccaacataacaatgttttttattcgcatctcaagcaattaatttgtttttttcaatacagtagagtaattaataaataaataaattatttttgtgttgtgtatagagaaataatatcgtagaaaagtaaatagttgtttttcataatggtaatgatgaaaatatttatatattttttacatatcaaaattaccacattcaagagtggttcattttccttctaattaataagaaaataaccaaattttaatgttaaacaaaatataatatgcgatcaaatttgcgagttattattttattattctatttaaaagttattatacattaactaattagtttctacattaaaataatattacttaaatcatataaattattaacaaaatgtttagacttctaaattaataaccaaatagtttcttaaataaatgacacattagtttctcaaatagtatggaaggtaacataaatattattatacaaaaaaaaaaaatatatatatatatataacataaaagtaacatcttaatcaacataatataaactaaaaataaacaatataattaaataactaa

SEQ ID NO: 393275 - DNA, 1698 bp, Cannabis indica
agttttatattaatttaaaaattcttttagaagcagttaggatttgtagtttttttccaaacactttcgaaaagttatttttaaaattaaaataatttacataagtcttaatttacttaaaaaaagatattttcttaataatattcaaacacctatgattttattcaaattcaaattcacaaacaatcgaaattaaggataccaatgactaaaggtcttgtcttttgacatgagtgtggtgtgagcatgagtgtgagttttttctcagtttttctttgtttgtgtcagttgtttttgcaaaagggagaatctgtattttaatatttttgtctttgtcatggcttctagcagcactttaccacaagactttgaagatagctatttgaatatcaaactggaagaagaagaagaagaagaagctcagttatgtgatttgacagaagatgtgggtcagccaattgaagacaaatggtgtctagtgggtaaatttctaacaagcagagtcatcgactttctgtccatgcaacacataatggcatcgctatggcaacctggaaagggtatgtttgtgaaggaacttcaaacaaatttgtatctctttcaattctactatgaagccgatattgaaagggtcatagagggaagtccctggacttttaacaagtttcagttggtttttgaacgattgaagaatggagaggatcctatgttagtgaagctctgtcgtctagatatatgggtgcaattgcatagcctaagacctgggtttatgtctgattctatagtccatcgagttgctaattacatcggcacgtatgtcaaatcggatcctaagaattttaatggcatttggaggaactacttgcgtgtcagagttagtattaatgttgaaaaacctctaaagaggagaatgaaattgaagaaaccagatggtgattggttgtggactgatttcaaatatgagttcattcccaccttttgctttatatgtggcattattagccattcagagagattttgctctcgactctatgatactccattggaactaattaaaaagccttatggattgtggatgaaagctgaaccccagagaaagaataaactgatcggagctaggtggcttcgaaccggcacggcggctgatgctcagtttgttgagggtgatgataatggcattaatgctcttgtcattaatcccacaagaaatcagggattgaaggataaaaacactgttgtagaagttgactttgcaatggatagcacgaatcaggggattggtcttcacaaaggaatagccattgatcaagggaattctctaattaatgctgataaggagatatctgaagaaaacttccttactgagtccatgattttcattgattccaaaaaaagaaggccaggacagaatgggaaacaattaatggaggaggatgaggtggaaggaattgttcatgagcttgttggatcaaaaaacgggtctttggtgggtcttggttctcaggcccacctaggattatgagtgttctgagttggaattgtcgtgggcttgtgttaggttataatttgcctatgttttgggtctttaaagttagcattatctcgtctattggtgtcttttggagcagttttacgcttgattttcattattttaggttcccgaggtgttaaagttcgaattcagtcaaatggcgaaaa

SEQ ID NO: 393276 - DNA, 1678 bp, Cannabis indica
ctaaatcaaagatggctggtggcctcaagaagtgaagtaaaagaaaataaatagccttcatgaattaggagaagaataaatttgagtagccttcttacataatgtagcttaattgaagagaaaaaagtccctaaatatcccatgccactctcaaattcacgcaaacaaagttgttaccaagtataccagtgaagccttttcttgttaacaccaacattctaccaaaattgagcataaaactactataaaaaaaagactagtgataattttttagtcacaacaaaatttttttatgattaaatatgacttttagtcccaacataaaagttacttgggactatattagtatttagatacaaattatctataatttagttttagtcataacaagtattgtgattaaaaacacatttaattacaacaaattgtgatttttgtgacaaatacttttaacacgaattttttaattacaacgtaagactaacaatttataattagttataatttttttatttttaattacaagttttgttgtgactaaaagtaaaatattttgtagtgaaacctacgaacttcgtcaattaaacaatgctcatggaataggtaaagattgattgagtgacagacttgataaacacctccttaccgctcgaagagaaagaacaagatttccaattaaagagtttgttctacacatggtctcgaatagattggaaaatccttttttttttggccagcaaaccaagattttttttgtggcaggcaatcatatttagaccaagaataaaggccaacaactgcgtggtagtagactgatgaatcccaaagctaaagtagatagctaattttgcaaagtttacaagtcttgaagcaccgccataaaaatcaagcaactgtaatgctagtattttttttttggaattgagatgttcccttagatgctcatcctgcttttatggcatacttgtcaaatcctttgtaatttctggtttagattgtgctgaatgaatcattcattttattttttttaaattattcatgcaacgtaatgataaattaaaaattacatggaaaattatcctccaaattgagaaaaaaagaaaatctaaaagtaaaataaaaatcataatgccaaactttgcaatttgagacaacaacatgtttgttttcttcttgtccaaaagtaaaaaaagacatgtttgttgtttcctttcatatccattggagtttataatatttcttcattttgaggagaagaataaaaaaaagattttcatcttaaagccaaaagattttccaaataaaataaaaaaaaaacaacttaaagccgaaagacagaaacagggctcactactctctgtaatgacgataatacccctattctcggatgcttcttcgcgctaaaaatgagaccacgctagagattgagatggaagccactgccgtccttatcggtaaacccatcgacatttccaatttcaacacagttttattttttatttttttcaaaattaaaaaaagtcacattccgaaagcataaatacttaaattaaatattaaaagctccaaaatttttattttcgatttaaatacctaatattaataataaatccccgctaaccaacctacgcgccgtctcacgcgccccaccgggatccgaagctttgttaagatggaa

SEQ ID NO: 393277 - DNA, 881 bp, Cannabis indica
atatatatatatatgtatggtccaaatctttagagacgcttaatgtgaaaaaaacaatagaggggggagagagaataaattaatcaagaataaatgaaaattctgttcatattaagatcgccaatatcaaaatgaagtgttatattattcggtcaaattatacaagtctgtgtatatatatatgcagagaaccacacgaatcttccatatatatatatataaaaatatatacataagcatctttaattagacgacttttgatttctgtctgaaacaataaacacaattttgatttcaggccacaaagttgtcaaagaaacaaatgctttttatttccaagcaaaaagagaaatgaaaaaaagaacaagtgtttttcatacatattatttgcatttaataaagaataaatactattttagactatgcgttttgcaaaagttatcgattagattctttgttttgttaaatgacaaaatggattatgtatttttcaaaatagtaaaaataaaattctaaacttaatttttgacaatttttttttaatataactaacttgaaaacaaatcataacacgaacagatacataaaatataaacagttttgtcatagtacacatttagatcgaattattattaaacttcattttgacaaaagatcagtttatggtcatattttactattttagaaaatacatgattcattttgttatttaacaaaatagagagttcaattagtaatttttacaaaatacgaggtccaaaataatatttaccctttaataaattaatatataaatatatctatatatctttatatattaaaagtgtctatctaacggcatttcttggtttaacagaatatacttaaaaataaaagaatat

SEQ ID NO: 393278 - DNA, 1217 bp, Cannabis indica
tacactaatatggtatcagacgattcaactttctgatcctctctgtaatttcttctcttcccgtcttccatggcgcgaactcgagctactggttcacgaagctccggccaaactccattgccgaacaactcttccaacattccagatgctccatccaatcctccgatcattcctccggtttcaaatgttactggagacaataccacacaacaacctactacacaaactcgtcctgtacacgaagacagttcaagcccctattacttgaactccggcgatcatcccggtctcactctggtttcacctcccctatcagacaagaacttccagccatggcgtcgcaattttgagttatcgttggtgctcgaaacaagactggcttcctcaaaggaactctgcctccaccaccgatcgatgatgctctgcacagccactggcttcgatgtaaccagatggtcatgtcttggatcttacactcagtttctccagatatcaagagcagcatcatgttcttggatacagctgcagatatgtggaaggagcttaattctcgatatgatcaaggcaatggacctcgtatcttcgaactcagagaaaccttgattactctccaccagggtgatgacactgtaagttcatattttaccaaattaaaatgtatgtgggatgaaattcaagaacttcgcccaagaattccttgtaattgtgctgcttctgtcgataaccttgcgttcttgaatcaagaacaagtccttcaattcctaacaggtctgaatgaatcttttttccctgttagagcacaaattttgctcattgagccctttccttccttgtctaaagtattttccatggttatccatgaagaaagacaaaggaaactcaaaaacccccaaattccttcactcattgctactgcccaggataactctgcttcggctgttccacaaactccttcagcatcagctgctgctgcaaaccaagggcgaaataaacgaatgagaccctattgcaccaattgccataaaccaggacatcttaaagaaaaatgtttctttttgattggattcccacttggttatggtgacaagaaaaagaatgatactacacaacctgcagccaatcacgcatccgcatctactgactcactttctctcttggccaacatcaccaaacaagaagatattcagactcttatctctctgttaagcaagaaattg

SEQ ID NO: 393279 - DNA, 798 bp, Cannabis indica
agtttaccttgcgggataaggtaactttttatgaactttttgaacaaacaattagttatacatacagaatagagcatcaaattagtgaaaaattcattgattttgcagttccccagttccatacttctatccaatatatcttctaattctgctaatatggagagaaagaagggatgaagctcggtgtgctgaaaaatacagagaaatctgggcagaataccgcaaagttgtcccttggagaatattgccttatgtgtattagcataatcaaaggctttgtttttgtcaaacagtggcagctttggagatctcatggtgctctttttacattaattattcaaattttgtatacaatttttgcttaatctttcaagccaaagaaaagggctttgctgaaacatatttattgatggctgtcattgaggatacaaacaagcataagtttaactaaaacatattccacaaccagtcttgttatcatttttacttaaggcctttggcccattttaatggaagaaagataatgattgatttgacttcaatttgttattaatgtgttcggtgctaatggataggaatggaagatgcctttatatttaagtgaagttaagcatttttctaatgatggtagtcttccactagctcggttttataataattaataatgccaaaatataaaaatatcacatctaagcaagattccactgacaatactagcacatgtgtaagtcatgcatgtctttccttagcttggtatttgtgaaggcaccttttttatttttattttccataatacat

SEQ ID NO: 393280 - DNA, 1180 bp, Cannabis indica
gtaatatgttatttattagaatgcatttccttaaaaatccataagtgtgatacctatagcttatacgatcgctatttgacctacctgacttatgaatttgcaggctaagtcctataacatggacgcccagcaaaactcatggagtcaaggtaatatggtggagactggaggcagttggggaggtcaaattcccccaagttcaccttaaaacttgggctacagcctacatcattgtgagctctcctcaactcttttcactatgataaaagcttggaggagatttcttgtcacaatctttgatagataactgaatgatctctcaatacactctaaatttgtttctatctttcttgccgaaaccgaaattctaactctccttcttttcctttctctttctctctaacattcttggagcttctcccactagcttgagagaaatgcgtgctctaacttgatcaacatgatcaaaggtacttatatccttttgttgaagttggttgagagagtaagtgccaattggagttagtaatgccagcttggatgtttgttaagtttgttgagatcaatctaaggtggcattagttgagtctagcttagttttgagtgatcaagagtggggagattattgtaagctgtccttgcttatgatggggttcaaaacaacaggactaagccttggaaattcatcattattatgaacaaatttaaactagagatgatgttgaaactgttaagtggacttatgggaactctaagatagcccaagtgatattagcatatttacaagtggcttttatagccctcttttattgcttgttgaaagatttctttcctagtgatgtgtaaatatatttaattcaacattcaatggaatagtgttacttcacttcttgattaaatttacatcaggagtccaggacagattaattccaattttcataccagattgtcaaagaagtatagattatttaagagcaatgttattaccgtaatgcccaacattactatgaaatgattttttttttttcacaaattaacaatttttcttattaattattgaattaaaataggttaaattaaatattaaattataccaataattgttacacatatttaggttggcattggtatcttttagtattttttcaatattttagcactattacaacaagcatctaaa

SEQ ID NO: 393281 - DNA, 995 bp, Cannabis indica
gacagagagaaaaccagatacagagagaaagttttgagagatcatgcagatgaaacttaagtctagattggctaaattgctctagtgttgagtgttcgagagcctagaaagactaagagtgttcatgataatcttgtacagaaattggtgtttgaattgcaagtttatagtggagaaatctccttgggggagagctggagtaggactcaagatttgagatccgaaccaggataattctttgtgtttttcttctgtttttatgttcaagttattctgtttatgtttctggttttgataacttaatattttgttcattgtctaacaattgattgatctgaattagtgttgtttgtttacaacaacatatataagaaattaagaaaaacaaagaatcaatttctgcaacttacctggggcttgaattgggtaatggcctctttgtttgagaagatcaaagtgatagaacactgaaaacatagaagcagagagtggccagaaggaagccactggaatattcctcctgttaccaacatggatgggccaagccatgatgctatcagctatgataaccttcactggaggctcatgaaggccatcaagaagctcctcaaagggagcttccaacttggtcgagacggcctcaagaaagccactcaagtcttctgcacgaacatgctcggagggcacaacattgggtatggtggcaaattgaatgttatcaggttttggatcagacctgagcaatccaaaccactcttgggtgacgacgaaggtgatgaggatgtcgtatttgacacgagcagatagctgcttacacaagttcatcaccgcgttgatatgacttcttccaggatagggcattgccaccacatggcaggtcatcgtggccatggttggctgatcattcacaagggatatttgcataagaaaataagtttgtgtaacaaaagatttagggtaaatactattttagaccctgtgttttgcaaaagtta

SEQ ID NO: 393282 - DNA, 506 bp, Cannabis indica
gagagaatagaatgtagatggtttccttttgtcttttgttatatgattttctatttatgtgtcgttatttataattagtatgtgtttgtttttaataatggtgttgcgagactaccgtgttattagtttcgtagtagggtgatgactaccactctccatatttagatctagagaattcctagattattattaatcccataattaatttgtaggtcagtctatcattatgattgatattgccatgattcatcttgttatttcctttaactctaatttgaacaattgagttgttattatagtaattttttattggaagatcattaagtggtgatagcgattaatagtttgatttgtcatgtgtttaattatttaggttgaaaatttagtactctttacatacttttgatgctttatttctgatagtttatacattaaaaattaggagtgttcataaaaattgaaaaatcgaaaccgaccatcaatctgaccagaccgtaactgaattt

SEQ ID NO: 393283 - DNA, 1092 bp, Cannabis indica
tgaaacttgctcaacgacttcccttatcaaaatgggatgctcaaacgaaccttattttttctcttggctcttcttttccttctccgacacttcttgttcaggttaggggccttagccacatgaacttcttcctcaacctcttcagaagggtataaccagtactgaacaaaatttcttattgaagttaacaaaaaaatattttgagccctgtacgaaagccgaagaatggcctgagcccttaactttagccccagcgtgaaataaggacaacaatatgtcttagctagctggaaagataggtggttgacatccattgcttgcacgatgtaatagtcttttatgtaaccacctatcttcattacttcagtgtcattagtgttagtcagccataagcaatacagctgggagaataaaaataacctgaacggttatgccctaggctggacttcaagtcaaatagccaattggtgtcgtgaggggatggcatcccccattgttgcttcgcgtacaaaacaaacaatgcaactaaatatttaatcacctttggcgtaacttgcattgggcaaatcttgtaatagttagccaccctttttaaagtaaggatgtagaggcaggagcgcaccctactgagcatgtggtcgaggccatgctcagagatcttcctctgggtttgtggcaagttgtccaacacgaggaagaagtacctccacgtccctaagaaggcctttggcctccaagttcctaacctcttcagtgtgagggtggacggaggagaaacccaccgagcttaacctttctcttggatcctagcaagaatagcttctttgagctctttggtaacatagtcctggccctcaattaggttgtccgtaagctgcgagatgggctcctcaacctcatataccctctgaggggtatagccacaagagaaacctcttcttcttccttttcagtggcaattgcatggacctcaccctagtcctccacctcttgcacctcctcatcatcgatgagcctttcaacatcctcttcaaaattttcagtgcactcagcattagtcgttagggctaagcataaaatccagagaaccga

SEQ ID NO: 393284 - DNA, 504 bp, Cannabis indica
tatgtcaaaccctaaaagtgcgcgctctaccaaaaggaaaccttcattttgtccaacgacctcgcttctcacactacaatacacaaagacgatgcacacatgccatctatcaaatattgcgtggtccccaagcgtacgaatcaccttcaccccataggctgggccttagtatatgggcccaaagtcaatgtattttatgtatttaccccattagtgggctaaatttacattcaaatcctagcggatcacgggtatatctgaacctggatcctagcctataaatattacattataccctcatgtaaagggttagaaatccattgtgtaaacactatagggttcttaagcctatcaagaacattataatacatcaaggctatttagctaaatacagttgactcatggattatggttcattaataacgaaccacataaaaatctccatcttttactctttattacataatttaatttcttaacttattataattagttttcaaaaat

SEQ ID NO: 393285 - DNA, 1985 bp, Cannabis indica
agaccagatgaaaagcaatgtgctttatgcggggatggggctgaaactgagatacacatgttttgcaaatgtacttttgcaagaggtctttggtttcttagcccgtggggactcagaacagatatgcttgaaatggatagctttgaagagtttttcctgtggctttgtaactctgatgatgattggctaatacaaataagtgcgtgcgtgtttgaagctatttggagatgtaggaatgatttaattttccatggcaagaccccatctactgctgtaatcttgaagaacattgtctctcgtgctgctgaattccaaaacgttctcatctcttttggggatattacccaaccgggtggtgtcaacaggttagtagagcctactcaggactctcaagacatctattttgatgcatgcttctctatggatgcctctgtggtgggaaatacaacagggattggggttgtgctaactcggtctgggaatcaggaaataatcatgttacagtctcattgtttagtttctagtgtccttgaagccgaattggtcacaatctgcactgctttggagcgtgcgtgggctgacaattaccgctccatcgtgatcaagtcagactctaaagtagctgttgatgctctgcgcttgggtgaactccctctggcttggggttcctattcggtttttaatgcttgtttgaaatttctttcgaagttttttgtttcttttcagtttataaatcgtgagttgaactctttggcggatcacctagcctctgttgctagagtgaaccttgttagccaaaatggatctctgtttgggagtcaacccccttccatggttgagtagtgtttgtttggtttgcaatgaaggttttcaaaatcaaaaaaaaaaaacccacggttgaacgatatttccactacctttatgaagttattatagttgatgtacccatatacattataggactgcaacttgaacgtactttacagttcttgggtcaaatttagaaatttgaaaagaaaaaaaaaaacttaattgatttatatacaaagtttgataaattagattacaatgtaaataattataaacaatatgttcatcacttttattaatctattgggattagtttagacattgcaatttccttttaataatctaatattttattattaatttatgataacgtgtgcaatttgtttttgacatttattttgtatctatgtgtagctgcatatttaggtaatgccactaatttatgagagtagtagagaggggggcatctgcggtgtagagaatacaataatgcaaaatcaaatgtgtgccacaatattttttttttggaaagaaagaaaaatttcattaagacaaatccgctgttacagaagaactcaaaaatcgtggacaagcatctactaaacacaatctcctaaactagtaacagaggtcgccagcgtgtcggtaataacatttgctgatcgcagaatggcgttgcaagaactaccttcaacagcagctaataaagaatagatatctaataaaatagactgaaaactaaaattaatatggagcttataattaattcaaccaattgtcacagtagaatcactaataataatggagatagtgaaaccaagttgatgcgcaagagtcaaacccagaaaaatggcaagcagctccgccgcatcagaagagaaattcgctaacacacctaatgaccacgccaaccaaaccacaccctctgcatcccgtagcactcctcctaatctgacaaagcccctccctagaaccactgaagcatttgtcacaagagcaaaggagtcaaggggaggtggcatccatcgagtagctcagtttacaactgggtttgcaagatccagccccaaatgaagacctcaccgaccataccccttaaacgctgccagatgattactgactaagcctaaaataacatccaatcttgactgcttattaccaaataatattgagtt

SEQ ID NO: 393286 - DNA, 715 bp, Cannabis indica
aaaacatcttccatatatatatagctagctccaagtatatatatatatagtaatactctagttaatctttattactttatctattatgattaaggtgtatgagatcatgtgtatacaataaaagtggatgagggagcagttcgaaagggaataaattgatagtaacctccaaaaaagatttttaaaaattgaaaaaaaataataaagagtctaccataccatatgtagcttagtgaagtagtagttgtttagttttgttccttttcggatgaaagacggccaaaaaacgcgtttgcaatattgccatagttcatgtttccgatattacctttgcttgctttgaccatgtcttttttttttttctaagacggctattttctatatcttcttcttcttcttctttttccctaaaaaattaattcaaattaaaagtaataataatatatagcttctcttcatcgtttttttaattaaaaatattaaataaataaatatatataaatttttttggtatacgtcgtcgacacaaatggaacatgggcgtcaatgacaacaacgtaagtgctgctagcttgcatgtgtaagatgcatatatattaacagttaattaaattaaagtaatattatccgtaaacaacatatatatatatatatatattaaataaaaaaaaaaaacatatctttatatattaaaagtgtctatctaacggcattt

SEQ ID NO: 393287 - DNA, 1549 bp, Cannabis indica
atatatatacatatatattatgagatgagaatatctttcccagaataaatatttatagtacattaaattctgacatgtgaaaagtgatcacttaatttatacaatcaattctagtaataatgctatattacattatcccttagcttagccgggcggggatcatgttgattttcatgattttgttcccattttgagaatattattaattactgaaatttaatcataataataataataaataaataaaaatatgatgagatataattaaatgcataaaaatttatgatgagaatttggattatgggaggtagatctctcaccatgaagtgtgttattctatgtgtctcaaaagcgtatctataaaagataaaggggtgatgagtataatatatatggttcctatagctcaacctttttttttcttctcattattttatactttttttgagagagactatagagggagagaaattaaaaagataactagaaggaataattaagagaagtgtactaaatgtaaataatgtgaaatatttgtggtacaagtattaggtgtacgttactaaaaagtaatgcattaccacatacatatataccattcgctaattctagagctgcaatgctcacattttcgtgtcgctagaaaatttatgtcttgtcgtgtcgagtaggaccagcatgcctcatgccatatggtgtttaagtttaagagattttttataaatattggaaaataatttaatatttaattttatataacattaataaataatgtaaaaaaatattgaattaaaaaataatcgaagtttaaaatatagaaactcaatgtcaaacacggagacctaagggcacgccttgatcaaagaaagaaagttgtctcagcctataagggtatcttaattgaaggaatcctggctgaacttgctaaacatagcaagggtctcccggaggtagaaaggagatgactcagaatcaaactgtgaagaccgggagccatgtgcaagaaatatactagaggttgaactcctaaagaactttaaaatgcctgaaatgactatgtacacagatgacacagattccagtgatcacctgtctagattcaacagagtcatgacagtcatgaaggtcagcaatgacgctaaattcttgtattttccactgacattaagaggatctaaagaagagtggttcaaaaagttagaaccaggatctatggattgttggaataaattgtagactaatttcaaaaggtaatttgctgtaaccagaaagataaacctcaaagttagtactttaactaacattaaacaactaccaacggaaaccttgaagaacttcatcaagaggttcaaagaggaggtttccaaaaccaagaagtagatgacggacaaccgttgactttattacaagccagaatctggtacgagaaactcccttttagaatgagttataacaagaaagtgtagctagccttcaagatttccaaaagagtagcccaaaagtatatcaacctggaaaaaaacccaaataaccactttcggagggtatt

SEQ ID NO: 393288 - DNA, 961 bp, Cannabis indica
agttttttattagttttttttataggaccctaaaaattaaattcctgagtactactatagctagtcaaagtagattttcaagtatggataattggatatatacatacaaaaatattaagaaagaaataaaagcaccgaaaggaatgaagaaatggaagcagattaaaagggtgtgaggaagtgaacatcattcatatatacaatgtgaagcttttgatgacagcagtaagggaccactcaatcctcccgccccggccccggccccggccccggctccgactccttaatcaagagtattgctattaggtgcctaacatcacactgatatagttagtaattttttattatttactaaattaaaatatacgagacttcatattaaattgtaccctcctataaaatttataacatttaattactaacttcctcgtagaagaaaattaataataaaaaaattatatgggttactaatgtaattggattgtgaaatcagagatgagcgttgaccagaccaataatagctaaaaagatataaatgatatatagtagagacaaaagaaaaaagtcaaagagagcaattaatcgactagtataaagaaattttcatttaaattgaatgatttaaatattataagtcttatacattgcaatacaatatgtgattgttttatatacaaatgaatttttaatttataaatagatcatcatttaatttcgcaacatgtgtcaaatccattgagaaattaaaaaattgtaaagatggtttttgatttttaattttattgtttaataaaaaaaatggctgctattcacacaaatgcaaactatagggaataaatgctttcttctttgacaatcaagggaagattcttctcccaaagatctacaacactctgattttaataagttatttacagtttcatataataattttcctttttttttttttttactataaata

SEQ ID NO: 393289 - DNA, 505 bp, Cannabis indica
actaactttaactaatcttgatattcattatttgtactcactcaaaactaattaattatataaatatttatatatacctctgctgtcgtggttggctcgttggcctgctgcgagtgatggtttgggctacgtacgactttcaaaagaagagggcgacaaaaagcaaagagataaccaaggtacctttggttatcctcattttaactggagcagcaaaaagaaagctcagcaagccagcaaggcatatttacataaacgtaaagcacaagttcaaaaaataaatttactcggacaacaactaaataattgaacaacttaaaaagtatctcaaaaaatgatcactaaatcatttggctagagaagattaaaaaacgtaataagtcagcctctaaatttctcaacgtcattacaacttttgtcgaactgtgtgtcctcaaaaaaacacaaatatgaagaaaaaaataggatcaatggtacatcgtcagattgagagagagagagagag

SEQ ID NO: 393290 - DNA, 1369 bp, Cannabis indica
tctaataaacacataattattattaatctcttcaatagaataattttacttattaattttattattactccactataaatgtaaaattgcaccctttgacaatttagaaatataattatagaattcttacttgtagtccattgatataatcaatataagtagtttgtcctctaattattagttcataattagagttggtcaaaagtatcgtcgtacccttctaattatctcttgactcgttatgtaccattaattcaatgtgaacagttaatctttaacttattatatagatttgaatccaactattagcaatcctagaattaactctacaagaaaactaatattcgatcaactaggaaagcttgatttcaattattgtataacatgctcctagccactcatgttattaagctcccaaaacagaagttgtaagaatcatcttctctgagaaactttaacgagttaatcaaagaacttaatgaacacaaacatgagttcatgtatactcaggatttagattgatctactaatgatcatggttatgatatgaataactctttcgtggtaaacatcacgttaatgaaagatgttattacaaatcagtccagtcatgcataatcaaattatacacaacatatttactaacatgtctattcacatgtatatgattcgaatcaaaatcacacatactaaaagtatagtgtatagtaaccgtacttagcagtttcatattaaagattcattttactttaatacaataccgactagttttattcatatcatataatttaaattctcttgtacatccttacaagatgatactttctccacataaataaggaattttcatatacttattaattatacttctataattaatatatttctttatcttataattatatttcatgtattctataatatattatccattaattacttgcttttagggcacaaatctcaataataatattctcatatgactagcaattataatgtaggtaccttcagacaatgtgggagccaactacatgtctcactatttgagctacccatctccaatgacattctttaagggtgtcaaaaaccacattacttgaaaatataatattttattgaggaatgctaattacaacctcttagtcaatctctacgtcctaaatcacatgccgaaatattttttttcatagcagtattcgttatacttacagtatcatccctgtaaatttttgaaaaattctgaatagtttacagtatcgaaaacagagttcctgatattccagtttaccacgcgcgttcaaaaaactttaaacatattttcggcactataaactattcaaaattttaaaaaaatttacagggatgatgt

SEQ ID NO: 393291 - DNA, 1078 bp, Cannabis indica
aaaaagaaaacaaaaacataaaagaaagtcttttctttctttttcttcaatagccgttataggtgggtcccatgcaacccaaatcaagctaagctaatatggacggctaaaaacaaataaattttataaataaaaaagattatcaatttatgttaatgttcataataataataaattattgggtaatgtttctatggtacactataatggagcgtttgatgtaggatttaaatttgatgacaataagaatattaaatttcatagttagtgtaattcagatgagaaaatattagataagtcgtataattttacattatttaagaaatgtcaagtatgatgattttaagactcgacaagtatgagactacacaattgaagatgatttaaatggattaattaatacctacttatatcaataagatgtatcttattttttggtagtccatcacaaaagaactctacaatgggtgacttcttaaaaagtaagaacaaagtatattatttgtaggaagagccatgattagtcttaaaacgggcgcgttacattaaatttaacctatgtttagtgaattaagttttaatgatctagaggtttgcatcttcaaagtaagtcctaccttattccttccaactttaactcacataataaatattctatatataaaaaaataagtgtattgatgtattattcttttttgtgtttttgacatagaatatatattatgtttttatatagaatcacacaatacatagctttttatttaattactaaaattatattaggtggttaagatttgaaagttattaagtaaaatataaaccctacaaatcacttaaatatgagatttctgaatagttataatttcaattttaaatatgcacattttgaaattttttaagaaactcaaagtaatttacaataaaaaaaattcaaataatttatacttatactatttgaatcttattttcaacatattaaattattttcaatttttcaatttttttttttcaaatcactatgatgttttaagatcaaaactattttaaacatttaaaacttaatgaaatatatcgatac

SEQ ID NO: 393292 - DNA, 921 bp, Cannabis indica
gtaatataaatatatttgtgacacattattacatcaaaaaattaatagaaggtaacagaagttactctaaattgcaattttttctagtcgaaagaatttttgcaatagaacaaaaatttagaagaccaaattttacaattgtaatagtattgagggtcaaattcttatttattctacaaaattatactatatttatatgttttggccaacaatttactatttatcacttaactgaaactaattaaaatttattaaaaaaatatatatattgtatttattgtcaacatataattgaaatatgagctcataatttttaattattaaaatatgaaatagattagaccaaaatatttgaaaaaaaaaaaaagaaataaaataaaataatcataattgaaaacttattactttttgttttaacattaagttttattatatttatattttcaaggatgaagttacttttatgatattaatactattttttatataatttttttagttatcaaattttaattaattaatcatatcaaatatattgaatttttctaattttttattactataaaaatttaatttatgtgaaactattactaacgatttagttattttatcgtaaaaaaaagatattaagtgtgcatttaactatttgaatattatttttagaaatataaattagtgaaaagattattaaatatctactatatttataaaatatttaaaatttaaaaattaagtcatggacagtcacaattttttaaaattgaaatagccacaaaattattatcaaatacatatttttcaaattaatcacttaattgttatagttgtattacaaaattatagcatatataaaatgatgtgaattactttaaaaataacaacaacaaataataataataataataattaaaataataataa

SEQ ID NO: 393293 - DNA, 1006 bp, Cannabis indica
aggtccgcagttgcaaatatttatatctatgtacagactgatcaaatcaaagggtggtcttaattagtgtttgatatatatgccattcattcttcacaaaaaggtttatgtgtgagaaagtagtacacacagacaagagtataacaggaggagagaggcatgtggatcgttgaatcactgggtcatgaaatgactgctcagagatgtcgtataccaacgagaccacactatgtttcatatatatccacaagtaacaaaacacaattctcaagtactttgccccaaaataagccatattacccaattaagcaatctgtttgtgaaattacaacatcaagcatttttccttttcagaaattattgggagtggctggctcctcttcatggctctagctgcagcatataacccaagagtactagtaatgctcttgtccgaggccggtaggtatttagggcttatacaaaattaaattttggaacttctatataaatagatcaatatttattaaattgatgataattctagtacttttgatatagtagcaatgccatttaaagctcatgaaagtttaaagcttccatcccattcgtacattatactacacactattttgttgaatgtttttattatttaatattttgatttttgcacatatatgttaggttatatttagcttatgtttcgggtctaacaagttagcattttatcggttattggtgtcttttagagcggttttacgcttgattttccttgtttcaggttctcgggatatcaaaaagtcaaattcaatcaattgatgaaaagacgggacaaattggtgaaaaatcggaaaaatctgctcactcggtgtcagtagtcgcgactagccagaagccaggtcgcgacccttttctttggtcgcgaccatggtcgcgacttgggagatttggcagaaactcagttttttgagttttgcctgtagtcgcgatcagcctttaagttggtcgcgaccaggtacggaaaaac

SEQ ID NO: 393294 - DNA, 514 bp, Cannabis indica
actactcactactcactactaactacaagtacaatgtgttggggtgtagaaatttctaaaaaggcagctgagcatatttctttaaacagctaactaatgtataatatgacattattgcatttgcacaaatcattcattctgaggtcccatgtggctctctactactttaggaaggtacaagttttgctttatttgatgttggattttgtcttacacgtaccaaagtttaagggaccttaaacacattgtttacattattaggatgcttttcattttgtctgaattaaaaaaaaaaaaagaatcaattgttatttacattattttgtagggagctcaaagtacctctaaatctatccttccttatatgatccaaccacatattttgctttgctttagtgttagatctctttatgtgtgttgtctctattttaaaatttgcaaactttatatgcttattttgtataaaaatagctatgagttttgataattgaataaatattatatatacgtatct

SEQ ID NO: 393295 - DNA, 560 bp, Cannabis indica
aactagtatggcgttacaatttgatattaaagccgcgaggttatctttggaagattgttaagaagtacaagcatcatcaaagataagctcgactcacggttcagtaatattttatgtgttttagtagatttaatttattatgcatgattagaaaagcatgataggaagcatgttagcaagatgatagttgaataggagtatattaagtttccatgtgagcggtaagtagattacaattttaatcactgcctgacctagatgactcatgtattcatagacctgtcctatagaatgtatgcatggcttaacacaagaagttgagaaaatgtggtcaagatgggtggtgattgctagggctgagcatgggttagcaatgggccgaccaaactggccaacccaacttgaaatgggccaaaacatggtcatatttagtgggccaaaactcacatgggttgaaaagggcccaacccgcaacaaatgggttgatttcggactaaaggattttcaacccaatgaaccaaaactgggccgccctagcccaactaaaattaaaaaaaaaa

SEQ ID NO: 393296 - DNA, 1002 bp, Cannabis indica
acaatattaccaatctcataagctgaatgatacctgcccattattttaagaatcggcgaccactacactcaaattgttaattttcattagttacgtatgttttttttgttttttttttttttttgggttggttatatacagaaagttatatgtgtatatatttacagcgtgatcataactatatattcgaaaccaaagaagaacttacccgggaatgagagaccaaatccgtgtacgcaacaattgattttggcgaaggatttatagctttaaattaatggtcccacgtaaatttaaaatttattaagaaagttggcttggaggtcggggattatcattttactaatgttttaagaaattaatatatgctttattttacaagttaattaaaatttaagtttaatatgtatatattatagttacggttataatttactctaatttcgattaaagatgaatgtaattacaaatcattacgtatgattatgcgccaataaacccaccacaaacatacagacaatgatattttttaacaagagtattgatatttaatattttaaatttaaaagtgcttaaaaactatataaatgtgacacctcacagttaataatcaagaaaaatttttcgtattatttattaaatcaaaatatatagaaggctgtattaaaatacacaaataataactttgtcctcttgtgattataagtttgcctgttaacatttatcttttgacaaaaatttatgcctctggataccccatgtgcttcttctgcctatattgatcaaataattcggacatattcttatatatattaaaaaagaattaatatgtataagagatttacttctcaaatgtctagtaaaattaaataagttttacctcgataacaagttttatcttgagatcgactatagaaattaatcttcagtatttatatatatactaggtgagtgttacgtgtcaagccacgtggtgttagttttatttaatattttagtttt

SEQ ID NO: 393297 - DNA, 625 bp, Cannabis indica
aggtggggcaactaataaaaaaaaaaaaaaaaaaaaaaaaaaaaactttaattacgaattttttcaattattaaaaaaaatgttactataactaaaagggaaagaaatatattaaagcccctttagaggcggtttttatgaaataatcgtatctaaaggagttgggaacttctaaatgggtttcaacccggaataaattgaggattaccctttttttttatccattaaccaaatttaccttcaaatgtgatttgattcaaatataccaccttttaagagtactttacctaaaataccgttacaccctcacataacacatacacaattttgaacacacgcaactcgggttatccttctatatgtgatgatcgcatttttgctccggcattgccagccaccgtctgcctcctccatcaccgtcgttgtccccaagatctctctctcagactaattttctagtcggtgatgaattggcctctcaactcctcgtcggtttaaaaactaatgatttacatttttcttcttcttacttggttaatcaatcgatctccgattttaattttctaatcactccctcggattttggtgaacggagggactcactgtactaattcttcttcttctt

SEQ ID NO: 393298 - DNA, 1447 bp, Cannabis indica
aatatatatatattattaaacaagtcatgatcatttcatatatatttttaaaataaattttacaggtgttctttcacaagtttcattgctgacttcaggaggtgtgtatttctattgtatatatgactttaattatttataaatgatatatatacatacactataaaaagaagctactaaaaatttgagtgataaccttttaatcaaaatatattttttttgtgattaaatatacaaattgtgatttttgtgactaatacttttcgttacgaaccttttagtcacaatataaaaatgatgatttataattaatcacaactttttcacttttaatcacaaattttgttgttacaagtaaatattttttagtgatcatatatatattttcaattatgtttgaaataaatcttgctatttttttaaataatttatctatatacaacacaggtttattggttatcatattggggatccttgcatctttttatttctatcatttaggaagaaacaagagaataaatggactaagaatcgaaatttttttggaggactacatagcatgtaagccatcaagatatacctatgcagatgtaaaaaatattacaagtgagtttaaggaaaagttgggagaaggagcatacggagaagtgtataaagggaagctgtccaatgacatattttgctgtgaagattctgaacagtatttccaagggaaacggtgaggatttcatcaatgaagtggcaacaataggtcaaattcatcatgttaatgtggttcgtttggttggttattgtgctgatggagttagaagagctctagtttacgaattcttaccaaatgattctctagataagtacatatcagtgcgaggcccaactaactccaaaatatgttctcttagttgggagaaattactagatattgttttaggcacagcaaagggaattgagtatcttcaccaaggttgtgataaacgaatccttcattttgatattaagccccgaaacattttgttagaccataactttaaaccaaagattgctgattttggtcttgccaagttatgttcaaaggatcagagcatagtgtcaatgagtactgctagaggaactatagggtatattgcccctgaaatattctctagaaattttggaaatgtctcctacaaatccgatgtctacagttttggaatgttattacttgaaattgtaggaggtagaagatgtaaccatactgaagaaatttactatccagaatggatttttaatcttttagaagaaggagaagatctgcgaatctatatcgatgaaggaggagacggtaaaattgcaaaaaaactagcgatggtaggacttcagtgtattcaatggcatccaatagatcgtccaaccatgaaagttgtagttcaaatgttggaaggaaatgaagagttaagtatgccaccaa

SEQ ID NO: 393299 - DNA, 800 bp, Cannabis indica
acaataattttaattacaatacttattccaataacaaactaattattattaattaccattacattactattactattaccgttacatttctattacaccaaagcaaacatcaccttaatttctatcaaacaataatttaaagttgaagtcgatctgcagaagttcaaagagctaaattacagtattaaaacaggacatggcctgttatttcaacaagcagaaagggtgaattgggtttttgctgtgtgggatagaattgtagctagtagcaccagtgctcttgaacatttctcaaatatggttatatacatgttattgttggtgttgggctttcaaaattattttttggcttttgaatttctaaacttttaaattgtttttggattttttaagcttcaaaagtatttctgttgttggttgagtaattaattaatgagtttaaacttctaattttaaaattatttttataattttagtattttttcaagaattttcttttcgagaaactcaaccaaacaagaccatatacacttcaactactgggtaactctttgctttaattaggtttgaaaagaagaaaactctagccatttatgacaatgatatgagaaaataagtccatgtaatagtatatatacaattatattatatatattaatatatgtagtccaatataaatatatagtacatttattactcacatgcaatgcaactcttctcaacatggagaaataattattaaccattgctataaaatagactaccatataattaattatttatattttataataattatt

SEQ ID NO: 393300 - DNA, 1295 bp, Cannabis indica
gaagcaaatcaatactgatgtttgtaatataattcggaatttttccatggattaaattcctaattctgataaagattggatgacaaccttacttgtatagatgatgtcttgaggttttggcctccctgttgggagtgcgagttgtattttggaggttgtaaatgattctttggtgcaaacataatctttgcttaaccaaaatttaaaaaaaaaaaataattaagtaattgtataatggaagtattcattatacaaaatcaactgtgatgaagattggcagcaagtccttgtgcgtggcggtattaactagggatcagacggtgacagctttgtgggtagcaactaatatgctcaactttatggatccactgattggcaaagctaaggcctgtcggctagcattggaatcagctgttttaatgaagcactactttattttggttgagagtgattaggagaaagttatcaaagctctgaaagaaatctactccagttggaatattgataattatattaatttttgtaattaactctctaatcattttttatgctgtaatttctcatttatttactcagaatgtttgagtataatttctcacttatttactcagaatgtttcgagtatggtgaaaccctcctccatacctaaccttatcttttataataaccgagaggtcaaacatatcctttatttttataaaggctttaatttaaaaaaaaaaaaaaaaaaaaaaaaaaaaaaaaaacccaaagtaaacatactaactctttgaattcaaactcaatttgacaaattgatcacttataacaagatgctaaaaatagaaatatacaagatccctatggtaggcattgcctaacatactacttgattttaagtattgtcatatttctcatatacatgaaagaaaatatcattcgatgttttctttcttcatcatttattgcgattaaatttaaacaaaagagcaagtaataataaaaaactgattcagcagtgatttgagaatagaatgaatttaccaaaagtgcaataagtaatgcaaccataaccaataattgaaaaatcttcaacttagctaacatcacagaacaacaaaatctctatagttcagaaaatagggtccaacccaaaacgcaaaattcttcggaaaaaaaaccgaaactctctacttcttgtcttctttctcggcctctgcagccctcttcaacctagcaccgagatggcgtgcgtttgtgcgctccagcctgagcttgttgtaagccttaaatgacttcatgtcatcggtaatctt

SEQ ID NO: 393301 - DNA, 1275 bp, Cannabis indica
agtaacttctctgtcatcctggtttaaaaacacaaatattctccctaaatattttgtgtcatttcgaatagaagtcacttcttctatcataattcgagatagaataatagtagcacaatgagcatcttcatcactttccttgagtggcacggtccaagatttatcaaggaaactagtatcagcatacactctcttacatgacatgatcaatccaacctttcaaagattttgagtactaaagagggttcaaccatctctctcccatgcatcaatttcaagcaatatggcatcagctctcctcttcatgtcaattaaaggagcatgtcttttaaaagggttggcttttcggaaggtaatgtgtctcgatggaagaataggagtatagaagtactcttggtagtaaaggccagagttactcttggttatgtattctatgtatgggccaaattgatggaagtggtaggagccttgacctttgctagttggacttcttttcaagtcacaaagaaaatttatctcatgaggagttggaataggctagttcctaagatggtaaaatatgaagaaggtggcaagaatcttatagccataagggtttatctggtaaggccagacaccaaataagtcagctatggatatgaaccgtagatgcaagggtaagtacgtaagtacttgtattcatgtggagtctcaaccaggcactacaacaagtattttgagaaccctttagagcaccatgtcggggcttttaaacaacagtttcaggaagatagtaatcatcctaaattgtttgagcttgaagctcagtacgagtgctagacacaagagtcctaagcttaaagcctctatctatcagatcatcactctcaatggaagtttgagaagcttagttgccatcacttttccaccacgggtcttgtctaagttcttagacttaggcaccgtcatcttagctctaatgaaaaaagccacatggggatcatagtcattaggtaatcttctacctctcttcatcctatccatctcaagctaaacaactcaagctacttataactcaagaaaaagtgaaaattgggttggaaaaagccaaagtaacatggggtaaattttcaaggcacaaggagaatgttttggatttttggaggttttggaaaatttatttcaatggattttggaagtttaagatcccttaaaataagaccagcaaaggaggagaagaagagaaaataaaaaaaaaaaaataatgcatcaatgaagaaaaaaaaaagaagaaaa

SEQ ID NO: 393302 - DNA, 896 bp, Cannabis indica
aaacagtaaagaacacaagatttaaagaggttcgacaccctttgttcggtaatagcctactcccattagattgtattaactcaagaacaaagaatacagtgtttcctctcttgaagctctcacaatgaaatctctgagtgttttctcttagatctatttaagtaattctttagacccctattacagtgagaatggatcactatttatagggctaaatacgtgagggaaggtttcccttttgcttacaatatctataggttgtaagaacatacattgcatatttagaatacatagattgagggattcacacatcttgccatatccctttgatacgatcgctagattgtagggattgtacgtgtgcttgagctttacgatataagtcttaaaaatgctaagtcttgatgcattgctcgaatcatctacccttgccctgttcagtcatgcaaactctattcgtgcagatgtatactgagctctgctcgaaatgtttcttcagccagatataggaaatagcagccacatgtcaccagtgtgtgtcgccacgtcatagtgcaaaaaaggagatagcttacctatgtattttattcaatgcacgattttgtagtaatttatttgtgcactaccttaatttttttctttttcttttttgagaagcattgccttcattcattcccttttttctttttattttaacaattcaaattgagaagtttgtgtcaggttgctgcatcgaccatcatgtctatatgtggtaatgagaatgtgtttacatgaaaagtagccttgatgacgtagaaattaatttttgacatgtggaaagaataaaaaaattcatggagttaagctactcaattcatagcagtcaacttgagaaagggtgcctagccctatgc

SEQ ID NO: 393303 - DNA, 729 bp, Cannabis indica
ctccttctccttctcctcctctttaggaatcaataacctctccctatggctatactcatctttattatttatttcttctcccatttttattattattattgctttcttccttctatataatttatgtgtaggctgtgtgtgtctatatatataggcgaggttgtgattgagaaagaaataaccaatattatttaatcaatctctttctctatttaacttattatacataaatatatatttatttatttcgttacaactagctgtaccaagtagacgtacgaaatttttaattagtcatacatggcgattttattattaatatatattttgaagacaagggagagatatgttttgtagtttagttaacagtgttcactgtagaggcagccagctggagttgaaaaacacctcgtagtattgtagctttagacccgatggtactacaagatccaatcaaatctaatcgattgaatatgttgttgcattttaatctcaaaatcaaattaaaaattgatctaatttaattacatttcatatatatttaaaaatatttatatttatttatatataaaaaaatattttgattatatttttactctcataattatttttgtctcggtatatattttcaatgatgttttatattttattttttgacaaaagaagagaaaacttctttagagatttaaattgttcattaatacataaatgaacactaaggacgtatta

SEQ ID NO: 393304 - DNA, 1676 bp, Cannabis indica
agccaacaaagcaactatacaaaatccaagttggctctagttctctaccaaactaccttactacataaagtttcacaaagaaataataaattgtgctttcgttttgggacacaaggtccgctaagaattgtctggcccgcgggttcccaagcccacagcaattccaacttatgcaactcatggctctgggcgggtctggaaaccagagcctgaccaaaaatcctattttttggagtccccacaatgtcctgctccatgacatccattacatcattataacctttctcctctgggcccacgatacccccccaacccattacctggccttcttctttttgagtcaatcacagtagtaaaagtagagtcgaagaaatccccatttttgtggacattcaaagacacatgttcaccattgacttccaaattctccaacctgctacttcgattctcattaagaggctgataatgagaaatatcatgaccatgattcatgccaaccaatcccccaattacctccgaattcttaggaatcaagataacgttctgatctgggttactgccgtgatgatcttgatgtgtttccccacgcaccgccgctcttgattagagccattgtgccccaaaggtcacctgtcgcctttgtgtcgaagctctcagttccaagctgtaaggtttttcttggagatgtagtggcttcaagaaaatccttggacaaaacttctccgagtgtccgatgattccgcaaataaaacaaaaagtgtgcaatctttcatatttgaaattcacccagtaccatgatgcatcgtccttgctgattttcattctttgtttgatcggtttgtcaacattgatccgtactcagacccgtagataatccctccaaactcccaagaagttattaggatccgattcaagaaatgtgtcgatgaaatttcctaaagccgttaccacattaagagtcatattcccggtttgtaaatcatgaagttggacccacatgtcgacatggttgattttgacaagccttggattgtccccttctttcaatctgcaaagataaaaggcttccgatcataggtccacggactcccatctatgaccctttggatgtcaatcgtcgtgatagaattggaataaaaatagattcgagttaagttccttaacatacattcccatccccggttgccaaagaaatgccatcatattctaggaaaacattgaaatcaacgaaacccgacctgtactaaaacgtttacccaccaaacaccacctggtgtctattaccacctcccctgtcctattcactagggcccgtagtacctctttctcttcctctgccaatataacaagattacctcttgtagccatatcattccctaccccactactagaagccatagcagcactaacagccaaaatcagacaaacaaaactctcaacaaacagagagacaacaacgtatcaggggatacgactcttcaatacttgaaagatttactatttgtatgagaaaatgttgttagtaagaaaaaaattgagagaaaaatagcccaaacttatatatgcataaaattacttctaattagaggtcattcatactattttttattaattaaaattatgtgtaactgtaaattataaaaaaatttgttacaattatttcaattatttaagtt

SEQ ID NO: 393305 - DNA, 716 bp, Cannabis indica
tataagagataaacaatattcaatttctaatgttttggcgtgttttggatgtaggagctcacacgataggacgagctcattgtggcgcatttagtgaccggtttcaagaagatcccaaagggaaacttaccctcatcgatgcatcactcgacagtgcatatgcaaatgagctcatgaagaaatgcccggctaatgcacaaccttctacgacggtcaacaacgatccagaaacctcatttgtgttcgacaatcaatattacaaaaatcttttgaaaaagaaaggtctattccaatcagattctgtgttgtttggtgataccagaacgagtaaaagagttgagagttttgcgaaaaaccaatttagtttctttgagagttggagtcaatcgtttttgaagttaactactattggtgttaaaacaaatgaggtaggggaaattagagccttatgttcatctactaatgatggttgaaaatagtaatgaataaaaaaaaatctttagtactaaatgctaataaataattaagcttaaaaaagttgctttgatcattaatatacctcttatagtatatacatagttctgtccattaattatgagccttaaattttgtttgttgcatgtttggttgatgaacattgatttttgtcctcaatgttgtcaaataattaagtgtataaaatgaatgagagactagtaattttttttatatatata

SEQ ID NO: 393306 - DNA, 847 bp, Cannabis indica
tcaacccatttgcatttgatgcgactgcttatctttgccctgtatacacgttcttcaaaaaaaataaaaatatcacggtattatggtttaaataaaagaagcattggtatttatgggattaatttgaaattttagtcacccaatgtaaatttctcaagattttttcaccaaaatattgaaatttggattaacttttacaaaaatactttcacacagaaatttttccaaaaataatatttttttataaaacaaccgtaaaacaacaaaacagaataattaaaaacaacagtagaactttcacttaatccaatatacagtattttttaaaaaatttcatcaagtaaaaaaaaaaagtaaaaaatttatgtatgtaatgtataaaccctataataaaatgaaattaacacctgtttccaaattaaatgttttgaatgaccttttttgttttacaataattggtatccgaagggtggctttgatttgtttgtatttcttctttgttgggtatttttctgttcgtattgaaatattttgtgtttaatttctaaacgagtttcactgttctggtagtttgtatccaaaatattcgttttcattgaccatattttactttgtcagtatttttcagtttgtacttttgtaagttttacattttaagtactttttttctttttttaatatatccataagttgtttttgaaccagttaaatagattttggtaacttatcaaaaaaaaaaaaaaaacgatttggtatttgaaacagaaacctatcatagcaattaattagatacatgttagataaattaacaattaacccaagatttatttgtatataacatagaaca

SEQ ID NO: 393307 - DNA, 1000 bp, Cannabis indica
ggtggcaccgccttaatagaaccaatcctccattgttaaaaacttaaaaaaaaaaaaagaccaaagactctggctctggctagctctgtggtgtggcgaactgaattgctttgaagttctatgtgtctaatatcttatatatatatatatatatatattagtatagtattttattatattattatatattgatatgtatgtaataaatggtattgttatattacatttgtaacgtcaatagaaataaattgtaacttttttagaagaaaattacattgaactttgttggtatgtaattaaattttatgattaggtaaaggttcattggtgttaaatgaatttgtacaatttgacatacaagtagaggaaagaaattagctgttgttgctaccaaaaagaaaagctagatgtaatagaaaattagaatggtaattagatgaaacaaaaatggtaataagaaagatgtttggtttatttagagaaagaacattgaaacttgaaagccatcgagactagctcaacaatggtgcctaacatctttttatgtgttaatatcactattgatctaattaaatatcgagttccatatagtttaatgtaataactttttaagagtatcgctagtcaatcgttaaatgacatgtctagaggtactaggcaacactagtgcccaataacaatacttattaaaatattattaaaatattagtaaattgtaatattattatgttacactctaaaaaacaaaaaaaaacattgaaatgatttagtttggttatgttaagaaattagagatattaaagatagcataatagggcaagcagctttgcgttcctataattgggatgacttaaagcagatttggtgtcataaagaaatttttttattgtattaaaagaaagaaattttaacaaatttttaaacaaatatttttaaaaatgatgattattttttaaaaaaaattacataaaaatataaagtgtaatatctcgataagcct

SEQ ID NO: 393308 - DNA, 1600 bp, Cannabis indica
acataatatttaagcaaacgttgttactaatttagttttaatcacaataaatattgtgactaaaaatatatttagtcacaataaattgtaatttttatgactaatacttttagcaacagactttttaatcacaatgtaagaatgataatttataattagttataattttttggggaattaccccatataattatttttttttttaactttttttttaaatttacggttcgagtttctaaagtagttgcaactctagttgcaataggagtttctatactaattttttgttgtaatttaagttgcaatatgagtttctatgtagaattttagtaaaaaaaaaatatttttatgtagtaaaaataaaaaaaaattaattttttacttttaatctacaaattttattgtgactacaaattagttttttttagatacaaataagtcaatgatgtgggttcaaaggataggaaagaaaacctgaaaaataatctactacaacgtatccaaccgcattaaatatgcacatgcagcaatacccacttgatcagatcatgtgagtcccactctaaaataaatctccaccggtgaggattttttttaattctccagagtagcaaaattctataaatttttatatatacatttatataatcaagaaaattgtagaagtttctcatcttttataatttacaaacttttttaaccggggaaaaatgttactaatcgaataatggaggtatattttattattaaatacttcggtatttataatacttaatttatgagaatcgttaaaaatattattagtgtttagtatttttgtttgtattatgttgttattaatgtaattaagtagcggattggatcatataaaattaaagaaaataatttttaaagaataacgctaactaatcataaagtgtcacctataaaaatattagtcaccactactaatatttaataataatactcgtaaattaatatacatatcaataaatacatatactaaactcagatacatttatagcaagagctaagttcataaacttgtaattttgttttttttcgagagcatataatataggttgtaagttatatatgttgagattgaacagaaataaaactataaaaataaaatttaaatgggagggtaaatttcatcatcttggcaaatttcataaaataaaccgtgaaactttattacgttcttacaattattaccagaaaaaaaaaaatgcacattcatatcttcaattattggatgttcttattatctgacaggttatctaatttgagtcctcctattaattattgtcaaacataatatcaattattttttgacacttggatggtgttagagtccaaatatttcaaaacacgtttgtttattaattatagcctacctaatataagggattaggcgctaattaagatcaaattttataatctttttttttttgctaaaattgtagccttttattttctaactgctcagattttgctgttttgttctaagatattattaatgtgtttctgctgagattttttttttctaaataccgaaacagatagggtgtacacgacttgtaacgtccccgcttca

SEQ ID NO: 393309 - DNA, 1064 bp, Cannabis indica
aatttccttaaactaatcaaattggaacaaatattttcaaaagtattgtcacgtcactatgtgtaatattttgtacatgctagaagtgaacatatcatatttatcttgactagctagttttcttatatatattgaaatttctttatgaatatttttatcttatttttattttacttatgcagataacaaattactctgaaaaaggttatattcatccagtagatcaaattccattctgtatcccaaaccaatcagaaggatcatccatggacttcaagttttcatcaactcaacttgatgaaaccatctcaataactcttgctttatgcatagttgttgagtttgtggagttaagaactcatgatgagatgatgaatcatattattcgatgtgaaagccatttcatcaagcatgataacacaactcgaaaatgtgtgttttgtttcctaaacaagctaatcatgccatatgtttcgattccagaaatatttgttcgtttggtatgtgaatgagttgtgtagctatattcatgatacagttaaggtttcttttgacttctccattatagatgaagggaaacaacatcaagttgggaaaattaaaaggtgcggaatccatgtgtatgataacaatgagaaaatttatcacaactattttccattattgcttttcatatctaaggtacgtaattcataaacttccttcatattattattgcacttataatttttttcatcttattaggttcttataactagaaacatatgttataaacaatataattatgaaacattttttgcacttaactattatgacaactaaatatttctacatgagtataatcatgataaaataaaacaaactatatatcaagaaagttacaaaaaatattaaagttacaaaattcttgagctaatttggttaaaaatgtgcatttgtaggaaagaaatggcaaccatttcgatatgtccaaccgcaagggaatgaagagcccttctgatatcattacaattgcacgacgagacagattaagagcccttctgatatcattacaattgcacgac

SEQ ID NO: 393310 - DNA, 568 bp, Cannabis indica
ataaagaagtattttattgttttatcttattaaatagttttatatggactatcctgtgtgatatctcggaaaattggagtgttataatgtggtatcagagcaacacggtcctgaagaatgtggttagccctaatatgtaaagttcaccgccatgagatgagctcgactcactgtactgtaagtggttattacttataattaagtttcttttaaattctacacacgagaatgtaatattcttttcatgtaaaattgatgatcaaaatgatctttcttgatgtgttttggtctgtgtggttcaggagtttagaaatgcctcctagaaggtcagtcaaattgggtcaaggtcgaggttgaggtcgaggtcggggccaaggccatgaccgagatacaggccaagattatggagggatcaatgaaccacctcaagcaccataaggatgggaagagcgcctttccacactagaaggaaccattcgaaggcaaaatgaagaactttgtcaactgagacatcaattggagttgtcagttcaaataaggccgccagagccagaaaatagagacccac

SEQ ID NO: 393311 - DNA, 775 bp, Cannabis indica
caccatttttgttcaaaacaaaacaattttatttatcaaagttaatagtgtaaccttgatcgcagatttgacttatgttaagcaaattagctttaagcctttccacaagaagcacccttttaatcataggtaacccttcaaagttaagagtacctattccaagaacattaccttcaactctattttcaaaagttatggatccacaatgcataagttttatgtccataagaatggacctatcacctgtcatatgtctcgaacatctactgtcaaaataccaaaagcgtgaagcacctcctctatcatatttagcactaaaatcaacaaagcatttattcttcttgacccgtgttttatgaacattttttttactctctttgatttttcaaaatatttgaatctctcaaaaaatatatctttggcaaagttctttagagtaaaacacttaggtcgaatataaccttttcttccacaaaaatgataggttggaataaatttttcaagcttaaccttgtttttacctgctagttgtaactcatctgtaaacacaacaaagctagttgatataacaactttttgagaagttggaacaaaaataccagcatgcagaactccaccaaaaataaaacaattttcttggaattttgagactttgacgctctaagtctcacatgattcctttgacctgaattctatatatcctcaaaatcagaagaaccaagattaagcattcttatatttttctcaattgcatttaaatcctttgacaacttac

SEQ ID NO: 393312 - DNA, 964 bp, Cannabis indica
aagccgtcaagaagctggacaaccatgtttggccggtcaaagagagtatataggctgaccaagatgggcttatatggtcggcaaaggtttaggcataagctggccggccaaaggtgactttcagactaaggaggggcctattggactaaggtaatttgagctctacaaggaaaagttgtacaaaggctggccaccacctatgaaaagtggccaacacttgcaaaacttggcaggaacatgacctgtcagaccagagcctaacctacagacattatgtggtcggccagtctacacctagcaggtgcatggtcggccaacttttacttggtaggccgttggtgtgcagccttcatccgtggacagtaagttaagcactaattgggccttgacatcccacaaaaataggtagaaaatatcaacaacttctctattttcaagggataatttggtcatttaaggtttattaattaattatgtaaatctagctttattgacctatttttaagggatattggtgcttaatctacatgtaagctctactatataaagagcattagcgtaaccctaactctctaagtcttaaatctccaagcctcactaaagctctcaagctttaagtctgaaaccctacctctctcttctcctctcttctatacgctccatggctctctgtcacttgagatttgcctacttgatttatatattgtaatcttaagagagctactgtagattccacaatacttgttatctatgtagtattatttttgacattaatacaactaaaacaggagtaggtcattacccgctaactaaaggggtcgaacttttataaaatctcatgtcttacttacttttttatttcgattgtgtaacacgtggaaagcatcagtaataaatacgactcctctgtcgggtttgccaaatttgaggtcaacaatcattatctactaaaataaaatattag

SEQ ID NO: 393313 - DNA, 654 bp, Cannabis indica
actctgcatagtctttttagcctcaaagattcgtggaggattcttctcattgaatggatcatgtaactctgtccaagttttagctgcattgtcatggtacattatgctatctgcaatttcatcagaaatagcatgtaaaacccaaaaaatgatagtgatgttgcatttgcacaagctatcatagtcttcgtgatcatcataaggttgaggaagcttcccattgacaaatttgatcttgtttcgagctaccagaacaatcaacattactcttctctaggtactgtaattctcattgcctttgagaatttttggaacaagaacagcacctggattatcaccattagaaagaaaatacaaatttgaaagatcattaggattagtcgatcgtgaattttcaccaagaatagagaacatgtttaaattatgagaattgtttttaagttcacaatttccttgagtgtgaactcctccacctcaagtttgagctccaccacctcgcaccatgaacaacaaacaaaaccaaacaaacaagaagagaaagaaaaagaagaggagctcacaaggatggctctgataccatattaactcaaaggagttgaacagagtacgaaagaaggggagagagggagagagggagagagagagagagaggag

SEQ ID NO: 393314 - DNA, 1186 bp, Cannabis indica
gacttcaactactcattatatatagtacagaaagatgtaatatacattgagaacaagtgtacaaagtaagtgtgatatttgagcatgctttgtaatcctttacttttatgctgcttaatatcttctcaatattcagccattacattgagcagccatcatcttagatgctagctctttcatgttttataggagcctcaaagtactcaaacaattctatacaagttcaacattatcctaaaaatataatatatgatcctactaaccgtcatgattacggcatcaacagataaaccatgggaattcttatccgaattagtagcagaagaaactgtccaatttcctgtcagagacttaacattgtggtcataagataacgataatatctttgagctcagtttcagctcatctttgtcaagctctttgcacaatgtgtcagctagtgtctgcacaagattgaaagcagaaaacacagacaacctggtaaatgaggagcatggaagatcgtgtatgaaccacacaagtatataggaacaggcataagctaaattaagagacctgcattccaccctgaaaggaaaatgaaccacgtgggcgcttcttttttccacagaaccctttgttcccccactcttgtctttttggaaaataactttgattgaatcaaccctcctacaactgaaccaaacctgatataaaagtgaaaacagagtgttcatagacaggaatatcatcacaataccaattatagcaattaagcaactccatttttaattataataactggatggcatgactgcaagatatcaataaagaacataaataaagagactttctagtaacatcaatgcaagaaacaaaactacacccagattttctactcctaaaccgtgaaatgagaaacctaagtatagaaaattgaattcccaacaatgaacgagaaaagattaaaatagaacaataaataaaaaattaaggcaagtgagggaagataataagtcagctagattttacctattctctaaagtccatagctctggaaaagaatattgcatctgttcacaagaaccaatatgatagatgtaattgtggttagctttgtaaaagcataataaagctttttctcttccaaacctcaaccagtctaataaaaaaacagataacaagtagtgagaaacttcacattttt

SEQ ID NO: 393315 - DNA, 1772 bp, Cannabis indica
aaaatcttttattctattattttaaaaagggtgaaaaatatttaatttgcatttgtttattaactaccatccaacacttaactcatttcacaataaaattgaataaaatgtgatggaaggattacattattgtaaaagttatatttcgaatggtattattaacaatgttaacctggaaacttttcctggtgatgtggacatcaatgtttgacacatggtaaggaagataacatctcgaagttgagtagtcccgagtcatattagttgacttgggagcaaataactccgagccccaagagctgaaaatacatgaaccagcatcttggaagtcaacttaagcacctagggtttcacctagagcccacgttgacaaccttaactagggtttcagtttccaagtcattcttggtgtaatgggtcaaactttgcattgggacatgaattagacataccacaaaaatatgtgaggcatccgaatcagagtcggagaactttcatttttaagcacctggacacctggtgtttgggcaccccaacacccttgttgacaatctttcaatctgggccacttccaagcatcagatcaaaatttcgattcgtgcatcttgttcatcttcatcaaaaatggagaaaaagtgttttaggggaagaaatatcacagcttcggtgtcagaaccaaggccaagcgcccatgttgacattttgttaacctagaccaattctaaggagtttcccgagaagtccttcgggcatattctccatttttaaaaaagattaagattgaactatttccagggaccaaatagaacttctaagtggcctgaaactaaacccaacgcccaggttgacatattgttgatcggggccttctctaatcaatttctcgaaaaagtgttccgagcattttttccataatcataaataacaaagatgcaagcaaacttgaggtctctctattagtttttatagtactaaatcaggtacagtggaagagttcgtattatctgattatcattgtaccataacccaatgaatctccagatgtgtatacataaaatcaaaacaataaaatacaagttaagaataaataccttttgatgactattagagtattctcaaaacttctcgtatattgtatcctttaatcttgatgatcaggatgatgcaattgaactcacacgttgccttccaaatccatccaccacacacaaggaatagtatgtgctattatgataaatgttatactagaaattcgactatctaccagatgctgacacgtgtaccacaaaaggaatatgaatcaactcaatgattataatattaaattgcattattaaacgcaacttaaataactcatttcaattaattatagttgatagaaatattcaaacttgttgccacataagcatatgcgagataagaataataactatcaacatatgtaattgacgagacaatatgtccatcttgggataaatagagtatatactaaaagtatacaagataagatatcgaggagcttgcagctcattgatccacacacttgggagtaagagctatcaactcattgaccctcatacttgggagtaagagctagcaacttattgacctacatatttgtacatggagaaaatagctacattcatccatctcgccctcaacgcaatggaatggccatctcgctagtatcattctaatacgaagatccctgcgaggagaagaatatatgtacttagcatttttttcctataaagacggtgaagaaggacaac

SEQ ID NO: 393316 - DNA, 1075 bp, Cannabis indica
gtaaactcaaatggagcaaggaagcaactatacttttaataagtggatggcttaatacgatcgtggggaatgatcaaatttctgcaaaattttgggatcgaatcgcagaatacttcaacaccaacacaaaggtgaggaacgaagaactggaaaacaatgtaaagaccgttggaacaagataaatcaaaaggcggtacgttttaataggtgttataaacgagtacaacaaacacgttacaatagttggtctgatgagcaaattcttgagaatgcccatcaagtgtataaatatgataacaattcaaattttatgttggtatactgttggagattgctaaaagatgatcccaaatggaatacattctaccaaacatcatctactcaaagttcaccaatggatttggcaacttctccaaatttgtatgacaatatgagtcttgatgatatcataatttcagaattaattgacgattcggatgaaatatatttcaacaagttcatagctgggagtagctcaacaaggcgaggaaaaaagagatctcacattgacaagggctcgtgtaaaaggacataaacaattcttagatgagtactttttggagcaattagtgtatatagaataaccattttgaagatgatgtagaatacgtaaacatgtatttttacatatagtgcaagctctagatcatcattcaaaacgaacttctgccattacaaatgtgtattgtagctatgtgaatgttgtatatggagggtctgccaattaataaaataaggattatgtttaaattgattatgattatgttactttatgagttgatttaaatttgatgcaacttaaatttaaatttaatgttaaaaaaaataatatttaaaatattatttgttttaattataatatttaaatttaaatattattatttgttttataacaaaagttgtcaaaactaaatattatattattttgggaggatgggcacaccgtttattgtaaaataatgataaaatgaagggattttttctataataaactgaaaatggaaaaaatttacatttatgacctacatagagaaaa

SEQ ID NO: 393317 - DNA, 788 bp, Cannabis indica
aaaacaagctaggacttacttagagtaagtatactcaaattatattctactagagagacaaaataaaagcaaaagtaaagagaaaacaataaaattaataaattatagtagttgattagagctcaatctattgttgcaaagattttagtttggtctatttgatttggatctctcttctatataaaaagtaagtatcctttaaaattatataatcgatcaatttcagaaccatttttacattaattgacatattaatcaaagtaaatgcctaaagaataaataaagaacaattttatctgttcttgtatttagtgaacactactacaaaacaatcctttagaagttttttcttttcacaagtttcataataaagaaagttaaaaggtgtaaaaatgctcacttattaaaaattgacttttagagacaaattttttttttctaaaaaccgtaggtatagaattgaattacaccatttagagtcggttgaaaggaagacatgtctgagtgctatttgaagagcctatcctatcggttattaagaaatatttgacggcatagggtgcacgcgaaatttgacgcgtgtaccctatgtcgtcggttatttcctaataatcgacggtatagggttatacaaaaaccctattacctggtcttctccacttcttcttcctcacgatcgaaaccaaaccagcaacagaaccagccaaaccctcaccacccttcgccaaccatcccttttccagcctatatctccttcatttttgcaccatttgagccttatttttttt

SEQ ID NO: 393318 - DNA, 1886 bp, Cannabis indica
tcagcaatctcaggagaaaccacgccaagtcgacttcctgaaactgcttgaacaaacttcccagccgagtctctaatgatgaacccaaagccaaaccgattctcactttcgaagatggccccgtcgacattgatcttgagctttgtagaaattggttttgtccaatgctccttcccattcccaaaattaacattgagtaatggaaatgacccatttgattgagcattttgccaagtgccaagattagtccttgccaaccgaataacctccaaaactgttgtcgatttgttattccatagttgatcattgcgtgctgtccagatacgccataaaagcattgctgcatcttctgctacaaccctgcttccatgaaccagcaggtcacaaaaccagtcaagaaacaactcctctccgacaccagcagcagaagcacatgatagattccaacaagaatgggcaaaattgcagctaaacaacacatgtgaggcagtttcaggtgcgagattacacattggacaagttagatcaacatgaacatgtctatttgaaagctgaattttggttggaaggcaacctgcaacaacacgccagagcagatgttgtacttttgctgggacattcaattgccaaattttcttccagtagctatccacaccagcaatcggccaatcaccattggtacattgcagcaacttgtaagcactacgaaccgaataaataccagatgtttctttggaccaagaccaacaatcctccctccttgaatcacacagccgaatagaaagaattaaagcactatcatgtgggttaaaaatatcattgatcacctccacatcccaagcttttcgttccatctgcagcaggctatcaactgttcttccaacaaggctcggatgataagtggtgacaaatttattgtccaaatcagggagccaagggtcagccaagatagaagtggctttaccatcacctatagaccttgaaacacccatctgaagcaacaatttagcctccaaaacactacgccaaatgaagcttggatttggacccaactcagcagttaagaaatcacccttaggatagtatctagctttataaacctttgccaccaaagaattattattagttagcaaccgccacccttgctttcctaaataagccagattataatcccttagattacgaaaaccaagtcctctagcatccttatgacgacatagttttcgccaactcatccaactcactcctttggacacattcttagactgagatttccactagaacttagccattaacccttcaaggctagagcatatctctttagtgagaagaaacacactcatagcatagctagaaagggattgggccacagacttaatcaacacctctttccctgctttagaaagaaatctagtctcccaactttgtatcttcttcatcatcttatccttaaggaatcccaaaatcacgttcttacttcgacccatagtgcacggcaagcccaagtaagtgctattttcagaagcggggaccatcccaagtaaaccacataactgagcccgaacatgctgctgaacattgttgctgaagaaaactgaggactttgtaaaattaattttctggcccgaagctttctcataaatactcaggagacgaagaacactagccccttcaatatcatttgctttgcagaagatataactatcatcagcgaactgttgggttttatgccctaaataaaagtctttacaatctgattagtaatcaatataagaaatatgaagtgatttatgtttgcatgaattttacatgctaatggtttaatatgtttattacatttatacacaaaatcagttaaatccagatcatatgtttattcacaatta

SEQ ID NO: 393319 - DNA, 1566 bp, Cannabis indica
acttattcaacattaatcaccgattaagaacacaattattttttctaaaaaattatgtatttacatgtttagtgtgaaaaaattagtttgtcttggctttaataagttgatcaaagacattttagagcttgtctatgagttccgaacatgttagtacagatgtctattctattataacgataataatactacatattaccaattatataattatcattatatatgttaatagtaatcttgaataaacaacacataattaaattagtctgcataaaatattcgaacattattcagaaaaataactaatacagtaggttaaaaatgagtacatagttaaatattacttatacgctactagttgcataaattgatgatattccattgcaataataaaatcaaaaatgaatatttaacaaattaatgctgcaaaaaaaaaaaaaaagaagaagaaattcttaatgaaaggaagaaatatatataataatacttcgatctcgattcctcgataaactacattaataatctggctaaaaaataacatttttcaatgcatatatgactaatagttttttttttgggataaacgattataattaatatatttaatcaagctaataaacgttcattcataaataaataagcaggtgtaattatattaatgggagctttactgtaaattaaaaaacgtatatacaaaactttttaagtgaaacatttcactgtgaaagtgaaaggtccttttttattaaatagatttattttcgaaatggaaaagaagatggccgacaaaaaaaatgaaaagatccacgtaaagggtagagacgtagagtcaagggtattgactttacggtcttttgacccgtatatgaaaaatatttggatttttttatctttcagcaagaaaatatttgggtttgaatcgttgttagacattacaatcaccactataaaagttttttttttttttgacatcaccacttaaaagaaacgataattttatttaatttttcgactaaggcaataaacggcctaaacggtcatgacacgaaagcataaagccaaaataaaattaattattattaatttgaaaaataataaataaaaaaagagaatgtaattaaggcatagagtctctcgcctgcctggcctactcatcttgaatgctttcagttttgtgtcgaatcgaaacccaaaaataatcttgcggaggaagaccgagggaggaggaacttctctgagagtgacaatcaatacgacaccgttttgggaggggccttttaagccagaaacgccgattaaaaaaaaagaactatctcccacttattagatatagagagagagaaagagaaacacaagaatggaggaaacgaatcattcataaatgctattcttctttttcgtctttatttctcattcattgattcattgtattctctcctctgatccctaatttactctctttctcactggtaacttccctatttttttccttttctcgatttcatcgtttgtttgattgctaattttttttttattattattgttgtgttgaatttttatctttat

SEQ ID NO: 393320 - DNA, 1661 bp, Cannabis indica
ttataaatatactctgtcaatttatactttgcatgcctttgattttggaaacttcatagtttcgagtgtcattattagcattaatgacccgccctttccacttctagctgttagatcttccgtcttttggccttaccattactgggctcaaagtataaaatgatagtctatgttagccatatcccatagacccctgctttggtaaatttcatctagaaattgggattgtcattctcctgtggagatgtcccatcctggtttagaaatttatcctccaaaatttgtagcaccgaaatataccaaatctatcctccccatatgcactgaaaaatttcaaaccttagtccaaattagaaatgaattattccaggactgaagatcgtctgattaaaccaaactaagaagaaactaccaatcattataggcgattcttacaagagacttctgaaggtaagcatcgttctttttaaatggtggcctaaggaccaagactaaagcctacatgaggaaatcctcgaaccagcttatcgttgatgttgataaatttctcgaggctaggaataaggtctcaaccgtagggaatgaggtctctgctgtgggcagtgaggtctctgctgcaaggattatggaggtgcatcctaccaggtcaacataccaggtcgggttctctgtggaacgtcctaacgctaaggcacgctttagtgatttttcaattacagtgctttctttgataatcaaagaactttcttgaaaatcgtgtcaaattcaagcttttataataaatattaaactttaaaattttacacaatcatttacaagttccgagatcccgtttctaaacatttatacaaaatacacaaaatagataaccagggcgcacaacaactacaaaataataacccagatgtcccgagatcgaacactctaggtcgcgctgccatgagatgtacaacctcatcccagctcaagctcactcctgttcagcatttgcctttcctttacctacacatggaagcagaagtgtcaatcaacagactcagtaagaaaagcatataacatatcatataatactgacttgtatctaagtgcccatacacctatttacaaggcataacagatgagtaagaacgttccatactagggtacaaccactataccacatacactacgtacctcactgaacgagtgttggtagggtttatttcgtaccctgagtaacaatgagtgatataccacacacaccctgtactttctcgtatttgtgctggtatcaccgtaatgtactccttaacagtatacactataccaatgcactctgtaccataactatacaagtgttgatagtgtgacaaacatataagcatgcatatacacttaacatatacatactctcacatattcatattacacattatatacagttcttacctcctttctagattcaagtgagttggccgacctgaacggaaagtctcgtgttggatggacgccataatcacatcttaaaaccgggtaaatcacatgttcaaaaccctaattcgggaaacctgaatctacaaccctaggctatgttatctgtttggtttcatgccgtaaataaaactccatttcaatgtaatctagattatttaatatcaataaagaaatagaagtatttttca

SEQ ID NO: 393321 - DNA, 1009 bp, Cannabis indica
atttttataatttaaaaaattataaaatgaaagtattatcaatcaatacttttatttttttttataaattaatgacctcaaaaaaatatgttatgcaaagaataaatgttgaaaaaattgaatattatttttttgaataaaaaaattaaatattattagcaaccgtaaaagtcttcaaaatttaataatctcagcatttaactaattcagtaaacagtaaagtttaatttgtacaactattttcattcattttccccctataaagatgggaaataagaacaaagaaaggttagagaatctagtgtcctaaagagcatttactcaactctattaaaacctcaatagttcaaaaaaatttaggtaatttaagtttatttgatcttggaattttgagttcaaaactatacaatagacaagtggccataaatcatttattgacccaaatcactgtaaattttatactcttctaaaatttgtgtatacttttttttcttatattaaattattcgttgtctaatgaatcaactcaaattatacacttattatttgtttattggatttttaatcaaccaacgcagagtcataataaatgagatttaaaccaaaatcgtaataataaatgcagttaagaacactgaaatttacaataaatgtaagtaaaacaccaaaatttaaagaagttcggccccggatgtcggtaatagtctactccccttgtgttttattaatttgagttacaaaagtcaagaacattctcttgattgcaaggaatgaaaagtgtttatttttttctaagtgttcaagaatgcgaatccccctcccagtcatggatgaccccttatatagggaaaagggtcggtgcttctcgcttcaggagacgcaccaacgtggagctaccttaaccgtctttgattttctgaggtagttgaagtctgattttcatgataatatctttctatttttgtgagttgacaactgtctttgagcctttcatgggatttgaatattt

SEQ ID NO: 393322 - DNA, 643 bp, Cannabis indica
aaaaaaacccttagtacactatggataatctcacaaagatctgattttagtgaatttctttttactgatttcatcttttacagagtcgacccccctttgactgtataagaatatgcagagcttaaatgtctagaagcacaggagaacgttcttttgctaatattattaccagtattcgattctaggtcattcatagcattacaataccttccctattcattgtgggttggttattcgtcagcaagggtttaacttacaatgtatttggaagtccccatccaaacgagtatttcacagagagtcgacaaggagttccattaataacaggccactttgattctttggaacaactcgatgaatttagtagatcattttaggaggcacaaataactatagatagaacctatccaatttttactgtgcgatgggcagctgttcacgaactagctgtacttaccgtttcttttttagggtcaatatcagcaatgcagttcatccaacgatgaacctaatccgaatcatagagctatgacacaatcaaacctgaacgaacaaaatgttcaattgaatcgtacaagtctatactgggggttattactcatttttgtacttgctatttattttccaattatttcttcaatta

SEQ ID NO: 393323 - DNA, 1084 bp, Cannabis indica
agaaaagaaaaaaaagaaaaggacagacattggtgagttactcataaatatgatgagaacacacacacatatatatatatatattgatataaattattatactaattaaatttacaaatgccctctaaccaataaaaataaatagcggatttttatatctgaactttttatatgtatcaaattatacttttttaatattttagattattaaattttttttctcaaattattaaaattattaaattttaagaatttttgttcaattttattaacggaagtctaatataaatgaaaatttttgggaaataatatttactacatattaaaatttaggagcattatttaattgatattaaagtttgaatacacaatttagtacatagacaatcatcacattagtaaaattaaataaaatttaacaaaaatctttaaattcaacattctcaatagttcgaaatttctttttaacaatttacaaaaatcaaaggacataatttaatacaactaaaagtttatataataaaaatattaattagccaaaataaaaaggcaagtgttaaataattgaaaatttaattttcaagaattccctatacatcttgaaattttcataaatatgctaatatctaaatattaccagaaattaagaattgtaccccacttgctcttcatgtaagacaatctacaattcaagatttaaaatttgtgttatatttaaccaactagctatatttataatttagttctattacacaaaatataaaataagtaaaaaataattaattatatattttttaaaaaaattaattaattatattgatgattatttaatattttattgacaatatataatttttattatttaaataataatataagaaggttaaattttataaaagtcaataaatcataataatagtgacattatagtaaataaatggcttgtttggaacgtcgtattagctcgtattgtattgtattgtattatattgaattggattgtatattatatttttatataatattatattaaactttaatttatactaaaatattaagtatttaggtgtccataaaagttaat

SEQ ID NO: 393324 - DNA, 1850 bp, Cannabis indica
tgaacgcagaatcagatattgtcccatgtgtcaggtcatggtagtgcccacaccaataaaagtgtacattatttttgtccaacaacacctttgatattcttatctgcaagagtggcctccgtgtgacacgttgtcccgaatcgaacggtcccctatctacatggatccttcagcccacgtgcggaatacctgctagtgggcctaaaaatcatgtattatatgtatttaccctattagtggacctatttttacataaaaaccgaatggatcacaggtatgcacggatccaaactcaagcctatataaactatgctaccccttcatacaaagaggaggaaactctgcaaggtcactctaagcgttcttctttttcaagaaaaacttagagagaaaactccatagcaagagttagggttcttcaagattttaaaacttacttgtaataaatacaaagccttaaaggcaaatacactaactcgtggagtaaagttcattaacaccaaaaccacgttagaatctctatctcatttacttaatagtttatttaatttctcaaacctcttatttatttagttttcaaaaaatttggtaaacaagataaaaattacatacgtgcctatatgcccataaaagagtcaaacaaatgttcatacaatttaaattgtttaaattattatttctaacaattaaattaattttaaaatattttaataatctatagaagttttatttttataattgtaatgtataatatctatgattctatatggtggcgctgaattaatctctgtcatacactcaataacagctcaaagaaaaaaatactgaaaagagaaagaaaatattttattggtaatgaaatatcctttttagaggacttactagagactttctctataaaattttgtttccattataatacttagcatcaattaaatttaaagacatgggatagtatttaatggcaaatcgggaagattcttttctcttgtctatagttttagctcatcaactatatatattactatgtctatatatacaatattttgtggctctggcttgccctagagaaaatatggtattggttgtaatacatatttagagatttgcacacgtttgtatttatttacagatatatactacttgttttgtgtattgagtaattaagcttcttttatttgcatgcttttcaaatcctatttaattatttcttataaaatcacatgtctatatacaagaacaacaaaatcacgtgtcacaattaatacagttggagaaaataataaggtattacatcatgatgtctagacatttttactaacaatttaaaacatccttatagttattggattataagtcatataaaattttggtattattattactattattgtccaaatttgacacatgagatctcaagttgtaacctgtaacattatctacacgtgctaattattataaacgtgtctttatataatcaagttgtaaccatttatcattttttttttaaaaaaaaacatttattatcttaattatatacaaaattagtgttttaatacgagttggactttttgatacgatacgaaactggcatgaacacgaaaaagcacaagcatgactaaacacgaaaaaatacaagtttgagcacaacacggcatgatattataaattggcatgacacgacaagaaaaaaatatgtccttaaacatgacacagcatgagaagcacaaaaagtatgtcgcgtaagcacgaatagagtactagtccaaaaagcacgaaatgacatattaaaaaactttataataataagatatgaatttatcaattataaataagtaaaaataataata

SEQ ID NO: 393325 - DNA, 927 bp, Cannabis indica
attaattcccaaaaactttattgctgtaataacttttgtgacattttttaagggaagcttcttacttatgttgacccttgtattgtaagtactacttctcacattttcattgttacttaaagatatgtaagaacaaattcaccaaattttgttacactctgagcacaggcagactcttgtattgctaatgtacactcataatagttagagttggttaaaaagcatcaattttataatggttcaaatccacaaagtataagctcttatatgatcgaatttgtcaccactagcaattgtggattatatttcatgtataataaacatttaggctaccttgatattacatcctaggtctaccatcgcggactgctatttagtattttaaggtgtttaatactatattgacgtaatatcttataattgataagtagttgtttatattatttattaaattaaaatatctaagactcaacattaaaatacattgtaggaattttgcttggtgaaattccaagtttaacctacaccaactcaatgttcacggttaaaacgacaaggacaaaattgtcctttcaactcaattaatatcaattcacacgacaaccaagaattggtcgttttcacttgcacgacaaaggaacttgtcgttctcacccacacgacagatcgtttgattctcaaaacgatctgtcgttcttctttgaataaaactcgagagttcagagctaaccctagctcatttctctcctcgaaccttcgagagtttcaaactctctctctctctctctgccttctctctggttctcaaaccctagaaccagagatctccctcgatctcttgatcgatctaacccagaaaatcaccccaaacataacacacacacatattcacaaagattagccaaaaacacagtattttagagtaag

SEQ ID NO: 393326 - DNA, 1754 bp, Cannabis indica
gaacatgtgagagagatgaatagtttaagaatagagatgaatgatagaaaaaaatatgaaatgatgaaatgtcaaataagagggtaatgtgtgattacaaaacaaatataatatattaagtttttttattttatttgttactttttttaaaaaaaaaaacgtgaagctgccatgattttgaccatgaacatcacatcaaaaactttataaaaaaattaattaaatgaaaaaaaaatagagaagtgcatgcaaaataacacttggcgttttgggaagtataaattgtacaacatttttgtaatttctaccgtatgacagtataaaagtaataaaataccaaaatacagtataccatgtaaaaacctctttatttacttttgcttttcatgttatttcaaatgatgttaactttctagtgtcctattgtccatgagcacagatctatcatctatcaagatctgttaatacttatgctcatgttatggctaagtttgctcttacggtgaatattgcttgttcttgattggaggaattttcatctccactagtgactgttatgtaatttattcaaattagtataatagtccttccactaaaaaaaattatttattaataatatatattataatctaatatatatttaaaatttcaattttttaatttgattaaaataattttaactaatatatattaaaatgatttcaatctgttatttatttaatatataacataatatttattttaaactaagtatattttgtatattgttatatgagatagttattattttattacttttctaattgaataattttaagttatcaaattatttaagttatgaagttattaatattgttggagttataatagttatttaaattattaaatgaatgctcgtgaatctactacagacactaattacatttgacaagataaattatatttttttttttatattttccagatatttatagtaaattagttactattgttagtattttctataatttatatttattgatgcttattttatttatttatagtaaagttaaaatataaatttataatgcttgaaaaaaagtataaatttataataatatttatttatttattatttttattttttattgcactgatgtatagtttgttcatgtgcagttaaaacactattgttccttcaagcttttagaaaaaagatagtaagttcatattgcataaccctgataacattagattgcaatctattactaagattttacgaccgtgatttctttttctattaaattttcctcctctaatgattttaagatcattgttagaaatttttataagcttgtcatgtaaatttccaagagtgcccatgatatatgttattcatcgattagttgcgtatgcacttcaaatgaataaacaacttattcagctagatatgaaaatctatgtttcttattaaatgtataatagtattttaataatcatgacatgtatagtatttatttgatgaacatgattataactagcttgtatgacgttattatattttcaataaatttgatcattgctgacaaaaaaaaaaatacattatttacctatttcaactagggctgttcataacgtatccaatctgatccaatctgcacgatctaatccaatccaatccgcaaagtgcggatatcagtacatgcgcggattggattggattaaaaaatctaaaatccacacaagtgcggattggatgtgttggaaattatttt

SEQ ID NO: 393327 - DNA, 1417 bp, Cannabis indica
caaagatgttggtccacctgtatttgatcccgcatcctatggaagcctaattggcaagcttattttcttaacaataacaagacctgacatctcgtatgctttcaatcggcttagccaattcattagtgatcctaggcaaccacacattaaggttgcccatcgtatccttcaatatctcaaaggtacttctggccaaggactttttcttcactctaatcacaactctcaattacttgcgcagcaattactccatttaaaggcatactccgatgctgattggggcacttgccctgacacaataaggtcccttactggcttctgcatcttcctaggccaaaaccttatatcttggaaatcaaagaaacaaacaactgtatcaaaatcctttgctgaggcagagtacagatctttagccaatacaacctgcgagatactttggcttattcacatcttgtctgactttggaatcaaacacatacaaccaaccactctttaccgcgacaaccaagctgccattcacatctccaagaatgtcgtcttccatgagcgtactaaacttatcgacatcgattgacacatcgttcgtgagcaaatcacaaaacaacacatcaaactttctcatattccttcacgacacaacatagcagacatcatgacgaaagctctctttccaactcagttcaactacttattgtccaagatgagtgttgccaatctctacacctcatcttgagggagagtattagagggtattagttgtctgttacacagtcggttatgttagttactaggttgttagtcttggttgttaggtctaatattttctctgttcttggttgtaactaactcagtttgagttagatgtatatatatacctattattctctcataacatatcaataataaagcttttcatattgttcactttgcaataaggtgttgattattttttgagatcaaagacctaataatgattgtttattagagtttctcttcctaaattattttttggggtagaatttttttcaaaaatactatgtaagttttatactgtgtaatgtgttaagtttttactattgttgtagaattattttttagttgttccactgttgtttttagttgttctgttttgtgttccactgttgttttataaaaatacagtatttttgaaaaaaatttcgtgtgtcagtatttttgtagaatttaactcaaattctagtatttttgtaagtttcccatttttttgcggctaagcccgccgaccctccttgggcttaggcgtggtttggttgggtctgtggttttgttactgcgattaatcttgtttctgtgacatagttttaaatgtctattgattaagttattgcgattagtcttgtctttttgacataattttattttattttatttcgttgtt

SEQ ID NO: 393328 - DNA, 730 bp, Cannabis indica
gaaggtacaaaatagggtatgcacaacctacgtagtaggcagtgtaggtgttaggtgagattagccttcatccctttttaattgatgtgattcttcataatggagtcgtcattagctcccttgactattgtgtaatcgccctaaattgagtttatgatgtctcacacgtccccttatgggcgtttccagacgttttctctatgccgcattaaatgtgaaatgactgttcaactccgtaaggcctgaagaagcatattcgtgctttaactcccggagaagaatatgggtcttttgctcatgtccgtgctttaagtattggttattcaattgaatgattgtgaaccagtaaaatttattgtcattttaccccttgctgtcaaattaattaacaatatgaaataataaaatttataaaataatcttatttaatttatgatcataatggttatttataagtttattcttgtatggtaaaattttttgtaaaattatttaataaaaatttccatgaaaaatattttcacaaaatactttgtcttgctaaattataacataggttatccaaagcacttcattcatggtgtcttgcaacaaaagtaatagatgaagcaatagagaagtctccaataccatttgtcaaaacataaaaaagtacttacacttgtgatttgtatgcagttgatttttatttgaagggacctatctaatgtgaagttaatttatacagtgg

SEQ ID NO: 393329 - DNA, 693 bp, Cannabis indica
ccttatggaaatagctgctattttgatcaccctctctcaactaaaattgtttagcttgtttccaaaaaatctcctgttgatcaattgcatcataaagtttctttttggtttcagcatatctctgaactgaaattgcatcccttaaaccatgaagtttcttcaaatcatccttataggtcttgatacggtggtttagggtgccagttaactcctcccccaactggataacctctcggcacacaggttaattttattagagatgatgttattttgctcctgggaccaaacatcacgaataattttgaaacatggaggctccttcagctaataattttcaaatcgaaatctacgtctaggagcaaagttattaatcacaacaggtttgagaaacaacggagagtggtccgaagtggcaaaacccaaattagaaagaatagccgaattaaatagttgattccaagttgtggaaattagaactctgttaaggcatacctcaatccatgcattcgtggcacttcctttttccaagtgtattgatgaccttgcagctcaagatcttccaacccacaatgcagcaaggtttgttggaatccagttaatagccattgaggatatggacgcccacctctcttgtcttcttgacgagcaatgttgttaatgttgttgggttttatgccctaaataaaactcttt

SEQ ID NO: 393330 - DNA, 972 bp, Cannabis indica
aagtgtagttttacaattaatacagttctcgctgttatcattgattacatgtgtccttatgagactctctttggtacctctcgtgattacaaaattctcaaactatttatgtgcttgttttcctcacttgatgtcatacaagtctcacatacttgacttcatatctcagcagtctctttcttgtctactctcatcatcacaagggttacctatgtgaaaactactctgaaggcaaaatctatattgacaggaatgtggtttttaataaaaattactttcctgctactactgcaatctcaagtaagtaacccatctctttcttcattttttgctgctatttccacaactttacctgaacatcattacactactcaattttccaattctatgttaccaaccatttctgagcctgagacatttgctcatgtgccaacagctcaacctgttataccacccattatcccaaacacatcaccaagttacatggtattatttaccatccaaccctgcatctaatatactaattgttatataccaccttctatagaaaataataccatgtagcttgcaccagctatattacctgatctcatagcaaatgttccacttgttataccaccttccatagaaaataatgctttgtagcctgcaccaattatattacctaatctcgcacaaaatattccacttgttataaccttccccagtaaataataccatgcaacttgtatccaaccacttatctaattttttacttcaaacagtgtcatcactcccctcattacctataactagtactgaagttctaggacctagaaatgttactcaagaaactaccaggactcatcaaatgagaaccagatctcataatagaatctccaaacatatggcatacttggaaactaaacaaccttttccaaaaaattagttgccaactgaacctggatctgtcaaagctgctctcttgatcct

SEQ ID NO: 393331 - DNA, 1803 bp, Cannabis indica
taagtgtgaatggcatacttcagtttagacataagctgcctagatagctgcatgtctagaaaaaataagttaaagtcatgattaaagagcacatggacggtcacttatttgaaaataaaaggccatacacgaacattattcaaaagtaaagggccctaaggccatacatgaataaaaatatcatatgtttgaaagtgaagggcctaaaggtcatacaaggacaaaagatgaagtatgcaaaataaaaggataaaaacaacaaagtcctcagatgtcttcaataactggagttgacaagttcaaagttgtatcacaaggactagttgtccagacagataagtctttgtcaatccagttgtcacctccccagaaatcatgcaggtttatccttcaaaaagggagaagggtgaacaactaagaacataaaaagacttagacaaaagacaagttaactggccaaacctaagggtattagctagatagccttgaaatacaaagctgtaattggcaaagtataaaattaagaatcatgaaccagatagcctatgaaaggccattgaccagtcagggaagattttgcccgagacgtaccatatagagctcctaaaagggggctaagtaccaaacaggggcatacaatggatctaagtactagatagagttcctatgaaggttctacgtcctcgataaagtttatatgaaggttttaagtcatggatagagttcatgtgaaggttctatgtaatatagagagtttctatataggatctaagtcatggatagagttcctatataagatctaagtcatggatagagttcctataaaagatctaagtcatggacagagttcctatacacgatctaagtcatggacagagtttctatacaggatctaagtcatggacagagtttttatacaggatctaagtcatggacagagttcctatacaggatctaggccatggaaagagttcctatataggatctaggtcttggatagagttctcaaaaaggttttaagagtcgtatggggtctctaacaaggtattagtccaagacacgatcttgttcatcaaaaagtcaaacattatgcatcctaaagctatcaaacagcttataatgtgaaaagactacttcaaagcatgagaataaaaaaaatttctaaagctataaaaagcttgaaacatatcaatagcagattcaaagaaagaaagagatgtcaaagaagagaagatgcggcaaaaatggagagagaagatcaaagttttaaaaataacatcattcaaaaagcttgatacttggccaaacaaggatgctcagaaaaggctcctacagtcaagacaaaagctaaaatgtccctatccgtacagcgtaggaatagggactttggggcaaatattatccaaaattttatcaacctgacgtggcatatccatatagtcaaggctgagcatgtggaatacaacttgtcaataataggataaagtttccttacacaacatatcaactggcatgggttctaaagaaatcaagcaaaactgtcaagcaataagcaaaaggagttaagcaaaatgcgaaggccttgaccaactatgtctggctagccaaggggagtgtgtaggtcagctagaggaagcttgtaggttggccagggtttgagcataagctagccgactaaagagtgtccatcagaccaaaaaggcttgttcaatcaaggaagcctgacctttacaaggaaagttgtacaaagaagctagaaaggctggtaggtacatgtaacgccctaatgctaaggcacgctac

SEQ ID NO: 393332 - DNA, 1490 bp, Cannabis indica
agatcaataaacaaatatgtatgtatatatttgttgaataaatctcctccaaaaattcatggctagaaacattagtctgtctcaatttaccaaactactgtcaatattttgcatcaaccttggctacctcacaccacgaacccgtatgtcacttcctcccatgtgagtcttgttggtcaccctgtcagctcccttctctctgttgatgctagatcctgtgacacataactagttcgcgacatattccaccagcgtgacactgatctaatccttagcaaccccttgagctcctctgcttctggtgatttctggtcttggtctggtaaacattctggacttttctctgttaaaagagcttatcgtctacttcaagatagtgaagatccaaggccaaacaataacaatttgggattttgacggaacctttggcaactcaaaattccaccaaaggtcaagaacttcctttggcaagctgcttctgggattttaccaacctgcttcaatctcagaatgaaacatgtggacatttcccccgtttgtccggtttgccactcttcttcggaaactacatctcatattttactttcttgcacttttgcttcatactgttggcataatgtgggtctaccttctggcatctctctcatagattctttctcaaattggcttgattccatcttttagcgccttgataccgattgtgtctgctagttggttatggtatgttggtccttgtggaaagtaagaaattctatcgtttggaaggacaaagttctcactgttgcaaatgcaaatgtcttagcttcaacacgtatatctcttgatcattggctaaaagctcaggacaatacattcctatcatccatcaacttctgtaatagtggtgatggggctgagctatggactaaatctggtacaaatacaattaagattattgttgatgctactacgtttgctagtgaaaataaatttagatacggtatggccgcaagaaacaactcaggaacactcattgacgccaaagctggttgttatccaggcacttttactcctgaagttgctaaaattattggtattaagaaagctttaagctggatcaaaagacatggatggcagaacgttgaattagaatctaacagtttggtctctgtccaagccattcgctgtcacactccgctctgttcggtctttggaatcctagttcatgattgtcaaactttattatcatctcttccttttattaaaattcagtttgttaaacattcaacaaatctcctagcgcatgtagttgctaggatatctcggtccttatctgaatgtagcatttgtgtgtccaacgcacccgccattatgctggacattatgtatttcgaatgctaaatttaataaagttatcatttcatcaaaaaaaattatgctcccgaactttaatatctactaaatcatacctcgtgaattttaacatgtaccaaattgtgcccttaaatttt

SEQ ID NO: 393333 - DNA, 844 bp, Cannabis indica
tgtaaatgcccatccactagtggggcattagtagatcatgattattgtttgtttgggtggtccgttgcatctgatcggtcttgacgtatttctgcaagtgtgggttattctttctaattaagaatttggtttccctcttcagattgttacactcattcgtgtcgttactgtagcctgcgtgaaaacgacataacttagacgtatctcttttacatacgtcattcttcatgggagcagattttctatacgggaccatagaatgagttgtcgtgtatattatctctatgtcgtcagttaatacggtgagggcattgaactttgaggcatactctctaagggtatgttcaatatgacctgtgaactttcccttttttccattgccttgtctgccattgttattggacctttttttggtcatagttgagctgctagggtgttgagtactctaagcagctgctcctgtcgaggagatatgtggctggctcttcttatgtcttacggtgtccactcaccaaactgcctctttgagcttaataaatccatctactcattctagaaatagtaccatagaccgcacggggccacatcttttgatgtccttccacagctccccgagtggctcgatgcccccctgtatggcggccagccttgcctcctctgtcaaccccgtgacccttgtagcctctatcataaacctgctgatgtaggccgtgagaggttctcctggtacttattttacctcgacatggtcttctagatggaaggggagttgacgggaagaggagaactcttcatggaattctgaggaaaaggctttccacgaattaaatctccctggtggtag

SEQ ID NO: 393334 - DNA, 1432 bp, Cannabis indica
attccataattcaaaacactaagaaaagaggattaaaactacctcaagatcttccccaaagcttgattccactacaaactcattcttccccaaatcacttctaaaataataaaaaaaaaatcttacaattaaataaaatttctaaatagggtttgagagagagaggatcggtggtgggttcataaaccaaaaaatagtttttcatttcatacttaatcaaataatagattttacaagaaatggtaaaaggtggccaaaagaccattttgcctttatggcataaaaatcacataatatcaactaagggcatttctgtccttacaaaatttttacacatatatttagatattcccatatatattatgttattccataatcacacaataaaataattttgaaccccaaacccggttcgagcttaaaatacccgattatgattttaccgcgctaacttgtaaaaaaatcatctgtagtaagataatatgaatatattatgtaataatatgaatatataatgtaataatatagtccattagcataatatataacaaaattataattttaccattcttaggtcaaaattacaaaaatgccccctcataaataaggtcttaaatgcaataaatcatatataattttacataattaattatctaataatataattactcatttatacttaattaattcaattagagttgcaaatctatttactaatcttaggatattacagctttgacctatccattttcccgtggataagatattgcagcaaaactattttctattctgtgctttgaataaaatttggtgaacatatggctgtcaaattatgtaccattatccgaaactattttttggggagccctatcaacaaatgatgtttttaccacaaaattaaggactttttttggaagtgatagtggctaatggcttgaattctgtccatttagtgaagtagtccaatgtaagaactgcatattggacattgtcttttccctttgatagttggtcgatagaatcaattccccaaatagcaaacaaccaagggtttttcatttgggttaactcgttgggtggagctcgaggtatttaagaaaactattagtatttgtcacattttttacataggaatgagagtcttccatcatggtcagccaaaagtatccttgtcttgagatcattttggataaactttgcccccagaatgattcccataaaatcatgtatggatttcaaagagaagtcgtgaggcttcatctttgttaacacatctcaaaagaggtaaggaaaacctacgcccatagattacccatctaagatcagataccgagagcttttcaaattagcttactagcttcatttctattgttaggtatgttggaatttattttaccaggatcttagatctactcacaagtatgttgtttaa

SEQ ID NO: 393335 - DNA, 784 bp, Cannabis indica
aagggctggttccgccactgggtcacatattagtattggtataaatttaatataaatctcacattaattaaattatattgtatgtgtaagcacgtatcatttatcataataatgttaaaatagatataagaaaaatgttaaagaaatagtaatatataatactcaacataataaaatattaaatctcaaatattttaatttaataacaatataaattactgttaactatttgtaaaacaacacgaatagtgcctaagagcattactaatgcataatagcataaaaggtgtttggtagcaagtgattggaaaggaaaggaaattaatttgggataagttgatgaatatttcttttttggtatccattaatcaaaaaaaatttcaaattatattttattaaaatgtacccacttttgtgagtgatatctaatatacattgaccctccacttaagtctaacacataatttatattaacttaagaggtataatgggatatcatttatgcaagctgtttaaatttagagtcagtgctaacttaataaataatatatatttttataaaacaaaatttttgattggttgttagtgtcactaatagagatcatgtttattaataaatattaataactttattaaaattaaataagagagaacttgattaaataaaagagaagagaaaaggaatattttcccatcaattttttaaagaatgctattaaggataatacattttatttatttttattttattttttcgtattaaatagagtaaatactattttgg

SEQ ID NO: 393336 - DNA, 1978 bp, Cannabis indica
ctcctccatggctgtcaattcctccatttcttcacattcatcttgcaccaaaataatttgcaactcagaagacttacatgatgtccccttgtccaaggtccatcacacttgaagcaaactcctctagctcttttctcttacacctctgtctctgttaaccttcgataccctttgcctatctccaaatctcttctctggttgttgggagttgatgcacgataggtgctattttgggaagaaggacttttattaattgacccactcagcccatcaaaattgctttgagtgagcccagttgggttaaatgaagaatttctaattgggcttacccctttacgcggcccactaccaaaagcccgaaccaccttacgattggcttccactatctcagccaactccatagtcttctccaacccaactggttcaaggagacggagtgtcccctgtatctccgaattcaagcccttcatgaatgtcgactacaacagtggctcagccaccgtacgcagcgacatcgtcaacacctcgaactgctgctggtactcctgtaccgtggtggtctactgcagcgccagaaaacggttgtacgttcttccctcgtgcgcaggaaggaatcgccggagaaggagaaccttcagctcgcctcagctccgtatctcacggcgatggttctcccatcgaaaccaacgaagccccggtccctccaaacacagaaccgcaacctccagttgctcttccgccgtgagtcgctgcaacccgaagtatcgctccgcccaatacgtcctgtcgtcggggtccgaaccagtaaacagtggcaattcaatattcctcggacaaaattcggattgtctccccccatatccgccagcctcctctcgactctgatttcctgatctgctagacccgatcggaggatgaacggacctcccaattggacttcgtggcccatcagtaagctccgtcgccattctcgcctgcccccggagaagcaaatccaacttctcactgataacggcaatgccgcgttcatgagattccaccttctccttcatcgaatcccaatccccatgaattggtgactgtgattcctcttcacccgattgaacagactccaccaccatctttgagcttctcgtgttcgtcatttcctccccggattacctgctttgataccaaattgatataacctgctgccccaattactcaataacagattataaacggtagaaatgggaagaaacatcatagtgagtattattgaattgaaggaaaaaggattacaagatagagcctataggactcttactacagagagagaaatctcaaaccagcataaaccccataaacctctcaatagtgctataacaacttgcaatctcactcacaattacaaccatacccttaaacagtaaatgaccaaactacccttgagcagtagcattcttacatctcttagcataagtaaaacgcaccttggtcctaacaatattagaacttcttacccccctcaagaggggcagtatgttatttaaggatattttgttgatgtgagaagtcaaaattatagaagggagtggattggtaaaggcatctgtatgagctgaagtgtgccatttactggtatgagtctgatcatggaatcttcgattttgtctccgatgaagtgacaatcaatgtgacgacccgagtcttaggtcgtgacagatatgtaatatatccataacttaggtggtcaaatatcaaactttgacccttgtaggaagataaagtttataaatgatcctttaatttatattacaaaatacctattgaaaattttagtgaattaagtcctatatctataagaaaatatttggaataaaatcaggaccactcttcaatataaaagagcaataatatccctacagttatgtagtcagtaaatagatagatttatcaagtcaataaaatacataaataatatctagcatccatcatt

SEQ ID NO: 393337 - DNA, 384 bp, Cannabis indica
ggtcatgaatcacaaatatatttactatttaacaactttagactattaattttacatttattttttacgtaaacttttaaagttgggctatattatagttttttaccaaaagtatatgagtatgactgattgtgcacatgtgatgaaaatttatataattgggccggcacaaaacccaaaatatgtaacttttataattacaaatgggccaaacaaataagtagggtgagaagaaaaagaaaagataggcaccctttgggaccacaaagctaagctctacacctcataatttattattattattattacccctaaatttctaaagtcgttaaaaatacctcataaactattgagattgttagatttaaagacttttttctaatt

SEQ ID NO: 393338 - DNA, 554 bp, Cannabis indica
ttaacaggtgatcttgattcataatacatcctaataactcaaattcatcaatagttataataactcaaatcttaattcaatatgaaatatgaaatagtgcgaattaatatattgtaggtatttattattttttcacatcaccagtcaattttatctttttacaaacttgaatcttcattaaataggtcaagaaaagaagctaatttgttcaaaaggaaagtaaagaatcattctaaaccaactcattatctagccttaaatctaatttggctaagttatgagcaataacattatgctctctaccaatataagcaactctaagtccaaaattaaaagataatgagttcttaatacaaaccaacaaatcatctaagattctacggttccaattataatttaaaatcaaaatatttgtttaaagttgtccaacaaaaaaataaaataaggacttttgttttatatccctaacaataaagtgttagactttttatttgggcttacattaacttttattgattttattaaaatttgggttgattggatagttctttgct

SEQ ID NO: 393339 - DNA, 595 bp, Cannabis indica
ttgaaagaatgaagtaattttttggatattcatttactatcttttttttttacttattattattttatgagattttttaaatgaaaatgacaaatcatatgcccttttaaaaatatacattttatttgttttttagtagtcttcaatttttaaaaacacattttttgtcaactacaaaacatgatcagatcatgtggataaaaagttacatcttgatatagatttaataagtgaacaaaaaatggcatgattaaaggccctcgtgtgattacttagttctggtcacgatgagcatcaggtccaggttctcataacaggccatgaggcccatgactagcattgggctggatgtaacaccggatttgccttggcccaaattccattttaaaggttaactaggcctggcccagtctttaagtgtttggatttagccttcgatttcgggcttgagccgattttttagtaggcctgagcattcgatctaatacaaataccaacatagatctaggctaactcatatctctcaaaacactgtcctaagtagggtattcatagccgattcaatccaatccgcacgatccaatctaatccaatc

SEQ ID NO: 393340 - DNA, 1558 bp, Cannabis indica
tcaagtgggatgattctgagactgtgtaggtatgggactacacagttgaagagagcttaaatggattgattggtactacctatatcaacaaggtgcatctgtttttcggtagcccatctcgaaagaactccacagttaagcgtgcttgacctggagcaatttcaggatgggtgacctcctgggaagttttcacagaaagcgtgcgagtgaggacaaagcacgctggaaactcgtgttggtctgtagggtcagtcatcaatctaggaagcagttagagtggcatactcgtgtataagagccattcattctgtgggtatgaggacccaataaagacttgaagcgaggacgttacatttcagcatctgagttttttagtttattttgttatgatagtataaattgtagttaattaaaaaaaaaacaattatgcatgtaacaaatattcaaattttatttttaacgatgtaaactactcagaattttataaaaattacaggtggtcttatataattactataaaattataaaaaaaatattagactaattaattttttcctaaatgtctaaatagaaaaatatactaaaacatacttttagtagggtatactatgtacttcccctaacatatatgccatctttctttgttttcataaaagtcaaccaagcatgtaaaaagagagacctcatagcttattaagaaaatttatagtacacttttttaaaagaatgctttgttattcttttgttcttttatgcatttaagagagttttttaatctagaagattacttaccttatagttatttaaaataatatgtaaattttaacaatgcaaatttaagtggatccacttcaaattaatgtgttatcacatttcgctatcaattagaaatagctaggcattttcaagtgaaaatgactattattgaaaactaagttacattaaccacttaaagctagctcaagtggccatagggggtacgtgtgtattggaagttctggattcgagtcccaaattatattgatgtaatatataaacgcttaaatcaaaaaaaaaaaaacaaagttacattaataacccaagggaaggataactcttttgtagctgtgctacctcagctgccacgtcaccgccaccaccactactaccaccgctgtccagtttgcagtggcgacccaaccaaactttaaataagggtgttatttataaacttcaaatttaaaaggggcttatatgttattttccatgagttttgaagaatattataataattctttaataatattttaagtaactctataaaacttgaggtgggttttgagtttctactactttatcatgtttccttgtcactatttctataactagtactatttatgttatgttttaggtcatgaccaggactcaaaaatatatatactaaatataaatatgatataattaagtaatgtgccataaaatataatttaaacacaacaagttaataacccgattgcatttacatacttttaacatggtactaggtgattgttacgtgccaagccacgtagtgttagtt

SEQ ID NO: 393341 - DNA, 672 bp, Cannabis indica
tattattatatattatataatattacgatcgatcaacttgaaagacacgaatatatatatatatggatggatctatacactacaagaaatgtcaattttgccagcatatttttgtgctggcaaaagttggtattgggctggtaaaatagaatttacttgtgatgtgttggcaaaagggagttggcaaatcaatgttggtattagaacttttaccagcataaaatgaaaagtgttggtaaaaatgacttttcctagcgcgtaaatgtgctgttaaaagttagattttagccattgcaaatgtacgctgataaaattttgacctctttgtcagtgcagtttgcgaaataagctggtaaaaataacatttcttgtgtgataggatgaggatcatatgataaggagaatgagaatgaggatccatgcatatacagaagaatgaatattattgtaccttatttgacaccttaagaatgaggatattttgccaaaatcactataatattattgtacaattatattgataagtcattaataaattatagctcatatatataatattgattttgtttgttagttggacgtgtttattaaagagtattgctattaggtattaatggtgcctagcattttcttgacatgtcgcgttgtgattggctagcgatactaccacta

SEQ ID NO: 393342 - DNA, 1289 bp, Cannabis indica
accccaaagaaacccaagcacatatcaaagtctttcaacccaaattttcaaggattttagtaagagttaagcaaggaatttcttagaagaattaaaggtaatcctagttctttttcctctttgaattttaaggtttaagctttattttgattatttgattttgagaacttgggagtttagttctgtttgagtttaaattatgttaaaaactattttaaagcttaattttagttattcatggcaatttttagatgtagtagcagttgtagcaagatttaaggaagtttgacttttatgaactcaagcattcctcatccatggtggattttaaagcatgttgttttagatgcttttgagttgtggattatctttagaatatccaaaattattgttctaaaaattttggtagcttttggttaaggtgggagctagatttagggtcctaaaaatgggaaattttttagcccttccagcctagaaaaatgttccaaatggaagcttctgaacaaaatccttctagacaagggacttttagataagggtcttgaatacgggacttccagaaaaagttcttccagagaaggggcttccagataagggtcttccggacagggggcttctagttagggttttaccaagaaggtcaattttagtattttggccaagatattctactcgggtgtccatataataggttctttatatcattttagagcttgtgaaaagctctataggatagtactttaattagatccaaaataagtagtttattttaggatgttttcaccatatagttcggtaaaaaactctagattctattaaggttttaagaagtgctttagaatagacacttattagttttttgctactgtgacttagggcctctgatcgtctattaggctaaaattagtctaagtttcgggtcatattttcggttagttttcactctttgtttctagttttatggctattttacgcttgattcttttatttcaggtccttgggtgtttaaagaaagtatgtacaagaattgaggacgcgtggtgaaagaatcgagaagaaaaaccaaatattgtgtcgctgcctgttccagtcgcgacgggaactggcagaaactttttcaagaattcgatgcttaaccccgacgcgacgggggcattgccagtcgcgacggggacccagagacgggatttttgggtagtttcgtaatttcacgaattttaaagatgagacttggtttaaatagagggagctcgtgaaaattagggatcattcagatttggagccct

SEQ ID NO: 393343 - DNA, 694 bp, Cannabis indica
ccctttcttcaccaacccactttccaactttttagctttccatattattattattattattattatattataatatgtaaacacaaagtttaattaattaattaattaatttctttaattgagataaatgtacactcagatatacgaaaaccccctcttctttctctgaagagcttacaaaacttttggtattttcacttttatttattttttttagggaagggatgcccttaagcgagaaggagagcctcaagattacaggagttatcaccaatccaaatagcagtttcatctagctccagaaataattgtgccagattgtgagcaaatgtatttgttgaacgattaacataatggattgtggcattggggaggtgagacaaaaccgtctgaatttgcttgataaggtctccaaagagggagatgtcttctttactggcagataacgtgtttgtgatccttttgcagtccgtttctatttgatgaataggagaagattcacgaggggagcactttgaggatggattttgcttcgagagttgcaacttctcctcctcctttatatgggaaagcaattgctgcaacaactccacttttactgttacgaattacaccgtcgaaacctactgaaagtatttatagacaaaaaaaattaaataaattgaataaatagaatgaatgaattataataatt

SEQ ID NO: 393344 - DNA, 1874 bp, Cannabis indica
gggtaatattgtataataagcaggaggtgaagaagcctcttattatatataagatactaaagatttttttttattatttttttttttgtaatttaaatatataacataattaattcgtgtattgtatagtccgcccatgctttagtctcaattgtattgttatttattacccatatttgtctccattattccacgtgtctctcatactcatcataattaatagtcgtaattaataacaagataagatgaatgatagccatgtaatatttaatagagaaatgctaaagggcattcgtggtgcctaacattctcctatgtgttaatattgttattgatccaactaagtatcgggtcctatataatttaatataataacttttagggagtattgctagccaatcacaacgagacatgtcgagggtactaagcaccactgatgccttataacaatactctatttaatagcattgttatcgttattatgtattagtatagtgtttaatatttttttattaggtaacgtcttataattggttagcaatattttttaaaaattattttattaagttatataaaactcaatacttgggattgattcccattattaaaattttggtaataggaaaaactatgcgatccatacaaatggagaaaacaaagaaaaaagttctcctccaattttataaggaatatttttctctttccttaacttactctataatagttatatttatgctcttcaaaaatatataaataaaaataattatatgttctaacaatagcaattcagtcaaattaagtcagtccgattaccttttgtgattatgtaaataaaataaaatgattttgatttccatttcggtcaatttagtaaacaacaaaataaaatattgttttcgattattttatattttaacctaatttatttcttctattaattattcggattctaattatagtttagtaaacgtgtcataatagttgtatgatatcaagaagaatgttaaatactaataatattttttaataattctcaatatttaaataagagtaaattagcaaaatcttcgataactttagtttgctaacaaaatttaaattttaacgctaaaactccattatttgccggatagaccaagtgttagggcaaccctttattgccatctcacttaaaatgtaattatgtggtattttcaaaactaaaatatgagtaaaaaaattttgtttagttaaaattttttaaaacaaattaaaactaaacaaaacaaaaattaaaaggcctcattaaatatttcttcttctctctcacctaaccctaactccctctagcaccacacgaaaagagccaaagccaactcattgtccaaattcaaatattaataaatgaaaagaaaaaagcttcaaactcaaatagaataatgtacacggaatctactaaaattcaaatattcactctgatataattaatataaaattcttaaagtcttatgtaggcacttcatttaatattatttttctatataaaatgtatatatatattttaaattttacattttatatactttaattttaagacaaagaaatacaaaaaactttaaggacagcttaaattagtatatgatttagaattgttttattattttttaaacttataatattggggtcaggtaaattttagcggtaaaactttctaaattattgaactcttaacaaatttaatgtgtcatctctaacatagacggcttatgtacacttttatacaagtgacatgtttatattaatacatctaatattattattttaaaatttattttgaaattaaagaaaattataaaaataaaaaaaaatatatatattataatttttaaataata

SEQ ID NO: 393345 - DNA, 828 bp, Cannabis indica
gataactctatgaaaataaaattatttagcttttttgtatttaaataatttttgtttttttttgaagaatgcatttaaataattttgttctcaaacttttagtaaatttagtgacttttaattattttttttagtttttaataaatattaatcttgacattatttagtttcttatctataattattaatcttaatttttttgtacttttaggagcataagtataaatattaacattaaaagagatcaaagaacaatttatgcctattcacccaaagtccaaattgattagtagttattttaatgagaaaattatattgtatacctattttattttatttattttaatttttatattatttaaaatatatctacttttatagatgatactcccattatactccttaggctaatgtaaattatgtattagacttcagtggagggtgagggtatattgggcaacccactaggaaaagtgggtatatattaatgaaatataatatgagagtatttttgattaacagatatataaaagaggtattcctcaacttatccttatttaaattagacacatttctaattagattgggctcatatctaatgggctttatttgtttaaatcaaaagagagaagaaaaaaaagagataaaagatgctgagctttaaaaaagggaattgacaaagggaaatttgaaaaactatactttaaaaaccttaatattttattcttaaaccaatacatttcaaactaaaaaatatatgacacttttatctaaaacccaaaaatacccctctcataactcaaccccattttttcccaacccgcacat

SEQ ID NO: 393346 - DNA, 1184 bp, Cannabis indica
tatttgattcttgttattgtgaagacaacgacaacaataaaaacataaatacacacttagaaaccgacgaaagggaggattgttgagattattgatgagcctagttactatttcggttgacaaaagaagttattactattgaatttgtcacactgattttgagtagaatagctcttagtaaagttgaaatgatcagaaaaataaaaagtacaattaaatactgttgtttcacatacacttagaataatgtgtcaggaagataacaatgcatggcaaaattttagttgaaaatttaagaactctttgtttagttgggtataaaagttttgtgctgaaagattatttggcaaagctagactaatagtcatgttatccatcatttctatgtttatgatcaaaaattaatgtatacatgctatttatttcaattttatcaagtagtttcttttatagtatgaatcatatcgatcttatttaaattgtgtacatatagtattaatgtctcacacatatatcaatgtgggactttctcacattgataacatttttactaaaattgattgggtttttattttattaaacaaattaataaattcttatttaatatagtttgttctcggggaaaatcaagaagcagcctattatttcactgttaagcatgatctcttttgaactattaaaattgctagatttaaagacttctgtctacttttattaatagaatcttaatatgaatgaaagttcaaggaacaaaattaagttaatgtcaaagttcaagagatacgatttgatacatattcaaattcaggagacacaacttaatacatattaaagttcaaagagtaaaaattttaattagcctaaatttatacaggccaaagtgagaagaggatagtataaatggagtggaatagagaagagagcattaaagcaaaaaagaagttcatagcaaatgacataatgggtgtaaagaaatttgcattaaagctctatatcgaccccactcttgaagttgaaggtatctcaaaattgatatcaacaactgaggttaattatttatctttttttgtcaaactcaatcctaattaaattttgtttccatgtatacatatcatttaatttagggcattttacaattttgtatacattattttaattaattacaaaatatgtgcaaaaaaaac

SEQ ID NO: 393347 - DNA, 961 bp, Cannabis indica
tataaaacttctttatttatccaaatttttctaaacaactcataaaaaatccatatttataaaaaataccctattttaattgcatctaacgtttctcctctgcacattcagcactatccttccctttctatttatctttttctctttcttctttctctttttcacttaaaaattatttctggtcacatcattattcggttgaacttaaaaatatactcataatgtataaaaaaaatgcacacaaatgtgcaattgaatgtttaaattctatttttagtatcataaattatttgaaatttttaaaaaaaattagtgaaatatctaatatatctaccatgtatattgttatatgtatgaaaaaaaataagtttataatttctctaaatgcaaaaaataattaggcattaggcaaaaataacacaactattataatttttatattttatatagagaaaattatccttaatatgtgatttaaaagctttttacttgacagatttaactttgtctggtatttaatttttttttagctttttttatggtctagatttatcatattattgtaaatgtcttcctaaatatcatgtttaatattttaaagattctttctcgatgatgaagattgtaataacatcattacgactcaatggaatatgacttgaccatgtgtgaattctcattgtatcaaagagaaaattagcaatgttggctctggtcttccccattggaatacgaaaaagaagaattgaaattgatgctaagtctagaaacaaaattaaagacctctcaaattctaatgatcctagcctttggtccaagatcaaggaggaggggaaaatattaaattgtctcattgaaaaataagagatcctttggagacaacaaagtagagccctttggctcaaagggaggataaaaatactaaattttttcatcgcaaagcatctgttagaaaaaatag

SEQ ID NO: 393348 - DNA, 646 bp, Cannabis indica
ctttaaaaagattactatgtgatttgtcataatgtcaaattaatgtacttctttctcctcatgatttatattcatgtttcatatattccttgaaggattaatcaaatttcgtaacactacttatttgtcagtacttccatactaatagggtacactaaatttataatttaaatttattgtttcatttctattattgggatggactgtttgtataatatattttgcctatgaagagcgaataacgaaaaaggaaataaagaaagaaagaaagaagaagacagagaagaagagtttgtgtgctgaattagagaaattttaaaattaagaagcttagcatatatattattaatatttaggatcaataataatataaacagtgataagaaatagtagcaaaatttttagatcgaaagtgtcatctatctcagtcatttcttaatactacaagcattcattatcattacgtacgtattaatgagttcatgatgactcaaccaaatcatacatacccatatacatgccaatgaaatgataatctaaaaatattatgtctgccttggaaaatctttgtttaataattgaaattgttaggctatttttagcctaagtttcgggtctcattttatagttgtttttcttctttatt

SEQ ID NO: 393349 - DNA, 903 bp, Cannabis indica
cttcaaggtatcccccagtttccacatgttgtctttcctgagcgtactgagggttcctttaggctgcttcttgccccctggtttgtgggtcttcaggtatacctcgtggttctctttctccagggtcaggttgattttgggagctattcccttgtgccgccctagctgcagctgcctcacgttctaattcagcattatgccagtttacctcctccaattgatgtctgagatggcggttttctaattcgacaattggtatgtactttgttagatcacaggcaccatcctcatccactagattaggaagagaccggtcattgctcatcttaggctcctcaagtttggttcccggattctgggttcttattgaacttgttggctgttcaaatgataagtcgatagatccctgtggactcattggctcttttccaggacgatgaatggttccgtcgtgaggattattttcttcggtgtcaaacataaagaggattattatcttattttttttttatgtaaggagggttttttctgagctttttcacgaaggctctcaatgaaagtaccaaactgttaacgcagatttttgttaacctgatatgagcctaaacaacgataaacttgcacagaaaaataaaacagtaaagaaaaggtatgaacacaaaggtatttttacgtggttttgcagttaaattctacatagtccacgagtcaatcttattagatttctgatattgttctagagtcctttttcttatgaattttttatccatttttcagtctacttgcctctattataattgcatagtcaggcagttaattacagggttgactgaaatctttacaacgattatcccctgaaatcgtggggtctgattacatatcacgtaaaataaactgcagtta

SEQ ID NO: 393350 - DNA, 540 bp, Cannabis indica
attcttagtgggactttaattaacttaatagctcatttaaaaatgttaatagtagtattcatatactttgtcagctaaaattaaacattatactaagtgaactatgagaattgtgggtgatgcccaattctcaaagtatattagtaagtactttgaaattaatgaactagtattttaatgaactagtagttcaagggaggagcgtccccttgtgcgctttagtgtttttctggtttaatgaaatttccctttgagcaaaaaaaaaaaaatactttgaaattaatattttttttttaataaaagaatatatgaatataaaataattaagaggttaaattaatatacgtttgatattttgaatgaggtggcaaaatataatagaacagggatggacacgaatatagggatagatgattttttttttcttcgtaaattacaatcttttattacaattttttagacaaccccctcactcaaaatcacatgcgagaatattatttaattttttatagtggtatttgttgttagtttttttttttt

SEQ ID NO: 393351 - DNA, 543 bp, Cannabis indica
atattattattctttgataatatatttttttttattatgctatgtataatactagtatataattttgtttgcataatacaaatattttaatgtatgtatataattttagaataattctatagtgatgactatatctttgtttctatatacatataattttttaaccatttatctatatgacttttcaaagtgaacattgtgtaacatgtatttgtctgtaagttactaaaatttttattttgaaaaaaaaaataacaactaatcaaatttaactttatatttttttttctttaacaaaaccaatttttaatcatcatcatcttatataaccaatttttaatcatcatcatcttatatagccaattttttccattccccctttttcatcatcagcatcaccttcaaaattcaaatcagtgccctttttccattctccctcatccttatagccttctaacatctatatatttatataattctattgttaggattagtgatgtggcatgatatatgggcttttttttttttgaatggaaatttcat

SEQ ID NO: 393352 - DNA, 900 bp, Cannabis indica
caaaaaatatataataaacataatatatattatattatctataaaaactatttacaaattttttttatatacactgtaaaaaaatctattcaattgtatataaaaaatatatacagtttatatacataaaaaaaatcctaaaattaatgtataacacaaatttaaattacacactaaaattgaaaaccctaaaaatgaaaacgatacccgattcgacacaaaataaagatttcaatacccgggtgctccccaatttaaaatcaaatctaaacacaaattgtaatacattacaattttaaattaataatcacttactaatacaaaagtaatacaaatatagtcaaaaatataaaataatacaatcaaaaaatcataccggtgagatgagaagtggtggaacggtggcgaaacgaagttgggaatctacttgaacggtggtggacggtggtcgacagtggtggacggtggtgatgggtggtggatgatatgaagagaaagagggatatgatatgaaaaaattgggagaaatgggaaaatggggatctacttgctgcatttttttttataggcaaaacaataccggcggggacccgccggtattaaaattcccaccggtattaatgttattagcggcggacccctgccggtattggtccgccgctaatgcgttttgaatggcataggcgggctttttcccccactttatatcacgcatctattagcggcgggctatccgccggtattaataaatgtccgccgctaattataacttttatatttatttttttacaataaattaaaaatccctattaatactggcgggcccccacatccgtcggtattaccctataattaggggcggatgtggcccgcctgttagacttttatttgggcttacat

SEQ ID NO: 393353 - DNA, 740 bp, Cannabis indica
agagtaagttgtatgttagcttcaccgtgagtgggtatccactttcaatgtcaaccagtctcttgcggatgtggtatatgagatgttgttaccatcttcttctcttattaagttgtactcatagcatactctgggacagccatgtacacacccagctcttcattgtccaaatgttttgataagacaggaggttgagccaattctttcttcagctctaggaatgctttttcacactcccttgtccactcaatttttttttatttcttctaagtatgttgaagaagggcatacatttttcaatggatttggacacaaatatgcttaatgtagctatacatcatgtcaagatttgtacttctttgattgttatgggtgacttcatatccaaaagggcttggatcttatctaggtttgcttctattctcctagcattgactatgaagccgatgaattttcccgagcctacttcaaatgaacatttgatggggttgagtttcatgttgtactctcaaaggatcttaaagcattcatctatatcctccacatgcacttagccttttggacttgactagcctgtcgtgcagtacacctccacattgcggcataggtggccccttcattttttagcccaaagggcatgaccttgtagtagtataggcctgggtctatcatgaagttagtatgttcttgatctggcaagagcatctttatttggttgtaaaactcatttcatataatca

SEQ ID NO: 393354 - DNA, 1214 bp, Cannabis indica
atgcttagtgattaatttgacagcatgataattgtttgaatctcttattccttccttgcttatatactacacatcgactttatttctagaagtctagtagaaataaaaaaaaccataaagatttatcatgaattaggacaacataacaccatgaaaagttcatatttttctccttgattatatatcacatattgacttatttcctaaagtttagtgaaatcaaagagaaatatagaaattatgataaaaattgattacataagaatgttagtcttttctttccccttttgattatatataacatcaacttattttttgaagtctaatgaatcaaaagggtttagaatgactcttaaattgacgttaaaaaaataaaaataaaaaaagaatcggacgttgatccattcatagatcttcacttacccttgtaaagatttgaagaaagaccttcaatatgcagttttttctcttctttttctcagatactttctctctctcccttttttttttttgcttcactcttacgtagcaattttttgccaataattttcaaactctttaattgttctgcccctatctctttatagcctcctttttattattattatcattattttgttgataaaatccacttaacgtgaaagtggtggaagtggagaaaagatctccttcatttgttctttttttttacaaactcattcctacttgttttttttattattattattttaataatcaataattccctttaggttttaacggaaaaaaatattcatatactaaaataataataataataataatgataatcattattgtagtggccaaaaattgctctaagcccaacgatcgaagtacttacaaaacccacttataagtcagaaacaaggaacccgtaagcccaatggctcacatgggccacgcccaatccatgcctttcgggtcatacccatatttgaatgtccaacccacaataaagcttgatcttaaagtgtaatattggggttgaaacgtggaggaagaagaacgttaagtttcccaacaaacccagaaaaatagcaatcctccctagcatagcggagcaagaatatcgaccctctaagtgatgcgttgatgtgaggacgctcatccaagaacgaacctaaaagatgacgctcatccctagagaagtggaggaagacatttctctagggatggactgttgggttttatgc

SEQ ID NO: 393355 - DNA, 871 bp, Cannabis indica
tcttttctttttaatttatttcttttttatgagctgggaattgggagaaaccctcagccccctccctcactggcttcgctctcccactagtcgcccacgccacgaacctttgtgctgcaaggctcactcaccttattagggctttgactttatttatttttagctaattaggatttttgttcccaaattttgacatgtagtaaattatgctacatgtacttttgagattgttaacaattttttataaattattaagattgttagacttaaagatatttgtccaattttagtaagaaaagtctaacatgaatcaaagttcaggagacatgatttggtacatgtcaaagtttgaggggcatgatttggtagatattaaagtctatggagcataatttagtacatagacaatcacaaaattagtaaaattgaatgaaattagacaaaaattcttaaatctaaccatctccataggggaatttttaacggtcagattaattcaagggtataatttgatacttattaaagttcaatgagtaaaaattctaatcagcctttattttttaaaatttaagataaaatgatttttttgaaggatttggtaagataaaaatatttgtggcataaatactatgtgctttcagtttcatacacatatttttttagatagtatatgctatgtttttgttgcaacttttaatttcaaactcgttaagtctagttatgtaacgccttaataaaatgcacactactatcaaccaataaacataacctaatcctactaaaccgggattactaaaaataagagcggggatctaaatcttaaatcaagtataaagtgaaaatataacttgtaactatttaatttacaaac

SEQ ID NO: 393356 - DNA, 608 bp, Cannabis indica
gtctctcttccccccctccctctctctctctctctctctcaaacattctctcaagagctttgatctctgtttatataccgaatggcgagacagaaggctctcatcgccctcgttcattcctctttctatgttcctctcatctcttttccatctctgcttcgttctaatctctgcttgtgatcccgagattgaagactcctccattcgttataatcacgagtgagctacctcaaaggatctaatcttcactcgtgacaatatcaaaggctcctcctccgttcgtcaagctcccagtcatgtgagctaccttaaagcttcgacgatgacagtaagttatttttcttctctcactcttttgatctctctctatcgcgcactctctttcgatctctctatatatatatcgatcggtctccctatcactcaactctctctttggttttgtaatttttcttaggggcgcgataattgtggtagtgatgtgttggtgaggtggtggttcatctcaaatcttattattattgtattatattgttgttggcgttggttatgggattatatatgtcatgacccgagccctaggtcgtggcagatatgtaatatccata

SEQ ID NO: 393357 - DNA, 2417 bp, Cannabis indica
agttacatttttttttttaatttagaatggtaaattatattgtcaaaaaataaggaaaatttacaaaatacatttaaaattggacatttattcttcaattttttttatgatttatttatttattttttcacatttttacggattttattttcttataagtttttcacttattttttttttctagaaaaatattgttttcacgttgttttcccgtaatagcaacgtaaaaataatatgttttttttttgagtaaacttaaaaataatgttgatttaaaaaagaatggaaaaatatcatttcttatttttagtaaaaaaaaaaaaaaaataacgtaaaagtgtaaaaataaattataaatccgtaaaaatataattttttttattcatttttaagtatttataaatagtcccaaaataagtttcatttttgagcatgtatagtaaattataatataagaaatatgatattagtaccaaaagctaatatatataataagattttatgtcaaatattattcttaacattaaataaataaataaacaaaatctatttttgtaaggaaataaaaatagacatatttttttgataactgttaggacatcgaacactatgaatcttcacattgctatgatattgtttgctttgggcctaagccctttgatttgtttttgggcaccttcccaaaaagccttaaccaatggagttattgtctatccttatatacccatgatctttttaaattctagccaatgtgggactttggttgcacacccaataatttttccctcaaacaaaggaccacattgcctccctcaaacgatctttcatccgtgcactttatcttgagagttcttacacttttctcaggccaactcctccatacacaccgtctgtctactagagcgcatccacggatcccattgtgagattattgaggctcatctcctttgtttgacatttcgagaattcattcacatagttaattttgggatccaactctgatgtcaaatgaaagacctaagttctttagttactaagttcaagactaattattactcgattcattcattcaatttgcttcaaatgttataactataaactgatgaagctaaaacaaagatcacaatcaatttaaaagcttcccttgacactagaacaacaaccaggtttggcctccggtactatgcaggagagacgagaccaggaattaacgagccttgcttgggcttggaagaagaccttgagttggccagattcaaggaagatgtagatcgtgaatgcctaattgaagaaccatgcgctgtttactgcgatatatttgctcaacagagatgcgaattccttgaagaaccaagcgctactgactgtgatatattcccccagtagagatgcgaatcccttaaagaaccacacgctactgattgtgatgtacttgctcagcaaagacgcaaattcttgagatagatggatgaccaagggcacatccttcgatctcaccaggcagagttagatcgccgtaacagagaagccaacgatctaatgaggcagttcaaccagagaatcgatagaagaggcaaggatctcatcagagatccacttcaaggaagacttgttgataaatcagggagggtctatcgataagctgatcaacccaattcctcatgaactaggacagatcttcccttgccagagggaggacaaaattttccgtaaaggtaaaaaaccagcagcatcgggggccgaccagggatctcaggctcaacaagagccccctctatccatcttatggtcgaccaacctcagtaggagtccccatgaccagctaaactcctctagcagtccccatggccggccagataagagcactcccttgccaaggggagcgagtcacccaaagattaattttcaaccaaagaggactaggaacgggtggaaacacccaaaacaacaatttgaaaagtgaagttaatcactttagacagttggatccaccaaactccagcaatttgtgtgatctactccatgtcaacgcacaagctccaccagcttggtagagaagtgtgggtggttaggccctgcccagcttagggctggccaaccatgtactagcaccagaatcagagctagtcgaccttgaatataccttctcctaaggtatggctggccaggctttggccaatccgaggcttcagctcaatcaaagaaggtcaatcaaccaggcccctgcagcaacagatccttctgtgcaagcacagttggatcaaatacgagacatgctcaagggcctagctgatccaaaaccttcagaagtcgagctagatagggcgaagggatcaccattcttagcttggaagatgtacacgggaaaagaagaccctctagtgcacctgaagtactttaagatccaaacagatctc

SEQ ID NO: 393358 - DNA, 1420 bp, Cannabis indica
tgttaccaaacgcacccttagtttttacaaaaaaattgaatttcaatatttttttaatatctaaatgaattttttaataaaactaaataattttttaaatcgcttaattcattttaaaattttaatttatttttaattttctcaatcattcaaaacacattttttttcttgagatatacattaattttttaagatttactaaaaaaaatattgaatctttctcatttttattttggggggatacgatttgataattatcaaagtttagggaatttacaaagacatgtgagcatttaaatggaataatgggacgaaaccttacagaaagactaaatttccgtatatgtaaaagttcaaagggaattcttaacaagccgtatattttaggagccaaaatcaatattgtcaaaaattcagagggcaaaattactaattattcttagttaaatataagtaattaattttgttaaaaaaattagaaatgattaattagttaaaaattaaataaactatataactgtaaatgataactaataattcacttaattaacttataaaaagtaatttacttatgtttaaaaattagcacttatcaatcattgtttgatttgttttatttacaaaacaaatttactgaaaacaatattaatgatgtgtacaagtgagatatggtaataacattaattttaaaggctcattttggtacactgtattgtatagtattgtattgtattatgttttattgtatcagtatatttaatacaagctatgtttggtattgacttgtgttatccaaatttttgcaaaagtgacacgtagaatccattgaagaaagtcgagttaatccttagctgattagagccttctgccttggcttctataaggggcttcccgaaaggtacatccttcacaaggcaagggcacgtggaggctcggttactttttccttccgagtgcggaaagaaaggtgttccttctagactcagaagaaacttgcaaaatggtcttcctcatttacgcccatacaagtagcaaaaagattcagaatgggttttactcccatgcagtgttgcaaaaggtcatcccgtacttgtcagaccactaaagtgatgacaatgttttttttggtacaacgtaagtttttgtcccccacgttaggcaatagttcgatgcatgcacgccaccatacttgcttattgcccaacgaccattcaagagggtgatttttaaaggaaagacctttgggtgacacgtattgtacgtcgagatggtaccagtcattatctctacgcactgcatgatagagcggccacaaaccaaatcgacggtcagatctcttgtagtaagattggtcgtgaaggcatgttgtgttaggttatatgccctaaataaaactccatttcaatgtaatctattttat

SEQ ID NO: 393359 - DNA, 1345 bp, Cannabis indica
taatttagtttaaactttttttactttacttttttaatgggggttggaatttttatatcgtgtgttgtgttaaatttttactgttgttttacggttattttttagttatttcactgctgtattaatcgttcaattttattattttacgattgttttaaaaaatttaatattattgtaaaaaaaaaaatgtgttgagtccataattaacacttccttattatttttttcaaattctatataaaaaccattacttgcttgaccaaattgcttaactttttcatattgctcttcatgctttaatttttgaccatatttgctctattgatcccatatgctttaccaataattttatgctcaataaaattgaaaacttttatccaaaatccaatatttttataaaaatctcatttataatttagtattagatcctgtctaactgccatgataacaaaacgtgataataattatctaaaaattgtttttattacgaatttataatctcacaaggagacaaaataaaaatatttcctttttatagtggttgaaaagaagattggccttagaattagtgatcaaattaaggcaaatggcaataattgaagcttcatcagctttactggtttcagttcttctcctcattccattgcttattacgttaatacagaaatgtgtccaaaaacaaaacaagaaccttcctccaagccctctaaagctccctttcataggcaatttacaccagcttggttcattgcctcaccaatctttatgccaactctccaaaaaatatggctcagttatgcttcttcaccttggaaatgtgccaagtgttattatatcatctgctgaggctgcaaaacaagtcatgaagactcatgatctcagcagttgcagcagaccacaattgcatggtcctaagcaactgacatacaattttcaagacttggcattttcaccttatggaaaatattggagagagattaggaagatttgtgtccttgaggtcttcagtgtgaaaagggtaaattcataccaatcagttagagaagaggaagttactaagctcatcaactccatatctcatcactccacatcttctcctggtgctcctgttgatcttactgagaagttgtttgcttttactggtagcataattttcaggactgcttttgggacaacttttaaagataataatttttgtgatgagaaattggatgacatacttgaagaggttgtaatcttcatgggaagtttttgtgcagctgagtactttccatatgtgggatggattgttgacaagatttcgggtttagaacaaaggcgcgaaaggatttttcacaagatggat

SEQ ID NO: 393360 - DNA, 586 bp, Cannabis indica
acatgtatttataggacaaaagcaatgagtagacaaaataacagaaaacgaaaaaaacagaaaagcctaactaattccctaactaattctaatattaccacatgtacatgttaataaatttcaaatttgtttttgatattataacctataccaaaatttttcaaaactttattttcatgatattgtaactataataaacaccatttaaaaaaatattttaacatgtacttttaaatgagattgagaaagagtttataacaagaggttattattagctcttctctaaactaaattaacaaattgtaggaggttatttcagattttgggtcatttctgttaggagagataaacgtgtgaaatttgtgtatgatttacgtatgcacatatcattatgataaaatttaataattattaagttagagaatttacttggtaaattctagatctacttatttgaagctcagttatataggcccatggtccccttactagttgaaataatactacttacagacttagtcttttgattttaataattcaattataattgtaaaattagactatgtcttatttatgaattttcact

SEQ ID NO: 393361 - DNA, 669 bp, Cannabis indica
aaacctgagccaatgaaacaaccgcaataaaaccatcaacaagagcaagagcaacattaacacccaccaaaagcttcggaaaacaaaacccttcttccgtcaattcaatcatcttctcctttacagtttatgtctctgtatatatataatatatctatatctatagcctaataaagttatatatataaatgaaaaaagctggtgtttctaataatgggagacagcttgttgaattggcagtggattgggttggaaatgttggcgaagaagtaaaaatgtacggagggagaatgaaacctcgttgatggaatctttcatggcagaagaaaaagaagaagattagatcctttgggcgaaaatctgagaaaggaaaatgtcgagggtaattttggtaaataaatgaagaggacgagggtatattggtaattttaaggtattgaatgtagaagaataaggtacggtactttttgggcttgggtgtctcgcacgtgcggttgcttgcttttatacgtgtgacactcaaagtagagaagattcacgttgattcccttttcttccaccttttgatttgaccataattaattaattaattaatatatataattaatagcttttgaatgaaaaaaaaagagagaaattaatttataacactcaacaaaatatataaat

SEQ ID NO: 393362 - DNA, 2584 bp, Cannabis indica
tatatatatatataaaaaaagtgggtgtggcttgggatgtattaccaccttatcttaactctcatatgatattatctgttaattgattattatattgagggtttctttcacatattacaaatgcaatactatgatactttgggtaagtcctcgcagatgtgtttttaggcatcttccccaaaagactcatactaatagaataagtggaatacatatgtttaagcagggccggtcctgaaaaaaagtgggccacaagaaatttttttttgggtccttatgttagataaaatgtggtatttttcaaaatcagtaaaaaaaatatataagaggaaaaagaaattttgggcccctgggctgagtgggccctaggcacaggcctagcccgcctatgcccagggccgggcctgtgttcaagtcaacttttgcttatttttttcgatatgagacttgagttgatactatacatattcatatataaaaagagtaatgctagatacatacccaaattgtatactctttttacacagtagttatgtgtataataaattttattagtcatttatatttttaagtgagactatattatttttaattgtatgattgagattaattgcagattattgtacgtataaagtatgtgcaatttgagtatctaaatccctaaagagaaacaattattcttaagaaattagtttaggtatatatttatttgggacctccaacacaaaggcatgctgaggatattttcgtttatgcatcgattgttgttgactccatctggtgaaaccgcaatgacaaggtacacaataatagtccagttgatgtggaaaagagtattgactctattcgtacttcttttgcagattagcatagttctttattcccttttcaggctccgagcttggtggatggctggcctcctccaccttaggattggcgattaaactgaattgtgatgttaaggtgggattggaaagcatgtgtacaacagtggtagctaggaatcatcttggcagggtggtttgagttcaaacaactgttggacttttctgatgcgttgtgtggggaagcggcgacctactgctcgactctggtgactgctaagaaacacgagtccaagtttattattgtggagagtgactcgaaggtagttatcaatgctttcaatgggaaggagtctcattgggcacttgagaactatgtctcattttgtaatcgatcaatctcccttatttgttagttgtattctgaatagttaacaataccgaaaataaggtttaaacagttacttataaaatgtctaagaaaaagcaatcgtaggtatgacaaaatatatacattttacttttagtatggtatattattaagaattttttaaaaatttacaagtactcttaaataactataatatatatacaattatgaaaataaaattagactaaaaaattctattgggtgttgaaataaataaagagcctaccgaaatactattttaaaagatgtactctaactatatataggtagctttggtttttgtgtcctaattaggcgatgatatcatgtattttagtaggttaatttggtggtttctaattataagttacaataaagttcattttatgtactttttatttttttggtacgtggaaattcattttaagtacttatatgtaagtcttttaatgataacataacatcaatattgttgaatagtgcaatcatcaatttatatatgatttttatactatgtattgaattttttaatttttttacttttttattgtggagtgattttttttttttaaaaaaatagtgtgtactgtgttaagtttttactgttgtttcatagttattttttagttgtcctattgttgttttaattattttgttttgttattttacagttatttcataaaaagacattatttttgtaaaaaaattcgtgtgacaataaaattataaatttttattcgaaattcaatatttttataaaaactctatttatatatgagaattgtaaggtaaaataggatgacatctcctaaaagaaaacaaaaaatatttgaagaacatcaaacacatttgaattcagtttttattaatctaaccaaataaataaataaatataaaaaaatcaagattaatttcttttatgggataaattaaatttctcccttgaaaaatattttctaccaattattaaaattaatttacggcataaatgtttaagtttaactctctattgcagataaatacctaagttatatttttagaactttcgtaggtactggaccgttaagtgtcaaataattatccatgtgtcattttcttattggtatatttaaattaatttttaaatataaaataaaaagggtaaataccattttggaccctctgttttacaaaagttaccaattggaccctgtgttttgttaaatgacaaaatggaccctgtattttctaaaatagtacaaataggaccctgaattgattttatgtcaaaataaaatttaattataatccgatctaaaagtgctatgacaaaactgtttgcattttttgtatctgttcgtattaagcattg

SEQ ID NO: 393363 - DNA, 1070 bp, Cannabis indica
tatcgggtctgctgagagtaaggtattgaagggaacctatgacgcttctataaagagttggatgttcaaatggtgcactgtcttgaaggcttagtttgttgctttggttcattggtgttggacacggtttggcattggtcatattggttttgtgaagaaggtcaagagtatacttggtttgagataaatgaagaccgtcttgccccctagttatctcaaaaccaagaaaataagtgactggaccgagggatttgagagcaatggtggcctgaagctaagtgattatttctgaaacttgagtggcattgttacctgtaagaaggatatcgtcaacatagactaaaacaaagagtaatgcattacctttgttatagaaaaacagtgaagtatctgccacacagttgagaaaaccaagagcaagaagggtagtttttaatttatcaaaccaggcgcgaggtgcttgcttcaagccgtacaaggctttagagagtttacagacagcatgaggctgttggggatcaatgaaaccagccggttgttccatgaacacctcctcttgcaaagtgccattaaggaaggcattgtttatgtcaatttgttgaatgtcccaatgatgagtgacagcaagagtgaggattactcggatagtaataggcttgacaacagggctgaaagtctcgaagaaatcaatgcccggttgttgttgaaatccctttgcgacgagacgagctttgaaccgattgatagagccatcagaattgaattttattcggtatacccacttgttgtcaacaacatgcatatatggctctcttttgacaagaacccatgtcttgtttttaacaagagcaactttttcttcattcatggcagcatgccactgaggtgaggctaaggcttggtccacggtttcaggaatggagtgattgagataggtgacagtagaggaagtgggaacagaggcaaggtaaagtttaggtttgaaaattcctgctttggatcgggtgaccatggtgtgtgttggcttgggtggcacgggtggggaaaatgtggttgttgtatttgtgtgg

SEQ ID NO: 393364 - DNA, 907 bp, Cannabis indica
ttgaaaaattgaccttttgcttactagtcacctccagaaagctcatcctctctgcaaagtgcttcaaaagcaaaggcatctggagttgttaaaatgggcaatggaacttatgtagtttgatatccaatatcaaccaagggtgtttatcaaaggtcaagccctagctaactttgtgaaggaatatttcagattaggtgacctctcggatgatccagttccagagttacctacctagaaatctacgttgccagagcatcaactaaaaagggagtcaaagcaagaatcattcaattctctttgtaaggacatcatctctgaagttctatctgtttcaaatttcctacctccaagaatgaagctaaatacgaggccatgcttgcgggactacgattgcctaaggaagttagagcccaacatatcaaggtgcttagtgactcccaattagtggtgaatcaaatatctagggaatatcataccgaatgtgaaaagatggctgcttatgtgatgatgtcctacgagatggtgcaagggtttaaaggctacaccaaaattcgtttgcggacatgctagcaaaactcaccacagacttgaagattattcaataaagagtggtgcttgtggctcacttaggagcctcaattattgagacgtaggggtaaatgccatcgatgatcattccaagtcctagatatgtctcatctaccaattcctaaatttaggggagcttttcgcagacaaagctgcttctcagaaggtccagtactaggctcctcaatatgtgatactagatgggaagctttatcgtaaggggttatttgtctcgaataatggaatgttattgtataaggctcgagtttgtgctcctagggttgatgagcttaagaagagatccttgatgaagctcaca

SEQ ID NO: 393365 - DNA, 585 bp, Cannabis indica
aataaataaataaataaatatccatctctatccactaaatcgttagttagcatttaatattctaaaaaagaaatcatgatagtcatctctctctctatatcgtattttatactctgttgaagttgaagcctaagtcgtagtcgcccactcgctatcgaaactccccactcgaagaagacgtagccgttagccgtagccgtaacctaacccgaagaagacggaaattccccactcgctatcgatgacgatcgaagaaaacggaaactccccactcgtagatgattaaagatagcaaaccacaacaactcatgataaatattttactcatttggtcattgatactataaaggtaaaattaaacaaaaagtaattttacacataaaaattactaaaaaaagtagaagactgccggagtgagaaattttttataatagtgagtgtgaccaatttgctaaatgagattgatacatgaattcttaatagaaagggaaaatgcggaatggaagtcaggagataatggaatcatattagatagattgatactgtaattggcaaaaaatcataatcattgttgatacaaattac

SEQ ID NO: 393366 - DNA, 523 bp, Cannabis indica
tttttaagggtggcattagaaggcttgtaactttttgtgaccttgcctagcttatttggaataatcttaaccctttgattagacaaatcaatgggagattgcattcctccttttttacaggcagaccattcttttttaatctctccccaacgatggggtcccttattacctttttgataatcaaactcactctcatcctctgcattcaattaatatttcatatatatcaacttataatcatcatatatatataagagctaaacgaaaagcaatattattattaatatataaatgtatattaattacgtaccaacttcttgagctgtgactgatcttataaatgagtatgagaatatgatcacgaagagcagaaaaaaggttgatttgttttgatacatcttcatgttttgatgtctgagctagcttgtatatgttaaagagagaggaatatatggcacttcttgaatactaagctatgattgaaattaagggcatatatatataaacatatatataacacaac

SEQ ID NO: 393367 - DNA, 903 bp, Cannabis indica
agttgaaatactttgagagaatccatcagagaatcgatctcgactatattgtacatgttcttgctcaatcaataaagagaatttagtggtgttctagaactggagtagatccatagatcatatcaatctatcagacttgaactagtatatatctttgtgttgattttatcattttacagctttaattgtttctggttgttcatactctattcatccctattttcctctgattactgcttgcgtttgttaatcttttcattgctaattctttgattatttgaagtttagttaatttaattatgcactattagttttaatttttttcacaaagctttttttatcggttttaatggatttatgtcgtttccgattaattttttttaaagtattgattgagtagttcctttatctagcaaccattccatctctaatttttcaagtattttcgatagtttgaggaacgattttggttctgatcatgatcgatcttatgttgtttgtgactgaagctattatttttgatcgttaatggagttgtatggtagaaaatggttttcgatttgtgaattattattttaagagaagtaaatttataagtttccattttggtttgtgtttcatgcacttattcgaagtcctactatcataatcaatgaaggagatggcacgttcctggtacctggtttccatttttgattccggtaagaaatttttttatattacgatgtatggtgcttatgtgtcacgttatataatcctatttaattgacggatgttattgagaaatttgacttagtatgcttaaatataaaacatagtgttttaatatattatctattagaaatagtatatctatacttttaaattttaatatatttttctcctaaaaatacccttacattt

SEQ ID NO: 393368 - DNA, 505 bp, Cannabis indica
cgtgaataataacttaatatttatttaacaatcaatactatagaattataaaaatataatttaagtattatatattattttcaaaaattaaattaaatatttatttacaactgatagataattaagtatttataccgcgtattattttttttttcatatttgggaatacatatattttttttaaggagattgcattagaggagtgttcataacaatccaatctataatgcatggactatattgaattaaaaaatctattgtgagttaattcacatataaaaataatcaatccaatctaataaatgggttgcgatgggaaataggaaatggttttgtaatgatccatggatttatgggcataatgagtttccacctatcttgtatacaacaaagttgaatgtggcttatattattactgcataaagggaatgtgaaaaatcgtgatttttgcaaatgtcaattatatataagaaaatataaaactgtatgcgtctgcagaagcaga

SEQ ID NO: 393369 - DNA, 678 bp, Cannabis indica
cactctttgagtaaagagtatatttggagctaaggatcaaagttagacacctcttgtttatggagatcttaattaagtaatatagaaaattattaaaacaaatattaaagaaaagttaatagtcgtgaaggatgttgcctgaggtgatgatgaagctccaatagatttctaaggacgacgatataagagtatgggtcgccaaaatgatctatgtggtggtggctgactttaaatttgaataagaatgaaagaaatcggggaagaaggtcatgaaaagtggaagagggaatcaggtaagagaagagagagaaagtgtgatgtgttaatctggagtgttctttgctagtccttattcatttgttttaaaaaaaattattcaacttcaacactatttaaaataaaatttgggctcttacaacttacaaggctacgtcgtgatatagctaccttattagtcaacgtacataaggtacatgacaccatagtattattcttgcaattgcaagtatgctatatatatttatataaaaggtaataactagaaaattagggtgatatttggttggagataatgaaatgaaaagaaataatttttattttattcttttagtttggttgcatcattttggtagaatgattattttattttgaaataaataaattaccattccaattaat

SEQ ID NO: 393370 - DNA, 754 bp, Cannabis indica
tttatcaagcctaaaatatttctaacaagatggtgtctatagaatactaagtggtacaaaatgaaccccatacacaaatccatttatagtgttttgaaaattaaccacaatcatttcaagcccaacactcacatcactcaatgattgtattatcaatacataagtgagtgttttagagattatggactgctgatttcatttttagctagccaacgacaatgaattaaattaaaatgattaaaaataattaaataatacatatataaataagattaagtgaaaaaaaatgccagaattgttatagatgttcggttccgtgttggtggtaatagcctactctcatttcgtttgtattaaatcgtaagtaaagaagcaagaaggctctgatctccatcgaaagctcttataatgatctctagtattttgctcttaaatctatgtatatatttctttgctaagatttctctcttgtgttttatgtgagtactctcgtgtattcaaggccggccctgaaaatatatgggctcaagacaaattaaattttggggccctcaaaaatatataaaaaaaaattaaaagaagagtgttatgggatttgaacccatgaccttggactttatgctatccacctcaaccaactaagctataaatatttattctttataatacacttaaattttacttaaataaaagcctaataattttttttatttcgggcccccggaaagtgtgggccctaggcacgggcctagcc

SEQ ID NO: 393371 - DNA, 1859 bp, Cannabis indica
ctagtgaggacacgagcaaggaggcaatgatcttcagtcgcatccaaagtgggggactcttcctcatcaaaagtaagtattgattcctcctcttcttctaaattgataatacctttcattttatgagttaagggatccatggtattggcaaaagttgataatcaggggcaagaaaagggtttgtggggttgaagatgatctatagaaaaccaaaaatgggtaaaaaaatcgtaaagaaaaataactgccttggagcaaacaaacggcagacgctctataattataaaaataaccgttgatgtttcatatcttgtcaaaattaaatttcttaatatgcgcataatggaaatataacctataaaattaggtataaattaaaaagtaataaaataaaagtaaaacttaaaataggaaataaaaaataggtgtagagtgtaattttctccacttttaaaacatacaaatttagcatttcatgagtttgttgcatttttttttttaaaaattactctaagtactaacttttttctaaactttacatttagatctaggtactacttaagtgtaattttctcactttctctctcaaactttatattaataatatgataaatgaaataataataactttaaaatttgttatatataaataggtttttggaaatagtggtagtctatatataactgattaatgatcaattaaaaaaaatacaatagttagatattcaagactatacatgttgctatctttcatccaaaagcacaattacacaatttaaatattgttgattatgtaatattgattttttttttatgattataagtttttttttagatgaaatatcaactttattgaataatttagcattctgaatacaaaagatgtaagagtttaccagaaatagaaatatcataaatgctacgatcagataaataccgagaatgtctagcaacataatctgctactcagtttgctaatcgtctagtgaaaaataaattaacatttgggagggtagataacaaaagttggcagtctttgattaaaaggccaaaagtggacctcattgcttggttgcttcgaatagcttgtactgaaacaagattgtccgtctcaattcgaacatattgccaattattggtctttacccaactgacccaaggcttcaatgacttcagctgcatatcttctgccatggcaaccggcccgtgctgtaacaaggtgaccaagatggttttgggcaacaattctgaaaccatacttattgtcgctatcaaagagtgctgcatttacattaatcttgattgtattttctacgggtctagaccatgactcagcgccatcaccgatgatttccagacagattgatgacaatgaaattttatcctgagctttattccagtgatcaagagctacttgtgcagaagtaagcacgtcattaaaagaggagtatttctttttccaaacaaccttgttcctagccttccagattgcccagctatacatggcaataagagaaatcatatcagattccttgaagatctccaaccaattgccgaaagaaacgccaggatcaaaaactgttggagttgcacattggctccaacaatcaaatgcaaacgggcaagagatgagggcatggctgatggtttcaggttgtagattacaaatagggcaagtgacagaaatatcgacatgcttgatcactagtttgacacaagttggtaatgtacctgtaacggctctccacaaaaagttttggacttttgggggaaccttcaattgccatagttgccgccagaagtccgagtttgcaaccatctcttcggtgcgcttttgttgttgctccgttataagcact

SEQ ID NO: 393372 - DNA, 561 bp, Cannabis indica
gttgtttcaaatgtaaaaataataagtttggagaataaaaagagtgggctaaaagtacacaattaacatcttaagataaatattaagatgatttaattatatatatacatatatggttattagtgaaattagatcttatatgatttaattttttagagaaaaataaagatgtctcttacattatttataatatgtagaagaattgacttaattttatgatcatttgctctcaaggctatatgacgaaaaaatttgggacgaaatttctctaagggggtagaatgtgtttatttatatatataattaaataaatataatataatatatatgtataaaaaaaatatattttatatatacaggaaatagtgttgtcgtccccctctctctctatttatctatatccttttctctctcttcaaacacaaacccaaaataaaatccaccaactaccatcaccaccacactccggcaaccaacctccggcgaccgcccgaccccacgtgcgtgacagaacggaactctacgtggcgacctcaccccccaagcgccgccgctcctttc

SEQ ID NO: 393373 - DNA, 2037 bp, Cannabis indica
gttttgaacttctcacttagcttaagacttagggttttagagtttggttaaggctctttatataggagagcttaaacccttgaaataggtaaaataagctgatttttacatattaaattagtaatatgcaaatgactaaaatgccgattgaaaatagatattttccctctattttcttaagctgttaaggcccaatttgtagtttagcttgttgtccacgtgtaaagttgtgcaccaaaatcttgttaggctaatgtttggcctgccatgcatctgcaagatgcatgctagcaggctctatgctgtccaaaagctggctggcctatgctggccatagggccagctaggggtggctggttcatcattcgtcatcccatttgagtgcttagactccccgttggttgaagtgctgagtagatgacttggccttcttgttggcgagttgtactgctatgtggcactgatattggccacatagataagccacgtcaggtgggcaaaaattgggataatcataagaatatggagtatcgcctaaaactggaatctcagggaaccggaagtaagccactacctcattatatttgaagttaatctagcatttaaccaagtatagaagtagggagtatcgcccgaaaccagaaccttaaggaattggaagtaagccactatcttattatatttgaagttaatctagcatttaactaagtataagagtagggattatcgtctggaactagatcctcagagaactggaagtaagccactaccttattatactcaaaattaatttaatataatacatacttaattcaggttaacttaaaatagaagttcaggcttcaaagttaactcaagttaatataactaaaatattcaggctacttaaataaattaattaattcaggttaattaaatatttaagttcaaaaagtcctgataacaagtggtatttaccaagaaatattaaaagtaattaattagctaaggttaattggttatttaagtttcaaaaatcctttaagtaaaaacactttcaaatatttttcttcaaaataatgtgataccaaggttcaggccattagaatcatattccaaggagtacatatgacttgttaacaagaaaaatatttaagtctaagcatttaattaaaaatctaaaggttcatgcctttggaataagaacctcacgatactggaagcattgaaactttgcagactctatagattaaaatgcagatatctaaatagttaatcaaatagtactaattacttaaaaatctcacggcaatggtataaaatattgtctctgtacaaacaaaaagggggacccttatcccctacaagacaaatatatatataaagttgtgaaagaaatataagagtgtatagatgcggctatggctgggctaaatcctttggtggttgagtaccttcgagttgaacatcaggcaagacctttgggatcacaaaattggtcacaaaaggaacatcagaaggttgaagagtgcattcatccaagttctcacccacaggaagaatagttccaagatcgaccacttccgtattttgagctacttccttggccttatccacttcctccatagcaaggacttgaggcatcagtaaatccctgtcttcagcatccaagaggtctatcacagattttttgtgcttccagatagtgtatactgaataaagaaaagcctattcttgttgtcgagtgaatttcacaacaccaaattatattattttattgatacgaaagagaattttatgggtaatgacaagtgcgagtattcaacctagaatggcgagtactcgactgggaatgggaaaacaatcaacaaaactggaaaataacagtaagacagagaattatagtggttaagtcagattatgatctgcttagtccactgtagcaagggattcgtaggtgccatttcatggtggatcacctctttatatacaaagcaggtgtccaatcggttacacaaggatcacattcattgttaatccattatttacatattgaat

SEQ ID NO: 393374 - DNA, 761 bp, Cannabis indica
gataccctttaatgcttttcgtactcatcaatatatggcaaggtacaaggtaaagtaaatgtatgaccaaaaggctggatgggtgagccttcatgcctctaaaaagcctgcaaaagtagtggttttacaaaggtagtggagagacaatggtctggtgtcagttcgatctgacacccaaccaccactaccttaactaccctcctacaatgttgaccttggatgtatagtcatggtgtgtttgattctttaaacctagagtcattgaagctcaagtataaatagccccccctaatacttgtaaggggagttgggaaatcatttataagaacactcaatataatgcaattttcatactctccattaaacacttgtttattttcataaattcttctaagttcatcatactttagtcttttacttaatttgattttctagctttaacttaggtcaccaaattcataaaaaaaaattataaaaattaacacaaaattattctctagttatacataaatttttagaaaaattaaataaaacgggatacaaaatttgtatataatatagaacacaataataactgataataattatgtatacatacctgaaagatccgtagcaattggtgcaatttgatagtacaatattatcaactaagtcttcctccctggatctctaaatcagaagaagttatattttctatctgattatcaaaagtatacaattttgatgagacaatataaattaatagagttagggaggggact

SEQ ID NO: 393375 - DNA, 1241 bp, Cannabis indica
gttttttgctatagcctcgtattgatcttatgggaagaatttaaatgaatgatttgatttattaaaatgtaatgtagccttgttggttaagactctctcattttaatttttggccaatgaaattttgtgcaagtttaacattataattaaaaaactgtttttcaaaacaatttagcaggttttgccatatattttgaaaataattttcataaaataaagttgctaaagacaaaaattttgagagcaaaaaaattactttttttcaatatttttttctttagtttatctcacattatttgtctcgtcattttctcacattattttctctatcattactttctctctcattattttctctctcatcactttctctcctaccattttctccctcaccactttctctcttattattttctctcatcattttttctctcaccactttctctctcatcatggtcggggtctaggattccagctctgaggccaggttacatgttcgggtccgggatcaaggttgggaatcgagtcaaagtctagggtcaaggctgggttactgttaaaatccttctctaaaactagtcgttctactttgataaaatcagtggggctttctttaccagtctattctatgcaaagtacgaagttgttaaagaaacttccaactaaaatcacttgcatggctagagattttttttggggctgcgagcaagaaaactgtggtatttgtttaaaggcatgtgattagttgtgtcaaagtctcaacgtggcttcgattcaggagaactttggaaataagcctttcttgctaaatgaggttgggctctccataccgaggatcaatatgttgcaaggttttaagtgctaagtatcttaaaggtagactttttcttgaagtgttaatccaagaactcaaatttctagttttggaagaattttctgaagtctgaaaaattcttattaaaggagcctgtaaactcataacggatgggcaagatacaaacatttaggaagatccatgcttattcatggtcgggacttctatcctcatcctattaatgggcgacctgaggaattggagaaagtagcaaatttactgacagacaatggcaattgggattaaggggggggcaaaaaacgggtaccgacacggcacacgaacacgaacacgacacgaattttacgagttagggtcgggaaaattagatgcgggtcgaaaacgggtcgacacgacttgacacgaa

SEQ ID NO: 393376 - DNA, 547 bp, Cannabis indica
ctttactctggtgttctcttacacatggtatgtcaaaaaatgtaagtggaagaatgtttggtgagtctgtagtagtagtagtagcagtaggtgaaggagccactttgcatacttgaactattttcactactgtctttgattgttccatcaatttaattcgagggtaattagagaaatttagaattaattaagttagaaagagtataaatttcgaaaatggttgttgatgttattttaaatttatagtacacacaatgggacagcaatttaaacagagatcgatataacgacgaatggacgcatttaatataaataaattccttttcattgcaacgaattattacaatgtgaatgtacggagtaaacaagggtgtgatgaattcaaggacaattatgtacattttactcatagatacatatatttttagtttatatacttgtatattaggctagttagtaattttttcttaaactttgacatttactaaattatgccccttaacctttttgggtcagttaaaaactactcctgaactattgagattgt

SEQ ID NO: 393377 - DNA, 1239 bp, Cannabis indica
gacagaagatagcaattctactccgacagccgtagacaaaagtccaagttcaatcaatttgggtgatcagagtcttcttgtggcgcgaccaagaagtcatctcgacgatccctccgatccatattacctttatcatggggataaccctagaaatgttcttgtgtctcaacctctcactggccaagacaactatgtggcttggagcagggctatcaactcgccatatcaatcaagaataaactcggattcttggacggttctatccctaaatcctctctttctgatccttctctttataatgcttggatccataacaataacatagtaatttcttggattttaaattctgttcgaaagaaatttcatctagtatcctttacgatgagtctgctgctgctctatggagtgatcttcaggtcaggttccatcaaataaatggatctcatctgtacaatttgaaaaaagaatcttgtgaatcttaaacaggaaaaatcacattgtagggatgtatttcaccaggctcaaaactatttgggagcagctttctaatttcagaccaacctataccgtgcaatggatgcacttgtgggggagtcaaaaagttgcaagaacactacaacatggaatatatcatgtctttcctcatgggattgtctgatatgtatgctcatgttcgtggtaatatcttggttatggatcccttgccagaaatcaatagagtctttcaccttgtcacacaagaagaaaatcaaagaaggagtcataatcccactacagatccaaatccgaatgtggcctttgctttccatggttataaagcttcaggaaataaggataatcatggttcaagacaacaaccaccaaagaaaggcagacccttttgcactcactgcaattttcatggccataccattgaaaaatgctacaagatacatggatacccaccaggttatagcaagcctaataagcctaaagaagctgcagcaaaccaggtccaaaccaataatgagaactgtgcctctattggagacattcacaccatgcttccccaactcactgctgcataatatcaacaacttctcaacattcctgcaatgcagcaaaagtgtaaatacctctgaccctggaacctctacaggtaacactggtgaagtccttgccatgttatctttaagatatatgaggaatctttttgctccactccagtgtgttgggtttgtgccgtaaataaaactcatt

SEQ ID NO: 393378 - DNA, 1896 bp, Cannabis indica
tgcataatggaatttgaagctttctggcgataccactactactcctgcccccaagccattctcgtttgaagccccatcaactaaaagtttccatgtttctatttcattttctattttggagtcttctcttgagttaattacttatattgaaaagtcagttaaagcctgtgctttgattgaagtcctcaagtggtaagttactttgaattttcctaactcaatcgaccatttaattaatcttcctgatgcattagattttgatagtacatgacgtaatggttgatttgttaggaccttaataggatgtgtttgaaaatatgattgcattttgcgagatgcacgtatcaagtagagtgcgagtttttctagaggtgggtatctcgattgtgcccccagtaaccttttacttatatagtaaatacgttgctagttcttgccttcttctcgcactaatgctgcacttatggcattttctgagacatccaaataaaggaacaatgttttcccagtaattggtttagccaaaactggaggtgtggaaaggtgtttcttcattcctttaaatgcttcctcacactcttcattccactcaaattttctgtcacctatatggagaaggaattccaacgacaccaaaaaaaagtataaaatttcataaatagcacttaaatcgttttgaatttgtttcttttgtttcttttttttctaaatttggttgagttgttctcattttcatcaatttaattataaaaaaacattaattccatatttttttatttgtcaaaaacaaccacatctttctacacattactgaattttattctactactctatttatttatttaataattcaaacacaataatacaataatgtcatattttatattataccactaaattaattcaaaaaaataacaatatcaaaaggtaataaatattaggtaacactgtgcgaagcaaagcttagttccctagttataagataaatgatatattaattataagagtataattattaaatatctaaaaattccttattcatatgaaaaaagtataaccttgtaaggatgtacaagagaaataagattatacgatatgaagaaaacaaatctataatgtattatagttttgggaatctctaatatggaattgctaagtacactttactatacactatacttttagtgtgtttgattttgttcggatcacatatgtagatggacatgtagtgaaggtactgtgtgtaattagattatgcatgactaggtcgatatgtaattgttatccacatttttgcaagcatgacacatggaaattaatcaagaaaaagtcaagaaatctgtaaggctgctcaatgctccgggagggtaagagccctaatcttgcggaactggttttcgcaaggtaagtcttcctggatgcgggccacaagaaagacgcccgtgagccaacgactcactccactctagaagtcgaaaccccatgctcccgcgaggaatatggatcttcaaccaagatacactggttcggggtacgcctttaacctgcgaaagctcagcccacgcgtccagagcaccaccagtacagctagtacaacctgacatcgataaagaccacatggaaaataagccacctaccaatccaacaatgagggtccatccctatgaacatccatcaagggtggcccatgtgaagggattagcctataaatacccttgaagacacacaaggaaggggattgagattctgaggcttgacttctcctttttcctcggcctttcaccttgaaactgaagactaattctttgttaaaacatcctactgtaaccccattatcaactgcagcatattcctactaagcttcctcttcttcaagaggaatatggtggattggag

SEQ ID NO: 393379 - DNA, 835 bp, Cannabis indica
gcttctgaaataccttgatgaacaagtaatgctttcatcttgatttgccataaactgaagtcatttgtcccaatgaacttgtctacttcaaaccttgttgatgacattttcatattgagttctttaaatcttaaaacagttcttgaatgctaatcctcttcttcgccgagctctaataccatttgtggtgaatcacaattcacctcattcaagaacacatacagcaaagaacatcaacataaaccagtactcaagatgtaagctaaaacaagcaatgaacaattaacaagcatgaactaaaagtgaactttaaatggcaatatgtagaatataatggacacatttctttaacgaggttcaaacaccaagtcaatgtgacttgtgcctacatccccggaaaacaaacaactcttgaatctttattaatgattacaaattgatcactcaacaccaagagagatcgaattacaaaaggagacttgctcctgaaccctctcattcaatctaactcaccttttatttttctctcaaatctttttagttggtctcccccaaaacaggggccaaacttgtgttatatatagcttgaacaaaaataaggattccgcccctcccccaccaactaacttaatagactttcaaaagtggaaaatcttagagcaccacttggcacattttgacttatgtcaaaaacactacataacaataacaagcatttttctctcgatgggacctcatgcaataattaatggttgtatccctttcaatgatattactttttacatattatgtcttgtatttctattttaaaggatagttgttttccatttttaat

SEQ ID NO: 393380 - DNA, 988 bp, Cannabis indica
attaaacacctctaattcctgccagtaaaaatagtagaccgtttccttgttttctattgtagaaaaacacaaagtctcatttcgagcccaaatcaaccgcaaacttgttaaaactctccaaaataccgtccaataaacataatccaagcaacaaaattaagaataactcaaaataacaaaattcaccattgttgagccaagtttgagttcttgctaacaactcaattaaacctcaaattcaactcaaataaacttcaattaactcaatactaacccgaaaaaccatacccaaactcaacgtgtttggacaaaacctaattcaaagggattgcatgcttgagctcgctaaaacctcaaaaaaaaaaattcaaagagaaaagtgctaggaccttatctctgatcttagcttccaattcttgttagaaattaccaataatcacagaaaaacaccccttaatctcatggtttccttggtgtcgaagtgaagagagagaacaaggttttgtatttatttatattttctaaggttaacctaaatgaaaggttatttaattgtttttattaaatttaaagttcagactatactagaaaaatctcacaaaatcactaaaaacaaaagtaaactctttaggcaaaattccagttttaccctttattgttgtggtattctcaacacgcaagtatacgtatcgttaacaagtagtagactcacaaagagtgaggttgatcccataaggattgtagttaaatactttaaaattaaacttttacttctatttggttatatcgaaattaagaaaaaattaaaattattagaaaacaataaaaataagaagcaagtaaatcaataaagaaattaacggtgattaaaagttaaggttttcgatttcaattgcatctattgattatggtttaacatgattctattccaattatcaaattctatgcaatagcaaatttaataaggtaatttatagtcttctcagat

SEQ ID NO: 393381 - DNA, 1043 bp, Cannabis indica
tttattttttttttttttttttttcatgttacgaatgttatttttaagtaactttcaaaagtaaaagaagatcacataaattctagactaattagttattataaaatgttttaaaatattgttattgagtattaatattatctagtacctttttacctacgattgcttagagatattttttaaaagttattttattaagttataaaaaaaaatacttaattacattaatagcagtatgatactgagaagagtgttaaatactagtaatactttttagcaattcttaagtgttataaatgatttgtgaatatagatgattacttgatttaaatgtataggatgataacactaattgttaatttggacataataactaataactaatgcagagatgaacatcacggaatgtttaaaaaaggacacttaatttattttttatttatttattgaaaaattgagggaaattttgtaaattaatggagcctaacagtcccaaaatatgaaaggcgagagtgacaacttaaaacgataaggttagctgtgggagctacccaactcgtcatgatccaattatacagttcataataaataagaaatattatcattggttcaaagacaattgtaaattttagcacagaattttcaaactagcgacgggagacttttattttatttttttcttcgagcttttccaacttttatctagatattttctgagatcagatattttcttattgataggaattagagtatgggtggaatatatttattttgtgattcaccaaatgaaaaaaaaaagtttggggctcataccataaatatatatatatctattctatataaagtgtgtctatataactaaaattcttagtttttgagaaatttatgggtgacttttaatttttatttaataaaatattatttatatataataaaataataataaaacaaattccattaatatttgaattgatatttgatgctaaatattcgagaatacacacacataaaaaaaaaacccaggatttgatactctgagactc

SEQ ID NO: 393382 - DNA, 1056 bp, Cannabis indica
attagtggctttttttcctactaaaatagtacacttttaaaagggatctaccgatacattctttatcaattttagcatatgagagaattttttagttaaagtcttctcatgattgtctacattataattatttaagatatcttgtaaaattttaaaatattcttatatatttaacaagccaaaaataggattcaaacacattgttgctcccgagactctttaattttatatgcgtctgaaatagattgtttgaattctattattggtgtgttaaatttttttgaatttatcaaaattttgcatgatgttctatataactacaacatacaagatcatgagtaaaattaaactaaaaaattctttcaaatgccgaaacaaataaggggtggtgaattccttttaaagagtccattgtaaattttttcaaagctatatataccctgtactttttatacatatatatatttagagaaatttgcggcaaaatttttcaaaaagtttagtttgatacagataagtcttcaatctcgaaaaatagtagtaatagtgctcaaggtcatgttttttatttgtccgttagtcttttaactgagccgttgacttttttaaaattgtcacatgtcgaaatattactaatccaaattattattttaattttaaaaaataatataaataaataaattattttaaaatgattttttttctttttctttcttttcttcttagtcttcttcttcttctcccaaattcttaaagaaccaaatctatcaaattccctcaaaaccctaaaaaccagagaaaccttataattctcaatccaaaatccaacctaaggctgttcatccgatccaatccgcacttttttagtcaaacaacatccaatccgcacttttttagtcaaacaacatccaatccgcacttttttagtcaaacaacatccaatccgcacttttttagtcaaacaacatccagtccgcacttttttagtcaaacaacatccaatccgcactaagtgtggatttattttttggatccaatccaatccgcacaatagct

SEQ ID NO: 393383 - DNA, 679 bp, Cannabis indica
aactaacagacctagcaccttgcaccaaagtaatgtacgacttctctagccaaggcattgcacccatgtgatacatttggctgcccttgatagtcaaagagaaccctacaataagaacattgatggcacaatttgtaataatcgacgtgccatcagccttcaatgcgatgataggtcgaccagccttatacaagctaaagatgataacatttatctaccacctatgcctaaagttccctacaaggcatgggataggatgtctgaggggagaccaacagtctggccgacactgttacaacctgaattcatctaaagcaaagaatgagaagatgcccgccaagagctctgaccaaaagcttggcaaaaggcaatgaaacctagcccaaagcggggaagcagacatagatcctcgcttaagggatcctacagacagctctcgacctgtggaagaactaaaggaactggagattgataccactcttccgactagaaaattgaggattggaaaggtttagcaaccgaaataaaattaaaggagttaagttgagttggaatggccctcgtctttcccatttgttctttggagatgaactaatcttggtgggtagggccactttggaggaagctaccgggatttcgcaatgtctggagaaattctatgagtggtcgggccagcaca

SEQ ID NO: 393384 - DNA, 901 bp, Cannabis indica
gttttgattacctaattgttaacgctaattaactattcttctttctcctatgtgatgacagattataaattaacctaaactcttttcagatcataaatgtcccaaattgtatgtcaactactacatctccgagatagtacaacaaataattcccattaagcaataatttaaaatgtcacacaagttatgcaaatactctcgtgtcacatcaaaatttatgtttattcatttagagcattcataacattcatttttcagatttcacattaggatcacgaatcatgcattaggtgatcaagcttaaacatgcaataaacacaaagataaataaatcgtacaatcaatgaaaaaagaaaaattaactaacattaactcataaaataatctcaaacaatattcattacatctctaaataggaagtttagctcataatcaaatccataattaaactagatacacaaataaaaatataagaaatcaagagaagagaaggaaactagatgaaagattgtcacaaatcacccacgtttactccaagtatcttcttcttgtgattctagggttccattctgttcatttctctataatttgcgaccccctttcatcaaatagagtttttcagcccaaaacgagaaaagacgcagttccccttgacccgtacggagtcagtgccgcgacgactgtcgaaaagtgaaaaaatgggatttctgtagtctgtcatcgcggccataagtcatgctcgttgcggctacaaatattagtcacgaccaaaatgttcctgcttcgacctctcttagtaaattatgcataactttcacatacgaactctaaatgagctgattcaagatgcattgaaaagataaaaaaaaaaaaaagagatctaaaacttctatattttgac

SEQ ID NO: 393385 - DNA, 624 bp, Cannabis indica
aaaaaaaaaaaaaaaatcatcaacactgaccttaaaattggatagaccttaaagaaaaattattactctttattttaaaaatagtatttttaaaatactaaaaacattcgtatatttttaaggaaaaaacaatttttttagaggctttagacgagtgggccttaaacacgggcttaatctgccttagctcaggtctaaatttcataccaaatgtctcatagagtagccagtaagactgaatattttgagcgggttcgatccggtcccgggcaatccgcccgaacccaacccgatcaacccacaaatttcaaaaacaaaaaaaatattcaggcaggtcaatgcaggttagattttaaggaccaccgggtttcgagttaaacccgaacctgcccgccaacccagttatataatatattatagaggaaattacactctataccttttttatattgtcctcttttatttttaccctcttttttaaagtctatcatttttacctctttttttaaacattgtaccaattttgcccctgtcacttcaagatactctccatgtaactctcttatgtcagggtattttaggtacaatacatataaaaagaggtatgtttcaaataaatataaa

SEQ ID NO: 393386 - DNA, 1077 bp, Cannabis indica
tatttcttgcatcccaaatacaataaattataatatttacagttgctatatatagacctccctgtggaacatggagtgtctacttctctctatccatttcaaacaagtgccaagcttcatcttcttattatgaagcccaaccgagtcaaaaatctgtttacaaatattatgactataatcaccagtgaaaaacaagtaggggtgggtttctttctcaagatcacacaacaaacaagtatcaacttgtttcataaggaaattataaatatataaacataaatatagtgtaccaaaaataatgattggtggttactgatcgtgtttatatactgatcatctgacttgctacctagctgaatttgaaatctaataaaatttgattacttttttgaaaaataataattggtggagctatattacttcacaaaaaagaagttagtattgcaaaagaattatcattgttaaagagttaataaagtcaagaatgaaagaaactaagctacaacaaatgaatttcaatatttcaggtacaaaaatttttaccaagttagcgaccgaaaatgtggaatgatatggtctagaataggccaagtcttcctaaacatcagttcaaattaattaaacaataaaaattagtgattggttttgccaaatcaggatattagccttagatgctttaaagttttaatcgaatcttaattggcttttgttctttaatgcgataaaaataaaattttcttgcttacgaatttaaatagtaagggtaaaattttttagttgggtcacctatgccatcgacgtaaaactgggtggaataggtgttggttacaaatagtcagttttgagcataatgttagttttttgtaactggcaataatagatagttgttgggaaatttaataactatgtgcttaccgagattttcgaaaactaataaacgataaaaaactaaagaaatataataaacaaagaatgaaacaagagcttgtagttcatggattgatgaaattaaactaatagcaatatgaaatagtgtaggtattttattgccactacaaaaaattgatacttttagtg

SEQ ID NO: 393387 - DNA, 800 bp, Cannabis indica
ccaatagacaatattaacacagtaggaaagtgaataaacactactgattatttttttgccatttctcataattaatgaaaactcttctcaaactaagttggggtttgagtcaaaaaatctcaagtcttgagtcaaaaatttaacgcctttttaaataagttttttaggtttttttatatataatagtaaaaatactctaaaaaaatcacagtgaaaaaagatcattaggattatttggaaaacaaccaagctatgatggaggactattcttttctcagttcaaatgtatgtgatgattttttacttttcgaaacataaagtatatgtgatgattaattaagatattttcaacgttactatgagagaaattacaatatcaataagattttatctcgttttatcttctgtatcctaactacactaataatatgttttgtaatattactactcgtataattaaatataaaatctcatataatttaatttaataattattataaaagagaattgttataagataacaatggtgtctattgcctaacaccacttcaaagtgatagttttgtaattggttatcgatatttcattaaagtcattatatgaatcattaggtctggccctaggcataagcgggctaggcctgtgcctagggcccacttatcccaagagcctaaaaaaaatatttcccttttaaaattatacaatttttttactgattttgaaaaataccatattttttctaaataagggcccaaaataattttttttctatggcccactaaaagtcagggtcggccctg

SEQ ID NO: 393388 - DNA, 1023 bp, Cannabis indica
tagtaatttaatatgtaaagtctgaaaattattgacacttttataaagttataagaagtatagattagaagagaacaaatatcaaaatataattatccttgtaaataacataatatttacatttcaaaaaaagaacccaagtctctagttgtaggtagcataatatttacattctcaaaaaaaaaaaaaaaaaaaaaaaccaaagttggtaacaactactgtccctatttctcttagatacaaaatgaaaaaaactacattttcctttttcccttaccacaaaataagttgttagttgctttaatatatacattacaaaagtattttataaagaagcaacttatttgaaaaagggatacatgatagtcgttcttgtgttgagaaaactacttaaatatcattaagtagttgtcccacaatgtatttgtccttaatttcttgacagaactcatacttggttgtcttgatatgaataatatactttttttgtagtggatatattgataagattttcagctttcaagattccatccttatatcaaatataaatagattagaaatattataattttaatgttattaattataatgatgaaaaaactatataaagaggataaaataagtaattattaatacctcagtagtttcttccatcagtttttttgcactgcagtgtatgaaactttctgcaagttctccaaatatgttgcaggtaacgttccagttgagtcacgtatgtagatttgaatgcaacatctgatttttttttttttcatgttatatattaaaaagtgattgatttgttttttaagagagaagaaaaaaaaaattaaatgaaatttgaataccttgccactgttttgactttttcctcttcagctttcacattgttttctttttgcaacaatcatcacatttaaaataagtatcaaagccgacaccagtgttatattattttataatataataataaagtagattaaaatgtgataaatatatgtgaataatatatattaagtgtat

SEQ ID NO: 393389 - DNA, 838 bp, Cannabis indica
ttcaaattcattgcgtcatatggtgatggctagagctaataataaagatttattatatatattatggttttctctaattaaaatagttaattaatatataattatttagtttcatacgttaagcaatatatatcagttacaacagtttgaatggaccccctctcatggtatggttggcctgccatttatatgaatatatatatatatatatttataggatttaatattaatagcctattaattagctatatgtatatataaatacataatagtactgaattcagtacttattatttaattaatttttaaaattaaaattcaaagcacaacctaacatgatcatatgcattaaaaaaacaagaaaagggttggttgttgattacaagtgaggttaattaataataattaatagtgtatatacttataataagtggacccgaatattataccatcttaagatttattcgatcgattgagacatgaccatatatatatattatatatttaatcaaactatttatttatatatatgtatatagtatagcggtatctttggagataatataatagggattgtcaaaggtggattaattaattagtaattattaattttgtcaagatggcatattaattaatttatatatatatatatctcatgaagttggtttaggttgagtttagtggtgcattgcacattggaattccaaggtaattaataacctcatcacccatataaataaaatatatacaaaaagattaattaattttttaaaattaatttactaaatatatatattatcaccatatcatcatcatcatcaactagaaactacacaaa

SEQ ID NO: 393390 - DNA, 975 bp, Cannabis indica
ttttttttttttttttgtcgtgtattttatttttgatttggtcatagacactagtgttaattataaggtcccctatcctcccaccaccgaaaataaaaataataatagtaaacaaaagatgggtctactgtttatttattttcttattattactaataacaaaaaagggttcttctatcgttttcaacgtgccttggtgagcatatttgacaaattagctatttaaataatagggagatagtcagctaccaagaaagaggagagcatgaactaaaacatgacccctatatacactactatatataaaggatgttgacaatgtgtccaatatctatacatatgtatatctgacaatttacagaatatatgaaaaataatatataaataataatacattaataaaaaactgtttagataacaaaataaattttgtattacttaaaatgttacaaataagattctaaactcaaagtttgatatttttttaatataaataatttagaggtaatctctaacacgaatgtatgcagaaaatataacaagttctatcataacctctctagatcgggttattattaataagttttaatttgacaaaaaaacaattatttagtaatattttaaaaaatatatgattcaattcgtcatttaacaaaacaggagatccaaacaataacttttccataacaccgagtccaaaatggaataaaacttaaaaagaaaaaatagaatctaatttttctcttgaattataatctttgtaaaattttgcccataattttttgtttgttataaaaattctcctcgaactaaataagttgttgcaaatatcgccattcagttacattatggttatttttaaaataatttatatatctatatatataaaggagaagtatgaggcagtgacgtggcggtctaaaatttttccaaagctatttttctttttctccttaattctctcaattttttaat

SEQ ID NO: 393391 - DNA, 504 bp, Cannabis indica
ttatttgtgcattcatacaaaaatataaagtaagtacaatagaaaaaaaattatagaataatacagtataatcttattgttatacaccctcttttcattttttttttttttaaaaaacaatgtattatatgtaactttttcttttaaatttatgaaaaatattaataattaatatttacatggaggataaatactttatctgataatggaattgtataaaagatgagccacacaaaaaggaaggagtcagagtaaatttttttgaagaggatgtgataaacataatgttgaacaaactactagcaaaatcaaaatttccaactcataatgaagaacattgatttatgcaagtcattcaaatttgtatatactgatgtaaatgtatacaaaatatcaaatacatacaaatttttgaataacactctttactaggtaacatcagttgttattgttacaacttacaacttacaagcttagcaaaactactcaaagcaattgaatgtt

SEQ ID NO: 393392 - DNA, 1018 bp, Cannabis indica
actaaatacaaaagtgtcaatcagtattatcgattattagatgatgtgaaatattaattttagacatagtaaatcttaaacttttaactagaaagtcatctgcaataaagaaaaaaaataaaaaatagaatgttatcggttacaagatttatctcaattaatatttttctaattttataattattaataactttgagagaatatccataataacttttatcatacttcaagtaaatataaccggtagtgctttatattgatgaatttttatgtaagttcaaaatatgcatggaacccacgtatggagcaaagtctactattatgcccgtagcatgctttgtgaataaacactttaacctttatttattttggtgtctaatcatggcatgtgctagctccttcggcttgttaagtcagtggtcacttatcacaagtccagaatggacaacacaatcaaaccaaccaattcatttagagtcccattcattaattgaccaacgataatatttaattatttatggtattattattattattttcttcttttcaccttgtattattatgtaaaaacagttttaaaacagttttcaatatgtactttccaattctactgatcagtactcaggaaccaaggaaataatgcaaagctcgcctagccatgtcaacaaatgtacaagaaaggtgaagctaattttaattgccaaatttgataatccaggctaaaaagataagtttggtgtttaattataccacccctcctaacaattttttaactatatttatcttttatttttagcccaaaaatgtctctctccttaaatccaaaaatctcagtcatcatctctctctctctctctcatttgtcttcactgccggacctccaccatattcaccctcaacaatctcggccggaccttaaacagagcttagcccgacatccaccacactctacaaaataatgggtaagtatttttcttagtaaatagtgttattttttgttgtattgtatggatctgaa

SEQ ID NO: 393393 - DNA, 1430 bp, Cannabis indica
attttattttgacaaaaaaattatttcagtattctatttgtattattttaaaaaatataagatctactttatcatttaataaactagagagttaaatctataatttttataaaataaaaagtctaaaataatatttaccaattttcaaacaataaagtaataaatatttttttttacgtgataaagtaataagtattaattggtccgttaaaacttaatttctaaacaaatattgttattttgattaaatggacataaacaaatatatactttccagaacaggaaaaataaaggaaaagcatatatttaatgtttcgaacttgaacaatatataaacacacaaattgtatatagatatacaaacaaattatagtaattgaatttatttaatgttttaacattttctagaatgatatgtatagaatatagttgagatcttaaaagtaagattaaatttcacataatctttctagtttttacgctattaaaaatgcttttactatttgtttttggtgcaaattctatctttctcgatatatgctttttctaaacaacaatcaaagtagcatgtgaagataatgcgaattgtgaaattattaagtactattcactgtaaatttaattacttttgcttttagggaagatctaatgaaaaaaaaaaaaactgatataataattgatgtgtaaaaaaaaaggaccagagtactatatatgatgggaatacatatgtacgcccaaaattccgttacaagtaaaaaaaaaaaaaaaaaaaaaacaatatgtacgctcaaattcagacacacaaaaaagtttagcacccttctaaatacttcattaatcaagcaaaaaagccataacataagtatatgctaatattttatatatattttaaactccacaatattcattccatataaaaatatgtttatataattataatattttttttgttaacagaacatattttattaattttttaatattattatatatatttaaaaataaaaattatataaatattttttataaaaaattttaattttaatttaaaatatttaaaatattatagatatttttataatatttacaatattatacatataaaatacatatatatataatcacatttaaatgttaaatcaatataactgcaatactaaaaaaaatatattacttaacatcttttaattaaaactaatgaaaaaaattaattataactataaattattaaaacttagagtttttagcaactaaaccatctcagctatcattttacttgtacttaatcctccaaactcaaattttaatttggcaataaaaccttccaaattgtcagcaaatttaaggtgttatccggttaattgctaccatagaccgtttatgggtatactcttatacacgtggcacatttatattagtacacctaatat

SEQ ID NO: 393394 - DNA, 974 bp, Cannabis indica
tgggccctccacctcgcctttcgcgttcatgtgagatcttatccagagttcagatctatcaaattcagtaatttggtggttggcctctttctccatctattcttgaaccatccttacaccacctctccctgtgcgatggggataaacattacaagacctactcttttgggccctcttcctcttcacatcaaactctggacttaatctcgagtccacaaactctctccattcttgcaaatcaattattttttttcataaagcttggggggcttctcgagaagatggggagcgacatctttgaatgtaaaaataccttttgttagggtatttttccaatcattccacctgtctccacctttaacaattgttaatttcctatttgtgtccggtacatcaaacgcgacctgccacattcacaatagtatagttataagtacaacttataatcaatagtgaagacctcaaataatagaattaagtttacctttatctgttcccataatcggtttataaggtcttgactcactctaggccacgtaatgtcgctaagtggaatattagttcgcacccatgctccaattcgggtaacttttgccgtccctcccgttccccagtgttgtccgtagtgattgtactcaatctccatcttttttccctcgctaaccatttttgttatatcatttcgtttgcttctcccgcgagtatttttctgtgttggttcttcaggatcaccactaccttcttccacggatggctgttcaggatcaacactagatccttctggcaaggatggaccatcatcaccatcataatccaaccatgcactccactcatcgtccccacctcgttccatgatataaaagcctacacaaatttaaaatcatacattagaatatacaagaatagtcaaaataatagctaaatgtaaatatatgaaaaagactaaaataccaatacgtgtttgatatatgaat

SEQ ID NO: 393395 - DNA, 514 bp, Cannabis indica
ctgtgctgataaaagtaaactttttttagtgatagatggttggaagactgaccagctcgactgcattattcatcttctagtgtcaactttagatggtaagcatagcttttatgttacttttgtgtatgctttcaatgagttggaaggaaggaagatgctatggtcagatttaaagagcattgctactcatgaaccatggatggttatgggtgatttcaatgatatcttgttcaaagaagaaagaataggaaaaagagtgaagtataatgcaacaactaatttcatagattttgtgggaatatgccaattagaagacataaagtatagtggtagttactagtgagaggattttctcaaagattgacaaagttattgccaaccaaaagtggttagataatttctcaaatgctgaagccatttttgcagttgaggaattatttgatcatactcgtactattatctccatgtatcatgaaatacttagtgggaaaaatgttggaaataattttaccag

SEQ ID NO: 393396 - DNA, 1226 bp, Cannabis indica
tataaatatacctagcttaataacattgatctcactttcaattatttatattcactttatttgaaactaattaaacatgttgaagatgaatatgatgatgaagatgatgatagttgcagtgcttgtgttaatggtgggtaatatggaaagcaggagtactaatagtgtgaattattatgatcatgagcaaggtcagtgcatagagaaagaaaaacaagctctcctcaattttaagactgctttagatgatccaggtaaaaatctctcctcttggacaaataatcctaataataatagcaacaaccaaaattgttgcaattggagaggtatcacttgtgatagccaaaccaatcatataattaagattgatttttctagtgtttatgaaatcaatattaatggtgtgattaatggctcctcctcattagttgaactagagagtttggagtacttgaactttagtggtcagaaattcactcaaattcccaagtttcttggtgccctaaaaaatctcatacatctagttcttcctataagtggggttattccttatgagcttggaaatcttaccaaattagaatatcttgctctttattcaagttcttctgatcaaaataaaatggttgttgataattttggttggctctcacatctcacttctttgagttgattttgtgcttgcaaatgtgaatttcactacatctggccttgaatcttttagggctccatcttccttactaagcttgcgtatatcaaaatctatacttcccaaagtagatacttttccattttcgaattcttcgaattttctcgaaactctttccctcacacaaaattctatccatcccgacgcgattactttgtttttaaattcttccatgaaccttattgatctcaccttccaagaaaacatcatcaatggttcatttccaaattcctttggccataaagattatcttaggaatgtctatatgtcaaataatgaagttggaagtagtaaaggattattgaaatccttgagaaatctttctaacttaattattttggatatttccatgaacaatattggtggaaccatacatgatcttttcgaaaccctatcttcaactagaattccttggtaggtttgcgtttaagttccaacaaacttaaaggttaattcttgatgattctgtagaaaactttcccatcttgtaagtatttagtatcttggctataattggttg

SEQ ID NO: 393397 - DNA, 660 bp, Cannabis indica
ttaatttattagtttttttaagatagtaagcggaaactttattagtagtggtagagggtgctgctgctaatagagagagacgaaagtgcaagaaagtccctgctttctgagtttaaaaaagaagcagcggagtccaacgctaataacaaaatatttattacagttttgttattgctggcggcacacactaatagcgggggaaccgtcggtcattctatttatataaccaaaaatttcgatgggagctagctcattttgtctatctaccctctcttctctcttcttctttttctctctactcaatctttcaatcttttctcttcttcaatctcttctgccaccgccaccgccaccgcccacccaggggaatgccgagcgaagtgaatttggttaagtttttgttgaattttttttatatatttttcttctacacatatatttatatttatttatttatttattgtcatcgcttctaaaggtagcattgaagaaccactatgtaccaccatcaacgccggaaaaccaccaccaaaccactaatgacaggttagtttccatttattctctaatatctcttttattattattttattttgtttcatcctctttaaatccctttcaaaaatagtagtatttatatttatatttatttttaatttt

SEQ ID NO: 393398 - DNA, 794 bp, Cannabis indica
cctagtgaagtggaggctctgacttgtgatcgtagaggtgattatttgtggactcattggttttttctatttaaagtgcatcctaagcttcacatccaggtatcttcttctttattccctgttcttatttacttttttctgcaattttaccttgctatggctaccattcccaatccatctcctattcctttgtccctcactcaagatgagagtgatgttttcactcttcctgatatttttgatgactcccaccctactataaatcttctcctacgattgtttactattcgtccctttaaccatccctctctcatgaaaactctgtctcaaatgtggacctcccagtgtcgattctctgtagttgtttttgaacactctgagggtttgttccttgttacttttggttgtgaaggagacaaaaagaggatccttgataggcaaccttggcatttcgctcaaagccttactgtttttgcctctccagatcattcctttcccattactgctgaccttttgcactatatacctttctgggttcaagtgtatggaattccatttcgctgcaaatcctatgatcttgctaagcttatagcttcgggtttgggtgatcttattcaagttgatgaggatactattaatgagggcactgggccttatttgaggggtagatatcttcttgatgtcaataaatctattaggaggggcattaaaattcgcttccttaagatgggtagggaatttaccaagtggttggattttaaatatgagagactccctgatttttgcttttattg

SEQ ID NO: 393399 - DNA, 692 bp, Cannabis indica
ctttgggaggctagttggatccctcgaaagctcaactgtgcagcccacaatgtggctcgctgggcgattcgatctcacaggtttgggatgattgaattggccaattttgacagctccctgcttcttcgtgagacagaaagctgatgcggcagtttccttactttttagcttagcttacttaagtttgttagactcttaattttgattatgttgttctctatttctagtttcttgtttgttttgtggtttgttttgttttttgttgctcccttggaggtaacagttataaaaaaaaataaaaaaaaattaagatatgtttttttttcttaatatgaatattgctactatgtttgataataattgactttattggatatgttaattgaattattattttaatattgataggaaaaggtgtgtgaatccaaagacaatgatgttgagcatattgttaattttgtaagtaaagataaaaagtaaatcgttttaaagtttgttgcaaagaaaacccctttgataatgtttagtataaaatgaaattgtttccttgttttttgacgttgtatgtgttggattaaaaatcctatgtgggcacatatgtataatgtatatgctattataaggtgtgatacaaaattaagtgaccaattatgttatgggtatcaaaagtgtattaaattgtcatggaaata

SEQ ID NO: 393400 - DNA, 1651 bp, Cannabis indica
tttttggatgtaaataagttaatggagcggggatgaggcgaagtctagatatgggccctcaaacgtatgagccgtctatatagcgtaccctcgagattcgtgctcatattttgttttgagtattgttattggctgacatcctataattgttaccaatatttttttgaaacttactcccttaagttagagaaatgttaaggggtttgattggcgtctagtactttttttacgtgtcaatattactattggcttaattaaatattgtgttttatataatttaatataatagtttttaaagagtatcactagctaatcgcaacgcgacatgtcaagaagatgctaggcacattttagtgggccatagaaaaaaaattattttggactcttatttagaaacaaatgttccataagtaaacattattccaaatctcaattctaattttttatacatgcatgtaacataatatttaaattctaatttcaacactataaattatttaaaatttttcaaaaaaattaataaaatacctactataattacaatatacataatcatataaaaaattaaaattaataaagtacccactataatatttttttatatatataattataaataaaaatatatttttaaataacatttttatatatataatttaaattttagaatattttatatttattaattatttaatatttaaaatttttattatcttcatatatcatgtctatcaatactggactagaaatatttttctattccaacaatagtagactagaaaaatattgcttttcaagtccaatattattggactagaaattttttttctagtctaataattaagtttcacgttgtgggaccgttttttaagcccaagaatgttggactagaaacgtttttctagtctaatattgttggactagaaaaatacatcttttatctcccaagctattatgtctaacataaaatggactcaaaaaatctatctagtccaacattgatggacttaaaaagagattttggtagtagtgtgaatatgttcatttatattcttttgcaactttttttagaaataaagcaaaatattagagtcaaatcatataatcttaatatcaaatatagtatttgttattgagataaattctctcgcaagagggactttatagaaaactcgcagtattgaaaatgacttgcaatattatgtaagataggactcgcagtaccaaaaggatcctgtagtattagctacaagagatcttgttgtatcaaggaagacacctcacacatttaataaaattgcagaattaacaggaaaagacacgaacatactaatcgacgagaataaaacgatcaagcatttagaacgcaattaaagcaagtgttacattattttgtaatcgttgtaattagtgtaattaagtgcctattattattagggaaatttcaatttttgaccctaataatacaacctatatcaaaatttatacccctttataatttgtacaaatttattcctataattttaaaagtttcctaaaataccccctaaattaaaaattccctctctcagacgttccctctctctttctgacgctccctctctctctcgctcttcacgatcaccgaaccccccccccacatttccctctc

SEQ ID NO: 393401 - DNA, 865 bp, Cannabis indica
aaaggggtaattttaaaaagaaaatgtggaagtaaaaatgacaatattaaaatagcaacccttaatgtttttgatcatatccgccatacatatttttcctatttatagaacctcatagatccgagatgaggtaattttttagaattttcataaaaagattaaagtttttggaatttgaacagtaattgagtgatttcttttttagaagatttttacttaagaaaatggagtatccattccaaaataaataaccatgatataaatcatatgatcttaaaaaaagccaaaatctagtttttcagagggaggaaagtacgaaccatggccagtcaaagaattcacgggaccgtccttagatggtacttgttgctttggattgagtccactttgagttgccaattcaccattatttccattgggaccgtctccaagcctaagagatatccaatcctcctcgccgatgctatttgacacatctggatgatctctaaaatcgggctgcaatgaggaatcagaaggcttggatggaagaaataactaaagaggtgggtcatcaccacccgcaaatgccaatggattatcaactaaactatcattcatatcattatctaatcgacgggtgaatctcatggacgctgcgtgaggtgatcgagagggtgagactcgaggctgtgacatttgggagtcagaaaagctggaagtggcctccgtttgggttgtcgatggcctgagagagccctggggccggctggtcagaagtaaagcgagaggaaagtcgagaaagagaaaattgaagagatggagaagagagagaagaaagaaaaaacatattttatttatttatttttcattttaaaattatttt

SEQ ID NO: 393402 - DNA, 1510 bp, Cannabis indica
aattatataaataaatattaagaattgagaacttgtcaataatataaaatgaattattatatgcagtatgataattcatgtggtgttctatgtttagtaccaagaatttatttgatctgctgaaaatagtagttaccgagtttgatcttctttttcaattctctcttcaatctatgatcatctccttcaatgagaatctacacagactcgtgtggttttctgcaacaaggtattttgacgctcaagccagtaatttatcacaataattgctcagtaaaatctagagagaaattaagtggtgtttggttggaaacttggaaggaatgaaaacataagaatattaatgggaatgggaatagaattaggaatataatagaatcaaacttaaaatgactttaaaaaaaaaattgaataaaatttaaaaaaaaaaaaaaaaaaaaaaacttactacatcttgcattgtggaatggtcattttgtccatttcaaaatagaagtcattctaccaaaataataaaaaaatattctattagaataacattccaatactttaatagcatgagaatcaattatatggaattattcccattaatttgtttactaaattttagaatgagagaaactagtggaatccacacaaattaaggaaaaggttcccaatttttataagagcattgctattgggcatcagtggtgctcactgctcagcaccttctataggtggcgctttacgattggttagtgatattctctaaaacctattttcttaagttatgtgggacccaatacttaattaaaccaataacaatatgacactaagaaaaatgccacgcactagcggtgccttttagccgttctcttttcataaagaatacttttctatttctttaactactatatttaaattatatattttattaattaaaaataaaataaaataaaccaaatatgcccttcaaaaatataaaaataaaaaataattacatgctttaataatgacaattcaattaaactaaagcattctaattacttttttagttatgcaaactaaataaaatgattctaatttccttaacaaaataaaatattattttcaattattttatatttaaattgattgtctttcattgattgttctgattccaattagaatttatgaatgcaacaaaataaaaaaatagaaataaataatatttctttttatttcattccattttattacctccaatcaaatgtcaggaaacataggtcctattcatatcttatatttctcctatttagagacggaagaaaatcctcaactagtaattggaaaaaaattacatgcaccattttttgagaaagaatttgtattttaccccaaaagtaataaattataaatatgtaaaaagaataattacataaggtatcattttttgtaaaatatttacatttttacgtttaaagaatatttttttacatttttacggtttttcaaaaaataacacgaaaacaacataaaatcaacaaga

SEQ ID NO: 393403 - DNA, 1010 bp, Cannabis indica
cctttaaaaaaattaaaagtgagaaaaatagttgtaaaagagaatttttaatggttcaagatgccaacaaattcatgtggaatcttcttaccacttcacccaagatcatattaaattatgcaccaaatttcattccacaccatgaatggatattctctaatctttactttaagtcaagaagtcaagagatcaatctctaatttttaccattatactaaagtattagaactaaatttgatttttctttaaatttgacattctcaaggtttgaagaaattttggttcaaatcttgaggttgacattaattgcttataattttggcacatagaagaggtaatgggaggaggatggaatagtcatcgataatgtgagttgtctttgaaaatttcatcaacttgcatgacctattgatggaggaaggcttggcttggagatgaggaggggtgttgtgggtggcgacaccaggcttggcagagctggttcaaccttcttttatctcccaaatatgaaatgaggtgtgtggtgcctcttagtctggtggcattgttttaaattcttcttatttttagcttgttttattttagtttgctttctttgttgtaatactttgtatttagcactcctatctttaatggaaaatataaaaaaatttaatatattttacacaaaaagtaaatataagatatatttgatacaatttttagtattatgctgcataatggtaaaagtgaggtacaaaaactaatatttcataatgttcatttaatttttcttgcaaaaattaaaaaaaaaaatacttgatatattattaatgggctaattagcaatttttcgtctcgaacttttgacatataccaaatcatgcccccctgaactttttttgccgttaaaaaattccccttgaactattgagattgttagatttaaggacttttgtctaatttcattcaattttactgttcagtaatgtttatatactaatgatctaccaaatcatgcccctcaaact

SEQ ID NO: 393404 - DNA, 994 bp, Cannabis indica
cccgatagtgaactaataaaaaacaaaaataccaaaaatacgatatgacccggaaccctccaagttgcgctaccatgatatgcacaatcaatgtcgaactcttcactcattgttcctctactttagcccttacccttacctacacaaggtagcaaattgatgagtcaacagactcagtaagacatccaataaaatatatatatatacaatgcaatattgacttgtacttaagctctcctaagcccaagtacaaggctcaccaaggctcaccaaatgatcactgtaccatatgcactgaagtaccgccttcgtactagtgttgctagggccaaattgtatttccaggcgctacttggtgttgtaccatgatgagcccatatttgtcttattaatattcttcaattgattctttaaattattgattagtgtgattttaatttgttaggctattttaaagactattcatacatttagagtctttcggagagattttagcatatttttgtagaaaatagtggaggccggcgagctcgattttacaaggtagaacttaatagcaaatttggatgaccttagaggtagaattggacttggagctcaacaatgaagttttatatctcgttcttagcttttcagaacatcttgaatcgtccaattttgagtaatatcgagagaattatggccaaaatatatcgtcgcagcagaaaatttctgaaaaaaagataccgaaagaaaaaagatagattttcaagaagagttgcaatttttttatcttttatttaaaagacgagttatcttttcttttagtgagatatttcctaatactattataaatagaatcctaattctaaggggatttatctattataaatagaatcctattataaatagagtccaaatgagttaaatttgaatgaaggtgagaaaattatttgttgcgtgttgtagccacaataaatttactatttttttttaatttcaatacttccaatta

SEQ ID NO: 393405 - DNA, 1105 bp, Cannabis indica
aatttttcaaaaatttacagggaaggtactgtaactataacaaataacgttataaaaaattaaaaaaaataatttcgacatgtaattttaaatataaaaattgactaaaaggttgtaattactattatttatttgttatgagagttaaacattgatgtttatttggaaaattactaaaaaataatacctttatttttctactcttccctatttttatttatttttcaatctatttctgcaacaacatttggtcgccggcgacgagaagagaagaggctcaagtcacttcacgaccgagatcttccttcttcttcaaggctcttcatcatcatcttcttcttcggtacaaagatctagggcactaatcattagcaggtgatcagaggaggagctgggcataatcagagcctgggatgtgtagaaaagctcatcgaaaaagatggggaatttgttcgtgaagaaacccaagatcactgacgtagatcgagctattctttctctgaagacccaaagacgcaagcttgctcaatatcaacaacaggtataataaaactcatccatagttttcaaatgttttgttttggcaattgattagggtttagtaaaaaaaataggatttttgattgagagacaagttaactttcaacactaaataaccaaaagaaacaaaatttacagttgtgtagttttggaacttaaaaaacccaatgcaaatctccaatacaattaacatttgaaattttgtatgaaaagattgtgtttcatattattggggcttcacttcattgattcatttagctataattgtgatatgaattagttagtgttagtaaaaatttgtacatagaattgttaagtgggaatgctattgagtttttgcttttattggctagaagataatagatattttatctgtgtgaaccactataataatgtccagtaatgattcaaataccaccatagtcaaagaattgagaaggtaatagcctgctcttactttgttttggaagttttcatccaactattctagcaaattagtatcttcttggtttactttcattgtgtggagagggctgcacaattaacatttgaattatagttgtct

SEQ ID NO: 393406 - DNA, 690 bp, Cannabis indica
aaaataataaaaaaaagtttaagaaaatacattttttgcgattttggatgtgggtttgggatttcacgatttgggattgggtttcgcgctatcagtttgggcttggagtttcgtcgaaggtggtggttttgttggggtccctgagtttcgtcaatgttgcatccggtggtggtaaagtgatggtgacaatcaggttggtgtgggtttagggagttagagaaagagagattcaagagagtgagagttagagggagagcgggagtttcacatggagagagtattattggtattaagggtttttggagtattaaagctatattatttaaggtgaaatattaaaagatcttacacttattttaagcatgccttaacaaatttctcaaaaaaataaaaataaaaaataggtaatattatttttttaaaaaatttactttttatcttggtggaagcaggcataccacttctcacttacatgatgacatgtggcttgggaaactcattttcacaagaattaataggcatgagcgaaaaacctgttgttgctagagtcaaatatttaacgctagaagatctcatattattaggccatctccaatgagactctaaaccctaaaccctaaattttttttcatggcggtgttcgttatgcttacaacatcatccctataaatttttaaaaaattacgaata

SEQ ID NO: 393407 - DNA, 1063 bp, Cannabis indica
acaataactttgtaacatcagattttttaccaatgaaaagttgaagattttttaatttatttattttagaaaaaaaaaaggactaaataatgtatgcaaattggtaattcttttttatttatttatttatatgatacaaaacatgtgcttgtactccgacagtaccccgaatatatatctctcatctattaatataaatacgtactcatcagttcttcaagatagtcaaagataggattaacgacttagtgatgatgactactatatatggagtaggtggaattcgattgtgagtgatatatgtatatatatagtatatggaaagaagttatatattaacttatggtttcaacagaaaatcaaggattgggtgaagggtatcaaagacgtagctgtatgtcttctctgttgggtgtattgaatcccaaaacatgtacttatttgcatcagggcacacatacgaaagtgggttacacaaaaacgtaacttcaaggtatccagttccacaacatcccttaaagatttccttcaaacctgtacaacaaccaaaaaaaaaaacatatatatatataaatatattagaaatccccatacgttcgataacttaattacaatctttttttttttcatttaaatcaattcacatcattttcttcatagaacttaaatagagtaacagtactctacatacaatttgtaaaatatttaccaaattttgtaggttctcggatcaattccatcaccggtccatataaatccacataggctatccttgcaccaaaatttgccaagctactctgcatggaaaccaattgattttggagaagtttattgtaatctcttgctgcggaattatacttgtcgatgcatccacgtggctgaaattcattgggtgagtttaatgttataacacctggcaagcagcccattggaggaagcccacctactacgatccttcgagctccttcgccccataaatcctttcgtttaaaataatatttaaaataaatatggggtataaattaaaaataaaaaatcacaatatttatagattataattaaa

SEQ ID NO: 393408 - DNA, 1093 bp, Cannabis indica
ttatttgcaagtggttctcttggccaaatcttcctatttctctctctatatatatttatattcagatatgtagtgatttgtgttaatatcaaaaaaattaatgttagttaagattcattttgtttgtgttaatatcatttcaaacagatttttaaatatatattcataagtgaagtcatagagggtctttttgccttcaatttttttcgacctcttttgctttgtttggaacattttcggttttgaattttcttaaaactgaggctaaacgacctaaataaccgaagctaaaaaaatgtttttgtaatagtagacacgtacatgattatttttaggatgaaacggttggggttgttgctcaagataggcatgtcaaaaaaaatccatttagttagagcggattggagctccgatctaacgaattccgaaacataattatatatagacctcctatctctttttgccttaaaatttttttaatattagtctatataggcccttaatgtctaaactttgacagcaaaatagaacattttttttaatagaagccaattggttgaaacttgctaaaacatgatttaaaaacttgtaaaagcgacagttgtagatcaaaatataaaatatagtgatgagtagttatattattttaattgaaatttattattttaaaaaagagtgtcatgtgataatgtttgattaataatttattttaagtgtgcatgtcattatttgaaaaatatgaaattttattaaaaaaattaatttgagtatgagttactcccttttttttattttaattcttgtatgccatttctcatttttgttagactttttatttagacttacattgagttttataagttttattaaaatttaaattgattggatagttttttgctatgttagtccatatgttagtgatcaatagttattgggcttagtatatatgtgtgtaaagtctagttatagcaaaagtgtgagcttttttagttaactgaagtctttgatgagtagacccaatctaactagggttatgtagctaagttccctctctaactctatagatacatattgtctcatcacaattgtatac

SEQ ID NO: 393409 - DNA, 1378 bp, Cannabis indica
tcaatacccttgtgagagactttgtggtccaaaacaataccttcttttaccataaaatggtatttctcccaattcaagaccaagtttgtttcctcacaaattatcaacattttctccaagttagctatacaagtgtcaaaagatttcccaaatactgaaaaatcatccatgaagatcttaagaatgctttccgccatatttaaaaagatagccattatacacctttaaaaagtggcgggagcattgcatagtccaaacagtatcctcctaaaggcaaatgtgccataagaacaagtaaaagttatcttttcttggtccttcagagctatagaaacctgattgtaacccgaataaccatcaagaaagtaataaaacttttttcccgccaaatgatctagcatttgatcaataatggtagcgggaaataatccttccgagtagcattattcaacttctcataatccatgaaaaccctccaaccagtcacgcttctagtaggaatcaattcattattctcattagccaccctcataactcttcctttcttatgtacatattgaatagggctgacccatgaactatctgaaattgggtacacaataccatagcaaactaaaactggatttgaagggcaattttcaaatgttcatccccacaataaacacaagagatctctgccctttgaatggcaacaattggttgtacaatttctccaatattcatgttcttacaaaatgttggtcaatgaggccatttgagcagttagagcgattaaagcatctacttcaagaacacccgctacttttcgacttgtaggagctctatcgttgaccattgatagttgttgctagaattctttccaaaactcaaaggcttcattgtaagacttagaaagaatgactccattggccgaagcatccaacactattcgagaggatctagctcaatccctcgaagaaaatggaataacttcaaccttagagcctcttcacttactccttgtagcttgaaaaaatcactcacctccaaaaatgagcgaatatagagatgaggatcttcagttggtaacccgctaaattaaccaaccgtttgaatcatttagaatatgacaaacttgagcttaaagtgaggtgcttgaatttcgggtcgattaagctcgttgaacatgggtgcagcatattctcttagttattcaagtcactttttaatatactacaattcttgcaagtatttttattgtaatagcagtcatatttatagtaagttgagttacaattcttttgattaaaattcattaccacatcattctctttatttttatttattttaagttgtgattagttggttttacatattattttgtttgtaatccctgtgg

SEQ ID NO: 393410 - DNA, 797 bp, Cannabis indica
aggtttgggttttcatttaggtgagaaagagagagggaaaaatttgctgtcttttttatttatttttttaaaaggctatttattattatttattaagtttgggaacattttccgagtactgattatttttaaaaaaatattaaaaaagtaagctttagtgacgcgccagacatgttgcgatacatgtacccagtcgcaactagcgtgtcactgtaggtcaacaatttttttttaaaaaaaaatatttaaattatggaattaccctttagtgacacacattgtaggatactaatatcaaatgtttagagtctaattgtgcatgtcactaaaaatcagttctaaatctttagtgacctacacttttctgcgtgtcactaaaagtataaattgtagtagtggtatctgaatcatctctctagagctagctatctgtacaagggtagaatgttgtactaaacttcatttttgtactcatggctttctatagactttgttaaaacctagagacgaacttcaatttctaatccgatgtaatggactttagtgttgcgtaaggtcacactatctccctcctatattttccatactaactctgacaccaaaataatatcctgattcatattcaaccatacaaaatcagacataattatggttttaagtaatctaattacaaaatttcaaataacttctttccatttcactcagaaaaattacaaaaggttatttattttaagctcctaatatagtgagaatttgaattaagccttatctaaaaattcaagaagaatttaatacat

SEQ ID NO: 393411 - DNA, 729 bp, Cannabis indica
gatgagagatgagaaaacaaaatcacgcttcttaaaatgatgctgcaattttcttccaaagataatttggtagtttatttgctataaaatcattttggcataattggttaatttataatgtacttggagatattcaaattgaatcatgtgtgtaataatgggttagaagttttgtatgtagtgatgcttgtcattgctatatcatcaacagtctatcgagaaaataatagcctttataggaactttgttttaagtaggtttggccttaaaaacagaaaagctagacaaagttaatattttattaaaaaagtggaattttgccattacttttttattttatttttttggttagtggttacatattaaaagaggggaaagatagaaaaaaaaaaggagaaattgaaatcgtagggactgtgatgaaaaggagaagacaaagagagggcctcgagctaagcaggcattcgatccggaatttccctctcccacctccaaatgtcgggtattctcttgttcattgttaagtgtcaacaactttctattttaagccatgaattttattttatgtcaatttttcttcttcttcttttttttttccctatagattagaaactaaacaataaaatatatacactagaacttaagactaagtaaattatattctaattgagaggttataactaactagagttatactaaaaaataaggaatcatatatactgttttttt

SEQ ID NO: 393412 - DNA, 571 bp, Cannabis indica
aaattaaaaaaaaaaaaaaaggacaagtacaagtctttttctatttagatataaatatattttaaattaaataatataagaataaagtctcaatctagcttttattataaatttataatgccttttattttgtccaacttgaaccagctattatatggttggcttgtacgtacttaataaataaatcttatttttgtctcacatttttattattattatttagaagtattattttatgattggttaactatatttttacggtaattataccgacaccaaattgtaccatattatgaaatataaataaataataagtggaattaatattaatggaaaatataaaaatagagttggcatagcattactggtgcttagcactctctgtcatgtcatattgttatattagtgtaagatcttatataatttagaataaataccattttgaactttttattttataaaagttactaattggaccctgtgttttgttaaatgacaaaatggatcatgtattttctaaaatagtacaaataggatcttgaattgattttttgtcaaaataaagtttaat

SEQ ID NO: 393413 - DNA, 527 bp, Cannabis indica
caatccgctaccaaaaaatagcactattcattattaaaaaattgccactatccgcaccacaactgcaaataattaaatataaaaaaacataaccaattctcatatgttatgtatgagccaaactttgaaaaactacatatcacaaacaattaaataaaaaaatcttatttgaaaacaaattaaactactatgcaatattataaataaataccaaaacaatgtaattaacattatagataccacctatcaaataaaatcaaatgaaaaaaataaggtaaatagtaatcaaaactagaaaactaatacagtatatactaaattaattaaactcaatcaatcggattccacacaccaaagcaactgaataaaagagatgcaaaggcctggtaagcaaaactttctttgacagtaactgcctttggaatgaattcttactattattatgtattccatacatatgttgattgaaactttaaattttacttaaaaaaatacagggtaattatatgctacacctcctaaaaaat

SEQ ID NO: 393414 - DNA, 973 bp, Cannabis indica
aagccaattttgtagtagtgtagatttgaactattgtgtagattgaattggatccactgctacaaaataatttttcccgatgtttttaaacagtcgtttaaagtattttcgttgatttctataaccgtcgcttatacgaccgtaacgaaatgggtaaaataagcgacggttaaaaaccgtcagtgaattttctgacaattaaaaatcgtcgcctaacataatcgacggttatagtatttatttatgtaattatacaactatatatttcctatagctaataaaaaacaaaagagaacaaaaacaaaatggattgttatttatgaaacctttgaaaagagaagagtgagtagatgagttgttagttatggaattaggtgttgaatacttggaaagagagagttattattaaatgtagttaatgcccaagaagatgaaatgaatgaccaaatgtgatttgagcacaataagaaaaatgctgcatgtgtttttgtgtgcatcatcaactcatgctcatgcatttcttgcttctctatttttactaacatatcataacattgacttcattgtgttattagctcttcctttttgactttgaaactgtcaacattttcggccgacagactcaactcttattctttcttcatatatattaaagagaaatattgctaaaacttggtgcctagtacgatatggtgcactcttgagtgtaattaattattagattgtatataatttaattattagattttatataatttaagaaaataatttttttggagaatattattaattaatctgacacttataaaaagtgttgagtaatactgatgcccaataaaaaaaattactaaatggtagcacttgtatttagtactctcttcgatgtcatattactattagtgtaattaaatatcggatctcatataacttaaaaaaataacttttaaagtatatcgctaattaatcgtggagc

SEQ ID NO: 393415 - DNA, 860 bp, Cannabis indica
ttctaataaaaaagtcgttctttatagccgaaggtggataattagaaggattatttatttgttaacttcttctacaagcaattaaagatgaaaacttcttaccttttggggttgacctccataatgttattgttagccaattgttgcagtatgtgtttaagaatcgcaccactgcttctgcaaaagtgtggtggacggcttccattccgcttacttccactgtaaatcctacggaaggccccaacaccaagaccacctcgcaagtagatcttccttgcaacagatgctacactaacaccaaggtctcgtacttcctcagattgttttagttcctgaacagattgacgtgctggtctaatccccatggactgtcattcaggattaacttgggagcctcttggttttccattacttcctcctctgagtcaatctctttttgacgggaatgcttaatcatagtttttgtacaaaaagaagagaatccaaccagttagccaccctaactacctagcatagaaagagagttgagggtcctccctcataaactgcttggagaggtcccaattagactaactatcaaaaaacaagaattcctaggaagtactcgttccagatagaaagtcacgaacaacgcaagaaggaggataacaaaaattagcatcaaacccaaaaacagaaggattttgggcgaaaggaagaattttccagcacctttgccacaattcgatttactccaaaaatttctaaacaaaaatttcgaaagattatacagttcgaaaaattttaaattactacaaaattaatatatattatatatattataatttttaaaaatatatataattaagtgcggactggat

SEQ ID NO: 393416 - DNA, 1261 bp, Cannabis indica
ttttcaaaaaataaagccaaacagtttttaaaaaacaatcatgtattacaagttttcccatagatttttcagatcttaaaattttgtggatcttttgtatatattttttcataacataaagagataactaaaattaacaaactaatttaagggaaattttatttacaccataaaaatttctaaagacaccccattttaataattttaattttatataaaatttatatatatttaattgtactaaattttttcaacttttttcttccaattcatatccttaaaaaatatacctatcaaacaaaattaaattatattttaaatattctaacaaaaaaattaaaataaaaaattatatgaaattttcttagaaaaaaataaaaaaatacatacatgagttagaaaaaattatgaaaataaaatcaaaataagtattgaaattaacataaaataatgtgagaaaaaaaatgtaaaaaaatattaagagtaattcttaaaaataatttaagtttatatttttttttaataatggggtgtatttatcattttatggggtgcaaataaaactcccctaatttaattatgaaaagaatcataaagttcaaattttagttactatgaagatctaaaagtttacctgaaagtaaaccataaaataccataaaagtctgttaggtcattcaaaaagttgttactgtgtaatgaccgtttctgaaaaataccataaaattgaactaaatattggaaaatgctatgttgttctattatcaaaaaagtcgaaaatgtcatgaatgtgttgcaaaagtcggctcatgtatatttactttattttctaattctctaatttgtttgtttgttaaggccatgaaatgatggtttggttattattatgactttcattttatctaaataaatagctataaatattttggtttgccgacgataaactataattttgcataaaaatatgtgagcttacaccgtacgtacgcgtagagatcgaaagttgtcaaatttctggaatttgtgtcaaattttaatcaaaaattgacttatgagagcaaataatcaaaaatttacacccactactgttttttccccatttattacattattactgttgcacggaaaatacaacttttgtactgttctttttttttttttttgtactgttctttttttttttttgtactgtctcttttttttttttttttttggtcaattatgggggtcctttcccatcaatccttttttttttcttttt

SEQ ID NO: 393417 - DNA, 1455 bp, Cannabis indica
gcatgtatttgtctcagacaaagaatattactgatctgttagtgaaactacatatggagggtgccaaatcaagtccaaatccaacaagttcaagtgtcaaactgtctttaaccgaaggggaaccgtttcaggacatcacattatacagaagcactcttggtgcacttcagtatttgtctctcacaaggcttgttgtagctttcataatcaaccaactaagtcaatttcttcatgctcccacaactgtccattgggaagcttccaagaaattactcaggtatttgaagggcaccattaaagatggtttatggctgcgaccttcatctcttgtgactcttcacgcctactcagatgctgactaggtaagttgcacagatgactgtcgatctactggtggctactttgtttttcttagagacaacttgatcagctattctgccaagaaacaacatgtagttgcacgttctagcactgaaagtgagttcagagcactcgcaaatactgctgttgaactcaaataggttaggtctctattgtaggaacttcaagtctcaattgattaagttcctgtcatttgggttgacaatcagagtgcctctgcacttgctacaaatccaattttttacgctcgatcaaaatacatcgagatagatcttccctttgtcagggatcaaattctggataaacaactctccgtttgatatgtcccttcaatagataaagatgcagatgtgctaactaaagccctatcagctgaacaatttctatacttaaagtccaaggtaaaaatggttccaacaccattttgtttgaggcggatgttaatatagttgaataggttctattcagccagttaatacagttagttttgtagctattttttcaactatattctggcttttatttctttggaactaattatgttacttgtgtccttgttgtatataaatatgtttgttcattcattaataaagtagttttgctttttctccttgcttatgctttgtttttctttctctcctacctttgctctgttctttcttaaacttcatattttgaggttctacagaaggtaatgcctccaacctttcttgagttcccagatgaaatgatcgtatctttcacctcgaattcggtcgagatagaaaatgatgttgcaccttgggctctggggaaagtgtatgtttgctacttatttcccaatcttcgaagctagaatttagaagatcatcactagatgaagatgggctagcacggggacaagggtgatccccgtataaaagttggagcaaatcctgtttgatatgatgtttgtctccccaaaactcaccaaggttcatctacaaaaggtggagacaagaagtgagagtggtcggagtaacgaatgaaaaacaggttgtatataccgactaggttcgactgagaaatcaaaagcaaaggtttcacccagaaata

SEQ ID NO: 393418 - DNA, 2196 bp, Cannabis indica
aattataataaataataagtaatattgtaatgtattaattattataattataaattttaatacaatgtgataattgtattattttatacattataatattggagatggacttgggtccctgaaccttttttcttaaaaaaaaagtcgtacttataatagatagaaaattagacctcgtggtcattacagaataagtttgtaagatgggtgaaagtggaataaaaccaaatttttggtgggcaaaggcccattttaccacattataggctacatagttacaagatctactgatattaaaaaaattacaactaataaacgagtgagaagagctattacaaagtgagacagttttcaattgcccaaagagaaacattccctttaagagcattgataactactctagagtcgctctccacaatgataaatttcaatcccttcgccaccaaaagagccaagcagcaagccgccgcctccccacataaaacatcagaaaaatttaaatatcaagccctactcgaacattgcaattcaacttgatctaatcctgtgggagtggcttacaagcctcctttgagcacgaagcggcggaagggaaaatagtagtatgtaaatctgcataaaaagaacaaataatgtcaatacatttcttcacatcaactggactactattgtgtactttttcaatgcgaactctctagatggtgtcaacaacaatctaagcataaaggaagacatcccctcaggaatgccccttttattaagatcccaaataaatttgatctagtcccacatacgaatgccagtattgaatgccctttctctcgaatgcctggttccctaccctaactccagattctaagtacaaaattaggctaaagttaaatttttggtaaaaataatataatttttcagtacttacataaatcaataacaaaataatattactttaaataatactaaaataatataatgtaataaaacacgaataatgtgtacgttttactaatatactaacaaactcgtgttgtgttgtgtacaacgcgcgggaaatatattaggaagaagatgtggaagcaccagaagctgccacgtgacatttgtttgtttttaatattattttttccaaattttcaaaagtgagacactgacactagggacggctatacagtttacttctgcagtagtacactgtacacacaccccaccattccctcaccctgatcaacttcaatctcagcccatttccgccattaacacatcttcaccttctctctcatcatgaaatctcatcaaccaaagctcaaaacccaactcttctcttgtggctttttcggccattgtactcaaacagttctcagccccaccagtgctacacctcatcctccttctctccctctctcctctgccgaactacctccaccgccgccgccatcaacgtttcctccgacccaacctaaccttcaacccgaatccgaatcctcttcttcctcaacgtctcagagcttcacacaatggcgtttcccactaccaaactgtccagttcgtaatatcaatatacgatccgaatccgatttaacaccggaggaaagtgatcagactggtcaccattacggcccgccacctatttctcccacgaacctccaagaagtgttccacgcagctgagctccaactaagcgtcgggtcggattcggatcagttatctgccctacaacttctagagagatctctggttcccaacccgccgaccgatcctgaatgcccgccggatttgatgcgcggtgtagtggggagtttaatttctcaggttggggcgaaacctgcgtcgaagattttgctggctctctgcttggcggagcgaaaccggagagttgccgtggaggcgggagctgtagcggcggtgatcgagtcagcgcccgagttggagggagcagcggcggagagagcaatggcggcattggagctcatgtgcactgtgggcgagggagctgcggcggtaagggcacacgcgcttgcagtgccagtgatggtgactatgatggggcggagttcagctagggaaaaggaatacgcaataagtgtgcttggggtgatttatggtggcgcgtgggaaggagtggcagaggcagcaacgactgcgcccgccgaagaggtggctcgtgcggtggagttggctttggaaggtgaatgcagtggt

SEQ ID NO: 393419 - DNA, 1018 bp, Cannabis indica
agttgctctgttagttcttagaggaatttttgtgtggaattctacacaaatacaaaaaaaaaaaaaactgttttaaagtttaaaaataaaaatattcatatattttctaaatactattaaatttaaaatttataaactagtgacgttttataataaaacatacaaatttgatattttaagtaaatgttattaatcaaaaggtcatttactcattctagagtgaaatttttatcaactgttactaaaataatgtttttacaaacaaatgttacagaaccaaatgtcactataattaagcttaaaaacacaaaatacaaaaaaaaaaaaaaaataactcaattaatttaagaatatttttataaatacaaagaaaagaaaacaaattgcatgcatgaatacaaatttgcagttttttcaaaaatgttatggatttgaacttttttatttttttaataaaaatacaagaaatatttatttttacgttgttttcacaaaatcattatagtgtacgtactagtacgattatatatatgttaattaattttcatgttggtttatatttttaatttacgagattccgtaaaattataattaaaaataattcgcaaaaatggtgttgtccgcttattatatgcttacattgatttttaagtatatgttaaaaaatttaaagtcttgggttaaatcgtgtatgaccaattcacatagtttataaactaaagtcaacggtcaaccaaactgaatagttaatattgaaacccaaaaccaagtcttacagaaaagctattacgcgcacacacaaacacacactaaaaaactataaatacccacatctccatccttataaactcatcatatcatcaacactaatattaattaattctctatacattataaacacaatattcttcaagtacaaaaagctatacacgatttctatagtcaacctaatacaatatttatatatatatatatagttattgatgatggtgatgacgaaagtgagtggtggttttgg

SEQ ID NO: 393420 - DNA, 1133 bp, Cannabis indica
aaaatgcaaagatggcccatcttaactttccacaaaacaatcaatgtggttggatgaaaaattatttagtgataggttgacatgggaattccataagagcataagaccaccaccttgcccttgtcttggaacctctaagctgtgagtgaagtgtaatttattacgaaacttatctatactaccatactttaacttagtttccataataaaaagaacacagggagcctgctctttgacaagtaagcgtaaatgcctgaatacactcgggttccctaagccccgcgcattccaacttacaaaattcatggttgtgcatggtgttgcttaacaacaaccgttggaaattcagactgctgttctcttgaatccgaaagattgttggaaacaggcagggccaaagaatagtcagtaggtgctgaaaagtctgactgaccatgaatggcattagatcgaaaatgtttgagaacattcctaagtgattcagagtcgaattggcatttgaactgtttgttaggattgatattctctaagttaacatcaaaggcaatgacaactttgcctttggaacaattctaatgtgacatttgattcaattgagggttgagttgtgacaacattgttgtatgaaggagggatcgatggaaatggtgtagacatgggtgggaaatggtggaattctttattcgaagaagtagcaggcaggtaagtggctatcattggtgaagttagaagataggaagggaatgggataatgactgtctcatcagcagtagtggtatcaatatgggttggatttgttggtggaattggagaaaggatgccaatagaagtagtatgatggttattttgtggcattgcaattgtagaattttcttcctcagttaaatttgttggcagtggaagtggtcttgtggagagataaggaatagcagcagtgaatgatttttttacaagtctggtcattaatggccatactccacttttaaagaaatcaattctgtaacggccataaccagattcaggcagaggagaaccaatcatagaagggacatacgttaatgatgaatcaatgccattgtagatttgttctaagaacttatgacaagatttaaaggaacttttatccaaaatct

SEQ ID NO: 393421 - DNA, 767 bp, Cannabis indica
taaataataagaaaataaaaacaaaaacaaaagaataaataagacattttaatttatattgatagagttgtggaaaataattatcttgaattattatatacaatcactgtgattgtgtgtacttattatttaaaaaaaaaaagagaaaattaaggaattgacaactgatatcaaaagagcctacttgtgagactcttttcttgcaaggaattcagagcatgacttaatattaatttatgttgttggtgaatgctctgtatttgcgttttctgttttgtggaattatttccattttacatgtagtcattcggtaattatgccacaacgagaaatttataagttttcaaacttagcgtcatcttcgcgtatattagaagttgaataatattacagttagtcaaagataagatcatataaacatgtgccgtaacttattgtcaaaaaatttagaaatcagtctattttccaatgttcagtctctactatctgctataatatataatatataagactctttagctgtggagatttaaaaatatattctatttgtagaaatttaaaaataaaataggtcttattgcattttgtgcatataagagggggttcatggctactaaaatgtagtatattattactactcatttaatgttatgtttgattgatgtaaaaaaatactcatattttttaaaaaattacacaatcaattaaaacactcattttctttttaaaaaaataaaattaaccaaaaaaattcttttgatatttta

SEQ ID NO: 393422 - DNA, 812 bp, Cannabis indica
gttttttttagtgtaaaaataactatatgaaaaattcaagtaaaaaattccaaaaaaatattagagaatggaaataggtcatttctttttttcttttaagtgatggaaatcgtaattgatgatgaggattaagataataataatataaccatattgacttaaaaaccttttgggactgcaaaaagaaaaacatttgagtcatttttgttgtatttatcctttgaaatatgtcactgtgacacgtgtattgtgtctgtctttccattccaaatcccaactaccactcctaacagtcaatttaaatttaattaattaagcacattttccactttaattattttggggagcatctaattttcattaatcttaaaattggcccctcttgtctttaggaatagactttacaactaatcgttatttatttcttatgctctcaaaaaaacttgatgggtacttgaataaattcttattaaagaaaataatatatttaatccttttttttaacaaataaattcttatgtattttgaaaaataaataaataagattttttattaaattcttggacgaaagtttttgttttgttttaataacaaataaattcttatttaataacaaataaattatttgttttgtttttattatttttatactataattgtaaaaataatattttaataacaaatttatattattcttattaaagtatttttactggctacacgcaataaaaaaaatggaaattatttttgggtctttttttatttttacacttttaaaaataattttttttttttttgttattttaacttaa

SEQ ID NO: 393423 - DNA, 1089 bp, Cannabis indica
gaccgtgtatgtgatagggtatcactgatttgtaaaaattaaccaaaaacctgacaagatgataagaagtaatttcagctgcaaaacaaatttaattgaagaaaaagtgaactgaaatgtggaaaggactagtaatgtacctcaaaagctgccaatggaatttgcccatctatctactactctctcaacagttaaatcttccgaaatagaagagtttgaaattggcagcccattttcacaatagcactctacagatataccagccatatcaatgcttatgcttttggggtgcaagagcattttctgtcaaggatgatcctaattgaagcataagagggtatacaggactaaactccttgtctcctctggccctcactctggaagcataatcatccagagttgcttttatacctttccaaacctgatcttcaccttgagaatctagccacaatgaatattgctgtggggtaagtctgttcctctgaagtggcgactgcagttcttcgggacctcgtgtgtagagatggtgaagtattatacttggtggcagatcttgaagaagaggagatgatgccagttgagatgtttccaagaaaataagagggcggaatgctcggagggctctgtatggtgcaccgagtgttcaacaggaaacagattttggcctacagctaattcaagctcagccatatccctagccatcctcagctttcctgactctgaaaggggtctgataagagaagcgtgtctgataaagaatattagaacccttgaagccatgctcctaacaagcctagtgcatatattttctactccaatgttagcagcattctttggaggcaacagcctaaataaaaattcacttcggaagtgaagaatacacttttgcaactcgtccatataagatgatgcattgttatccattgcggcatccaaaccaagcatgccgaaattctgttcatgaagttgcaagatgcaagactctagacgatcaaccatagcttggaatagggatgtcactgagtcacaggcaacctcatatattgcacctaaagcgggagacagcacctctacagcaatagcaggtag

SEQ ID NO: 393424 - DNA, 836 bp, Cannabis indica
ttttgtatcaattactcccacccctcttccatcagtagcacctcaccaaccgtggcaagcccctccccaaactcgattgaaaatgaatgtggatgcagcagtttcttcaacctgtaataaactggggtttggagcaataataagggactccaatggacatgttcgagcagctctttccgaaccagctgctggtaacttcaaagctcatgaaatggaggctaaggctctctaccatagtctaaattgggctcataacatgcatcttcaaatagatatggtggaatccgatttgttgatggtggttactgctttaaatggtttaacatccagaaatttagacttcaatgatcttatttcagatgttaaaaatcaattgtcttttctccctaatgtttgtgtatctcatgttcgtagagatgcgaaccaagctgctcatggcttagctaaacaagcgttagcgctagataatgattgtgtgtggtatgagaatatctcccctaccattttttctgttgttgtaaaagactccttaaatttataataacagattttttctcaaaaaaaaaaaaaaaactatttttgtgagtacactaatagaattttcataaattttatgcctttattttactttatatatatgcgtgtctcaattttttaaaaaatcataatcacttgcgtcatttttattcatcccaatttttgtttctacttttatacagtcatgtaaaatagcataatttgatgggaaattatagtaaatggccccaaatcataggactatgttagtttatgtcctcatttcaaaaaaatatagcaaatgaccctaaatcataaga

SEQ ID NO: 393425 - DNA, 1218 bp, Cannabis indica
ctggaaacacgagaggaccactaaggataaaccccaagcaaattgatacacaaccacctacaacaggccatggagtgactaccctctagctaggttcacaccaggcatacttgagactgggaacaccagtacggatgccgatcaaactactcctagcactgagattacatcaaccaataatactcaaaggcctgtcatagatgacactgaacttcaaaatctacgagtagcacttgggcttatgcatggccataacagcaccctacatcatgatcaagaagatctttgagcagccatcaaccttcccttcgacgagcagaggcgtcaattaatagagtggagggaccgggagacatagtgcatgcgccccactattgtagggtgtccttattagttttgtcttttaggttaattaattaattaaatagataaatatttaaattttaaaagtagttgagatattctctcaagtgattgagagattcccttaatcgattataagatataaatatctatacctaaattcggttatattatttattcaaataattaaatatgatttaataaataatttgaatttaaataattaattatataaaatttttattaggtttatttaatatatcacataacaaagttgtatatagtttttgaaatataatagtatttgtaggtaactttctgaaagccttaaatgattttattagtaaacctttttctctctatcataaaagaaatagttcttgctcatgtgttgagatttaatcaagaacttcatatacactattatcctactagtccgcactagtccttgtgtgtgatggaagatttagaaaatcaaggtgtgagttttgtcattagcattccaaggatacaacatacgaaaagactcgaggatacctgataggcttcgagaggtaaatattctttttgtctatttacttttagtttaatatatatacatgtgaaaacataattaagactttttttggtttttctctctaacagctgaagttggcgccatggccaaaactagatcgaaacaccaaggaaagtcgaagaactcagttgttgtgaaaattatatacgcaagtatacgcagtcacacaagtaataaagtgataagtaagatcgtctccacagggattgcaaacaaagtttgatataaaatcaactaattacaacttaaaacaaaagaaataatatgtaaatggttga

SEQ ID NO: 393426 - DNA, 1012 bp, Cannabis indica
agcattagggcgttacagtgccttggccgacctaatccgccaacagcctactctcatacttttggactactatgaccaaaaagtaaaccacatcttgctagcagaattttttaacaaaatagaagagaccaagccaatttaaagcgtcatgtctgccaacaaaaagtcaccgagtacttcaaataagtcaaggaaaggaaattctttgtaagagacttagtgctctgaagaatattccttgataccaaagatcctatagcaagcatgtttggaccaaactgaaaaggtctgcaccaatctacaagatagcaggaaaaggtgcatacaagtctgacgagtacaatgagaacttggagttggctcttctaccaaaatacctgaatggagaacatctcggtaagtactctcactagccagcttgtataaaacactactcttcagtagtggttcctttgatgtttcgctgtgcaagaatttagaaaagagctaagtctccaccactcttcagtgatggtctttacacggtaagctctgtagaggtagccaaacattaaagagctatatgaccatcactcttcagtgatggcccttgcgcagtaagttgcgcaggggtagccaaaatgtgatttcaaaagtgaacattaagttgtaagcttttgttacacaaaacatgtacattgcacaacaacaacacgtgtaagactaattgtgtctaaaccactagctcacaagataacttcttaaagttattctttttgcagttccacatgcatacacctggtagccctccacgaaaattcccaaataaggtctatgaaacttggtgaattgcaagtgaccaagagaccgtaagtctgtgtgctcacttgggggcactcacaccatacaaggtatcaaactagcacagataacttatgcaatgaaatttaaagcttagtataagcttaaacatgccgttaagttagagcatgcatactttgctttacataaaaaaaagtaaatctagataatt

SEQ ID NO: 393427 - DNA, 573 bp, Cannabis indica
agttaatgttgtggtaggaggagtgggtcatactaccacgactccccttaacctgtttcctctatttttagggcacgcttgagaaacctcgatgctgacagccactgtacaccattttccaccaataatactcacccaggctttcaatggtattattcaactgaaaactgcacaatatgtgatcatgcagaagcagatgcatgcattgcaggaagaaatcgcaggaagagatcaaactcattagaagtaatgaaaccaaaaaatggacgctatgtaatccaacacattctggaaagtagtaatggcacctagtgactttagagccatcaggtgcaaatggatctatgaaagaaaggtaggaggagatggaaaattcgaaacctagaaggctagaataattgcaaagggttatacccaaagagaatgtatgaactatgagaaaacttttagtttggtagctatgctcaaatacatctacattctcctatccatagtagttgctctcactactataaaaataatttttcttgacatttttaaatagtcgtttaaagtattcccgtcggtttctat

SEQ ID NO: 393428 - DNA, 925 bp, Cannabis indica
ttataattaaatatatatacctaattatattcctaaaaatgtataatcttaaactaaattatttttgtaagttcctctcttttttttcctccttttgtgttccttaatatgatcagcatatattagtttaagttttgattatacatatatttttagcaacaataattaaatttttatatgcatattagtttatgtattgattagtatttatattattttgttatctattattaatccaatatcaaattatatattgcctgaaaagaaacctctatttttttttggcaagatataatgatacattatacatatatataaaagaagtgtggattattattattattagtactttaaatagaggtcataattttgtagacatataaattctcttggaaaatgaacaatctatagtaagagtcttttatttgtttcattaactttcttttagtgggtccatatcaatcaatatatcaatatataaaagagagatataagatagtgatatggcgctttagaatcactccaaatatctctatttattttctccttaattctctcaccttttaattttttaataaatttataaatattaattatctaaaataataataaaaatctcttcaaaattactaatattagtatcataataaagtctaaatcctactattaaaataatatttcctatctatatatctatctatctatatatctatatatctatataaaggagaagtatgagtgatggggcggtctaaaaatgtttcaaaatcatcttttcttttttctccttaattctcttaattttttaattagctaattaatctcatatttcttttctaattttttagtactattattaattttttaactatttaaccatattaattaaatattaacattaactaacctcaaaaaaaaaacaaaa

SEQ ID NO: 393429 - DNA, 465 bp, Cannabis indica
gagaggttacaaaggttatattttccacattatataataatataaactaaattttgttactttgcaaggcgaacatcgggcgggttaaggttcacgatttcgggtgagaaaaagtgaacctgtacgccagcccgttcacatgttgcaggtctggattgatcgtgtcaattttttattttacactcacctaattctaattatgtataaacatacttaaacaaacgtataactaaatcctaaatacttacctaaacatataattagaaatagtgtttggtcatataattatagggtagtgagtagagtaacgatggaagtggttttgatacacctcagattttgtgtctcctcctaccttagcttcagccccacctacacgctatacacagtctaaagtaaaaggctcagcttgcactatctgtggcctctaatatttattcactgttaattttctttttatgcttc

SEQ ID NO: 393430 - DNA, 1205 bp, Cannabis indica
ttttttcatgcctagtcgtgctcgtgccttctgagctcgtaccaatttcgtgtcgtgtgaaaaaatctccatatttatagcactagctcagcctatgtaaatataattaaagtctacaaaaataacttgtacattgaataagttacagaactttctgagatatgaatgttgcaaaaggaagcccttcatagcatggtctttattacggtaagtttaaacctaatattcaaacaaagatatgacccattaggaacctacatttgaagttgaagccaaaaccaaaatcccaatcagagaaaaaccaaacttagatacaaaacaagtacaaacacgttgaagcccccgcctgaccctcaagagaattccaaatttgtttgttgtgattcgtgcagtaaagattagagtgactataacgaataacttttttgatgaagctttgaatgttctgtatgatgtgtatcttttgatctattagttatctttactggtagtgtgttgtatgagtatagctttgaatactatttgggtaattgtgttgtaataaggcttggttcttgtttcatattcatatcatggattttaaaggtgctcaatggattcttgatgaggcgtagaatcttcatcatctacaattctatgagaaattaagttgaaggaaaataaaattttaaggatggctaaagcatatactacatgcctttgtttcattctttgctaagttctacgagttaaggaaagatattgaactgttaaaccattcaaggggaattgattggtaaatgatctctttattcacatttctaatattgagttttaattgaatttatttgtatttattgttgcatagaatgattggtgcggtgatagaacaatattatgttgtgtttatttgtgggattagggaatgagaataaataatggaatttattatttgtttatttttttaattttgttaaagaaatagaatgaaatatatgggtcttacattaatttgtgaatgaggaacgggattggaatttccataaggttgaggatggtaggattgccactcattctttttaaaataaatactttgcaacgtaaatacttaagtttaactctcgattacagataaaatacttaagtttaacttttgacggtaactaaattttttttttttaaattttcgtaagtacctgggtgtgccaagataatatctacatgct

SEQ ID NO: 393431 - DNA, 519 bp, Cannabis indica
attatacgtgcattgtacgtaatcaacctagctaatatatattagtaaaaaatcatgcaattttattaataacataatctccaattcaatcaggacatctctctcgttagaaatacaatcaagaattttgagccaactaatcagttatctgcttctcaaatcgttttacaaaagaaactagaaataaagtcagatgaaaaatattgtagcatcacagtgaaccttaaaaaattttatattcagtttactcccccagtcagaagacaaacattagatctattgtagcatattaatattcaactctttttaagcattcaattatatttaaggtacgtaactagaccactaacaaccttttcaaccacagagaaattgtcatttgcaaccattaacattaatttgatggcgagacatcgaagaacaaaaagacgaaccaacaacgaaataaaataaaataaaaccaatgtcacaaagacaagactaatcgtagtaacttgaataaaaagacaattaaaacta

SEQ ID NO: 393432 - DNA, 750 bp, Cannabis indica
tgagctagcctcaagtggttgaggagtaataatggttagtagtagtaagagacacattagcagcaatatcagtgaatatgctgctaccatcactgaatctccaatcagtaaagtaaccaggccttgacatttttttggtgacttcaacatcacccaaaagcattgccaccactcttgacattggtggtcttgcaaatggtgatgtttgggtgcataaaagagctatttctaccactcttctcacttcttcctcgttgaactccgatgacaatgctaaatccgccaattcaacctcgcgtttttgttcatataagctccaagcctacaaaattgaagggataactttaatcaaatggacttaccaaaaaagattataattgggagttaaaaccaatcatatttacttgcatcgtaaacaccattttttggttcacccaaattgtgtataaaaagagatttacattatacaaacaggaatcataaccctaataaacaacgggtctcttatataatttgagttaatatacaacatacttatatttctgcctaatgctaacatttattcatagtttgtttcactgtactttcattttaaaattactgttatgaactttgattagagatcttgtgagccaaaatcactatgaatgaagtgataatagaaagataaaaacaaacaaaatctatattattacccattcaagaagataaacttatctgttccaagctcaggtcagagcgaggccggcc

SEQ ID NO: 393433 - DNA, 852 bp, Cannabis indica
agtatttgatagggctatttaaaaaatattgggaaaagaaaaagtagagttttgatatatgtatatggtatgcaaattaaattgtattaaaatatggtatcttttaaaaaactaaaaaattttaaaaaatatgtgataaataatcatagataagaagtattaaccctgacaaattgtcaaatgtaattttttaaattattagtgttatactcaaaaaaattactaagtataaaattttgaaatacacttaaaaaagcatattgacaagaaagcaaaatcgactcacgtaaagggacaaattgatacgaggaggagtcaaggctcgggttaagctccttggcgaggagctccccatccctagctccccgccatcgctccgcgatctgagtgtgtccaagggagttggagctccccgctcctgtcactctccacacgcaccaagggagctccccactcccgtcattccccacatgcaccaagggagctccccgctactccttctctctccccgctccctcactcactctccccgctccttcactctcactctctccttgctccctcactcactctccccgctccttcattctcactctctccctgctccttagctctctctcctcgctccctcactctcactctctccccgctccctagctctctttctccctgctccctcactctcactctctccctgctccctcactcactctcccttgttccctgactctcctaatcatcacctaacaccacctactccatacaagggagcaatcacattcagtgtatgtatgttacaacagagtgaccaccaaaaaggtgggggaaggagttgctaccaagattaaacaa

SEQ ID NO: 393434 - DNA, 943 bp, Cannabis indica
aaatggatatttgagagatttgatgtgaaaaaatattgagagacagaaataagtttgtatttgataaatgtaaaaaaaagcttctctactttagagaagctattatgagtactttaaccagtgcaagactcgcactgtaccacctacgtagtttataactattacttctttttcttaaaattttagtttaatgtagtattgattattattaaaaaattgtaaattgtgaccaaaccccctaaagtttcactacacttacaactaactctcaaaagtcaaaattgttcttttttatggcaaaatctctcaaattcgtattctgctagcaatttatcattttaatttatttttagctattaactaccatattagattgtctaggtgtacataatatatgtgttaattatatttttggcatatttaattaacaaaattattttattaatttattattaatttcggatgtggtgtaaatattggtttccatattttgtatgtgaatttaatctatctttagaaggaaagttgtctagctctcctatttatggaaaataagataaaaatggtaagtttggttactcatttctattctacctaaccagctgtcatattctgatcttgtgtgagtttctcattttgtttgatcagatttcttgagaagaaaaccagagctaaactttcctctgttgtcttgacacaaccgatgaggtcaataccacttaggttcttagatagaaagtcacaatacctcgtcgtagtgggagggtttcaagaaactcaccctgttatgacttggaagacacttgtgattaaaatctattgttactttaaacaagaaatggatagtcagaataaggaactaagaagcaaatcaaagagaattatggttaaaaccattcatatggagtaaccaaaaagttttctaacaaggacaagaaaggaa

SEQ ID NO: 393435 - DNA, 3071 bp, Cannabis indica
gattgggttgagtgaactgatttcggtgtaaagtttgtgttttgattgtttttgtctttttttgaatgtgagcagactcatgtaccgttacaacagcaacagttgctttataatgggaaggaggttaggaattctgataagctgagtggtgtgggtgttaaagatgatgatttgttgatgatggtaccaaattctgcatctgggtatgtttgttttttgatataagaattaatatatggatcctttgttttattgttttgtgatttgttattgatttttaagaagtttgggggtggaattgaatcttttataagctcatagtttgtggaccaaaggttcttgtctaagtagggattcattcacaaatcaataacagaaaatataggctaaaattgagatggaattgaagattgatggtaattttatggaagtttaagatgtttaggggtgattttgaatctctttaagctcatagtttgtggaccaaactgtttttgaaagatgcatattggttagtctccaagtagggatccacaaatcagtagcaaaaaccaagtagggatccacaaatcagtagcaaaaactatgtagacaaattgagatggaattgaagattgattgaaatagaatatttaggcaaatctgagtgggggtgtttacatattagaaccatgtattcgagaagtagctcgaatgattaggcatgtgaattgctcccacaaggtctgaggattgagtttttcttaggtagctagctacatagcaatgtccataggaattctggctctttgaaaaatatatactactctttgctcatccatttccctattatagactttctttcatttattgttctgtgatttgttatggaatttgaagatgtttggttgtgaaatttgaatttcttttaagctcatagtttgtggaccaaaggttgttctcttacttattgtctgtcttttgaaagatgcatatggttagtctccaagtagggatccattcacaaatcaatcgtagaaactatagggataaattgagatagaattgaagattgatggaaattgaatatagggaaaccttagtgggggtgtttggttcgaacaacaaacagataaaaacatattaaaagtaactcaaactgttagttgttcaatactcgatctaatccaatacactattgatctaatccacaaggttgatacactattgatctaatccaatacttgaaagaattagaatatatgtatttattggtattaaggaaagaattacaaagttccaaacttttctagacagttcggtatctccatgagtaatttttcactcactttataccaactcttccctactgttttaagctcacacaccttaggactattaggacagctcaattagaaacatttcatcttcagcaactaagatttgaagtgatttgtcatgtctagctcatccacttccctaatatactcatctattacttatttactatcaatattatgtgtttacaacatattactgactcacacatcaatggagtataatttgtgcttttttcacttcaattgtgtgccaattaatggttcttttaccttccagtggcagtgccgcctccaatgagttgggcatgaatccagatggctctgctgcaaatcctgaagctttccagagacaccttcgaagtgattccaatatgatggcacagctgtttcaggtagaggggttttgtgtttcttattaggttttctttgtgtttactcgattttgaagcatgtaaactagccaagttttttcaactagaattaagctctatcttgtatgatctttttgttgaacttgtttgttctctcttctacagaccgatcctgatttagcacaagctatttccggggacaatgtcaatcgattgcaggagcttttacgcgagcgtcatcgccaaagatctgacatgaagcgtcagcaagacgaagagcttgtaagtccatttgttttgtcactataattaattataattttgtatttgatcgaagtccaaatttacctatattttttctgctattgtgtgattaggcccttctgtatgctgatcccttcgatgttgaagcccaaaagaaaattgaagctgccattcaacaggtaatttatatatatttagttaacactcaatcgatgcgactctgtacttctttttaatttaatttctaaacattttgcagaaaggaattgatgaaaattgggcagctgctctagaacataacccagaaggtttcgctagggtggtatgtaaaatattcaactctatttaccgttccttcctgccccggtcattttgagtacttaattgaatctatttcttgaaactcttcaggttatgctgtatgttgacatggaggtcaatggagtaccattaaaggtaattgaaactctttaagaatatctcgatgttcttttcaacagcttaagtttttgaacttgagatgactgagcagcattctttgacatgtttcggttccttgttgagttcagttccaattgttttatacgatagttgctgattatgatttgttctctccaggcatttgttgatagtggagcacagtcaacaattatatccaaaagctgcgccgagcgttgtgggtatgtgctttatatgttttatattccgatcacagttcttgtcatacaaaaacttggaaattatcataatttactacaaagcactaacataaatgcaaggaccaacggagtatgaatgatttgattaagaataaataggacttatctatcccccctccccggaactttgaccattgtaaagttttgtcccttgaatttttctctgttgtaaaaattctctttgaactataaaaattgttgcaaatgtctccctacagttgcattatggtcatttatttaaaaaatttgctgatatagcactaacatgacgttaatctagcatagttcaagatttgcaaccattttcacagttcgggggaaatttttgcaatagagaaaagtttagaggacaaaactctataaaagtcatagttcagagacaaaaatcatatttattc

SEQ ID NO: 393436 - DNA, 660 bp, Cannabis indica
gcagaggcatactccatcaaccattccggagaacaaatggctctatcaagtctttcacgaattagacctcccgagaacctattgttttgccatgtatatttattgccaatgaattgcaagtccacaccacatgtggcttccatgaaactacttagccatttcgtactctccgacccccactcttctcctcttgattactaatacagttcaagtctcctatcaacacccatggcaattgacagagaaaattctgcttccatactcttccaaaaagcttcctttgcaccgatatacggtgtaccgtatactgcataaagtttccaattgagttgcgtatggatgtcccacacagttgcttcaaaaaatccttcagcaaagtagttaacaacaatattgatgttgttgttccacatcaaacaagaacctcctgctaaaccttttgcaccaacacaattaatcctattaaaacccaactttcgagccaaatcttccataaaacttttagtaacctttgattccattaaaaaaacaacgtccgccttaaacttattaacccaagccacaatagcttggggtgtcgggtctcgtgcgaggccccgacattctaagataggcacttcatggggctggtgggggtttgataagggccgcctcctcgcc

SEQ ID NO: 393437 - DNA, 826 bp, Cannabis indica
atgctattgcaatgttatattatattttcgcaaatgtgtaaataacggttttttttaaaacaaatgtataaacaataagtttgtaaagaaaaataatactgtaaaaatttgagaaaaattaaaatactcataaaaacataaatttttagttgtttttggatggttgtgaaataatcacatataagtaaaaataaatttgaattatactaagtgtttactagaaaatatagacatgatgacatggacagcacttctaacacgtgtagtgacgagaaagacaccttggagccctaaaatctcgagtaggggtggtaatacccgtgcataggcctagtgcccatgtcaacacctggatctagggcagaacatttgcacctgaaaatctacccattcgacaaactcgtccccgacctgaatctgaaaagattggatttaaaaaattagtgggcaagtttaagcagattttttaaagtagaaaatgttgccaaaattatgtgtattgctataaaaatgtaaaaatatatatatatatatatatatatatttaaaataataataaaaaaaagtggctcaacccactcgcaactaaacccaacccaacccattcgcacctgacccacccgagctcgaaactcgaaaatccgatcatccacacggatgtgttctgtacacacaatctatacacccaaaactcaaaattcacatataagttatttttattagggtaaataccattttggaccctctgttttacaaaagttatcaattggaccttgtgttttgttaaatgacaaaatagaccctgtattttctaaaatagtacaaa

SEQ ID NO: 393438 - DNA, 1428 bp, Cannabis indica
cacaatcttcaaacaagtaataacgtcataaatcgagtatcgtctctccagggattaaaaattagaaattaattcataaaactaacttttcacaaattggtttgaacaaaaataaaataaaatgattagattatgtaaaaattaacaaacacaaactatgagacgaaaataaggtagaattattaaattagcgtaaaaatacaaaattgatatagtggtacaaatgaatattattgtaaattgatatttgtcaactagaaatttaacatgtcataatccttttcctaaagtatttatgttttaattctttaattaattagcatattcttatgcccaattaagttcaagactaccaatttaagtataattcctttaagttatacaaaataaataacatattcctatgtcatttacaaatcacactttttcaagataatattcatgcatcatttaagcgattcccctaatcctattagattgtaaattactaatggtgataaaataaaagtaaaaaattatacaataaacactcttaattgaacaagaccaagttgtaacaatgacgggtagactgttggtctcccgtcaaatatcctaccctgtgccttgttgggaacttcagacaaaggtggtagatagatgtcaccacttttaggttgtacagggctggtcgacttattatggcattgaaagctgaggatatgttgattaagatgaactgtgccgtcagagttctggttgttggattctctccaaaaatcagcggcaatcagatgtaccccatgagtacaatgccttggtcaaagaaaccatacattacttatgtttagggttccaaattggttagctggagcctcatgttttcatatgttgatctaaaaaggattttggaggaggctccattgtccaccatgcatcttgcaactattatattcccaatttatgcagtaatgcccaaggggtcattgtgtgggaaattaacttgagcaacgtctccttctgtaaaagagatagtgggttcttcaagctttagttgcttggagtccctttctttgacgatcaggatatcgcttttaggctcatgatggagtgtctgaacataacattccctagccttgatggtctcgcctgcgatgtggggtttgttgataatgacccctaagtgacccaccactggaggtggcatagggtctccaatttgagcatcttgtgcctgaaattggttgttctacacataacgatgcaagtgggtattattcttccttacaaggaatttgatctccatcgacaaattctgacactaattggtgtcatggccaaagtcattgtgaaactggcagaactttgacatgtccctcttgctcatctcccttttactgggagggggattcttgtatgggatacatgagtggccatgtagatggtctc

SEQ ID NO: 393439 - DNA, 1542 bp, Cannabis indica
accttcgaggcagaacttatcgaaaggttaggtctattgaggaccccaatcatcataactatatttatcgagacaaaggttaggtctattggggcctacattggtggcatcctacagtcttgcgacattaaggactactgcaactacctcggggttgcccaattctagctgaatcctaccatacaggatccttgtgagcctcaaggttctgtattacatcttaggctgggagtgtcctactcctctggagatagcccaattttactctatcaaagttgttcctgcgagaaagaacgctgcggggggcttctattatcttggggcctatactggcgactgcaagctcatagttagtttgcccaacaagacaaattttaaagatcactacttctaggcgatgggtttatctccaatcaacactacggcctttccaatcatacgtcacttcctttcctcgcaaattcattcatatcaatttgtagtttttaaagttgcatactgaatttttatctattttcagtgattcctcggagaccagctcctaccacagagatagtcaaacgtcacaaaaccttactgagcctgccatatgggttgtgagctgtagatttcctggtaaacgagtagaacctaaagaacgttggcctccttgctttggacgagtatacttgtgattataaagtatccaagtatacctcgtggaaaaaggtcgtcgtgctagaagaagaggaaagtgacgactttgtggctcgcacacactatctcgagagagtccgtcctcgggtagatggaagatcctgaggtaatcaatgtgggtggtcgctcatagtgcttagggctgaatatgataccttagtctcctcttgagatagtcggtataattttttcatttggaaccctctcctcatagatcgcatcttccataggttcgatagttggtacccacaatttcacgttcaaattagttgtaacagttctttctacaggattgaaaaacagcatggaaccatgttggagagaacgagtcacatagatttggtatacttgaaatttcgctagcacgtcagaggaggacacgtgtcaaactggggcaatacgaatcaacgaatgtaatgataattatattttaagagtgaataactcataaaatgtggaaattgacagagtatatttacaacttgctgactgtatggtcttacgcgagataaagttatacaaactgttgatttaagcattaacgagaaaccatacgacttcaaatgtacaaagcgaggtatcaacctcgctacgcattaagagacaaaacgtaacggctggtaagacacttagtgtacaatacacattatacatactaagtataacagttaggtaaatccaaacaattgatagcgaggcaaccatcttgctataggaaggcacactcatgataccttcactaattagttccagacatcttccaatggggttcataactccgtcgagacagctccctcagatagaagctgacatataaatgatgttgactgctgaagttcaccttgt

SEQ ID NO: 393440 - DNA, 934 bp, Cannabis indica
aaaacttatttattacaaatcattagaaaattttaaattagaaattgtttgaaaaatctaacattagtttagtttctcatgctcatgcactttctcacatgatgtattggagcagcaaaagtcttggctatcctggaatatcaattcgacttctctgtttggcattataaggaagattaagagagggaaatactcgaaaaccagaaagcaagtgttaagtgctgctgttgcagccttggtgtatatgttgtggctctctcgaaatgagaagctgtggaatgagaagcaacatacttcaaaccaactgatgcagcaactcaaggtgttggtgaaaaatagaattactagtgttattcctaaaaagttacagcaaaagataagagcaaaattgatagtctttaagctttgatttaattttgcacagagttatatattgtatagcatacagaggcctatacggtgcttgtggatgtaaatgtttgttttggagtaatgaaattcctgattcataaaaaaaaatattagtttagttgtggaggtaaagtcctagttgctatattaaataaaatattttagtttttcttctttcagtgtacttttcaagttttattttttaaaaacttatcttattattcaactaggatggatattttttcatcaaaactgaagaaggtaaaaagataattgcgatgattaatattctttgtaattattgacaatttttttaaaaaattattaggaaaataattttcttttttcttaagataaaaacaaattagggtaagtaatttgggtttttttcaattttaacaatagtataaaaatacttccagctggctaaataaacaaatatacagctaaaataattttttttacacggttttatgccctaaaataaaactcatttacaatataatcagatttacttattaat

SEQ ID NO: 393441 - DNA, 529 bp, Cannabis indica
aatttacaatattgtgaataatttaggaactagttttaactaggtgaaaaatctcaaagacacaataatatatatgtcatagttcgagaaacaaaaatcctaaataactaatttttaatattaaagatactcttatatacttcttcataataataaactataattgggaatatataataattgtactatatgaatatgaggatacactaatatcaaacaatataataagttgctattattaaatcttttattattagtgtgagtagatttattaataaatactattttggagtttgaattttttaaaagttattctttagatcattttttttattaaataataattcagactttgtatttttaaaacggtctaaaataaatattgagcttaatttttatcaaattaaacctgaataataacttaacatgaaagtttataacaaaactaattaaatttatttttacatgtgttccaactgttagaaaattaataatatacccaagatctatttgtatataacatagaaca

SEQ ID NO: 393442 - DNA, 631 bp, Cannabis indica
gaagaagaagaagaaggagagggtctcaaatatattgattatattctcattctggtattgacttgactcgactcctataattggcttcttttacatatagtggagaatataattaaagtaacactacaaaatttaaaacaaaaaaaatatctatacttttttttttttttaaatgaataacaatatatctatcacataacataaaatgaacaaattaaatataattccattgaataaattaaggaattactatttcttatttactaattaatatttcgaaaatatgcaactttatttaggactaatgattcttaaacctactagtgcattagaaactagagagtcataaataaagtgtactactcggcccgtatttgagaagcccgcaaatttacaaattgtatcgtgccaactcataaaaaaataaaagttgtatatcgtattgtgctaattttttatagaataagtacgatacaacctttaaactcaatatttttcatgtcgtgctcaaattcatatgttatactttatttggatcaatttcttggccaacccatttcttttttatgggattgaattcatgctccacacttttaattttttttttttattatatataaaaaaaactaat

SEQ ID NO: 393443 - DNA, 675 bp, Cannabis indica
tttttatttttagtcaccaatttgattgtgactaaaaaagtaaaaattttagtaatgtgacagtaattatatttaattatatacgtacaacatattttgtttgatatatattgagctaaaaaatatcgtactaaattattgatgatgtacgttgagcttattttattttatttttgtaagaagtacctttatttatagactactacttagaactttttttgaactaggtagtatatattttgataataaaatttaaaataattacatgcataatgaaaaatgaaaaaaaatattaaaaaaaatgttcaaagaaataaaaagatatatagttaaaaaacaaattcatgttttctcttacaaaattacaagtataataagtcaataagattggtaaattagttttattattatttataataatatatgatgatattttcagataaaagttatcattaagaatatgctgattaattattggttaatcacgcgtgtaataaatacagaagaaaatagacccatggtgaatagtagttatttttggcccaccatataattcttttatcagaattacataataatataattaagattatgatgacaattattagaacttatatctatgttattttttttttttagtgtagcgtaatggtttttacaatcatatattagctt

SEQ ID NO: 393444 - DNA, 787 bp, Cannabis indica
agagagagagagagcaatatgtgtatccttagttttggttttatcttaaattccctaatcttatgttaaaattgataaacctaaaatgtaactctaattcagccaacaaaaatactaaaatccgtaagacaaaactagggtaatacttggtaaacttactattttacccctcccattaaacttaaactaaacacaacttacgggtattttggtcatttcttatttcctcgaacgaactaacaatttgactttctaaactagtttggtataattccaatacaacacaacttaattgccgtgacattactgactactccgtttagtttctaaggctgccgaacccgaaaatattttattccaaaaaaatagtgtctactatacccacgtaatctgataaagtctctatagttactaaattatgcttttttattcatttactaaatttacactaattatcacacaattagcttaagtaagattataatcttactctaatatcagcataatcacatatttaataaaatatacccaattaaatattattatattttttgagatattacaactatcccctccttataagaattttatcctcaaatttcatctaaatatctcgagatacatcttgtaacgtccccaacatgtcgtgctctatttcacgatgcatctccgttgactgatgacacaagctaaatgaacaccgattttatgttctattgtgacagtcagtagtcctgtgatccgtaaggggaaacactgggtaagctgtgcaatcccacatcgcctg

SEQ ID NO: 393445 - DNA, 1252 bp, Cannabis indica
tcccatgattcatcagtgtactaaatttatgttgatctaatagtcagcgataaagtttacttacaccttggataagtgttatgttctttctaggacattgacaaagcatgctagtatcggatgtatggattataaattagactgagatcgatattgatattggtaaagatattataatctgactcttgtatcttcctaagtcaatatcagtggttgatctagataaaaagatctgaatacagctaggttcaatctcaagagtgttatctatgttcttagaattatttgttaaagcctaccaattagttcgagtaacacatacatcttgggaacatgatagtacaattgagtgggagcgctaattatagatatggaatctatagcttctatcacatagaagtgtatgatgattttcttcgagcttgacttaatagagataaatggaataacttttattttagtaattatattagtttactgaaatatcatttatagaaagctaagtattgtaaacaaatatgtcattagagatcaaagctttaaactcaaagctcaaacttgcataaattcaatcccatacaccaaaaccagttgcaaaaagctatattcaactcaaatgaacctaaaaattcaaactacaactcaacctaaccctaacagccacaattttgcaaaatcactacttgaaactattaaaatcttgagaaaacacaactagaaaataactagggttaccttagcttgaaactccttgaattcccttgttgaattcaccaaagttcagcgacaaacccccttgttcttggctggttcgaagagagagaagagaaggagcgggttttccttcaattttggcttttccttatttcttctaattttcccaaaagaaaaggatttataattaatcctttgctgaaactatcatgccaactgtcactagcctaggcataaagatttagcaactaaaaatattacaattactgttaaagaccgtgttaagcatattttagttccctagtatatctattctatataaaatgtggttatataacagaattcttgatttatgaaaaattattgggtgatttttaaaaaaaataaaaaaaaataacaaattattagatgttgccatgtaaagggtcagcatgcatgtagttagttaaacctaaatataattaatccacctaaagtgttgcaattaataataaatttgttcatcttgttcatttttttattaaaaattattttcaaa

SEQ ID NO: 393446 - DNA, 779 bp, Cannabis indica
caatggcaatttaatcaaattaactcttttcgattacctatcctcattatgtaaacaaaataaaatgattctgatttcttttccggtcagtttagtaaacaacaaaataaaatattatttccgattattttatattttaactcgattgatttcttcaattaattattctatttcaatcaaagtttagtaaacgtatcataagagtattgtgagttaattagaataattagtacaaatttaacataggatatcaattaacaaaaattatatgtttattattttaaaagttttatctttaaaggataataattgagtagtgacttaattatttgatttttttttttctattcaagaatctactaagatagattatatatactttcattacaatatctatgtgataaatatttgtatattttcgtaataaattagagtaatgattaatacactctcaaattaaacactatgatccttaaaaaataaaattaaactctatgatttataattaatcttacaaatgaatatgaatattttttagtgaagatcaaattaacaagattctctacaccaataatatcaacatgttaaaacaaaacaaaaaatatatatatatatatggaagaggtttcaatggttacatttttattgtaaccatcatggttacattttttttaagccattggattactattaaatggttgtgattaatttggaaattaaataaaaataaataataaataacttgtaacctgaaagtgacctaatcatttatttcctta

SEQ ID NO: 393447 - DNA, 1148 bp, Cannabis indica
atccaggtaatgttcttgtgtctcagcccttaactggtcaagataactatgtttcttggagtagagctatgcaactttctatttctatagaacaaaattggttttcttgatggctctattccaaaacctcctatcactgatcacatattgtacaatgcctgaattcgtaacaacaatatagtaatctcttggattttaaattttgtgtcaaaagagatatcttctagcatcctttatgatgaatccgcagccactatttggaatgatcttaaaattagatttcatcaaaggaatggtccgcatatatacaaccttaataaaggcctaatgaatcttaggcaagatgctcaatctgtgggaatgtatttcactaagttgaaatctatttgggaagaattgtctaattacaaatccacttgtacttgcaatgggtgtacatgtggtggaatgaaaaagatccaggaatttcacaatatggaatacataatttcttttcttatgggtctaactgattcttattcccaagttaggagtagcatattgttgatggaacctcttcctgaaatcaaccgagttttctacctagtttctcaagaagaaaaccagaaagaaaatcttggtaatgctaatgatcccaactccaacatggcctttgcattccaaaaggacaagagtatgcagaacaagaatgataaccaaggaaacaaatcctatcctcctaagaaaggtagaccattttgtacccactgcaatatacatggtcacaccattgaaaggtgctacaaaatccatggatatccaccaggattcaacaagcaatccaagtctaaggatgccacggctaatcaattgcagaccagtaatgacaacaattcttccagtgaagagactcacactcttcttcctcagttaagcactgcatagtaccagcagctgctcaatctattggcaaaccagcaacctaatgtgacaacctgtgagaccagcactgctacaggtaacataggtatgatcttaacctataattgttcttttattgaacaagattcctggatagtggactcaagtgctactcggcatatatgtaacaatgtcaaactctttaaagatatatatgcaaagcacctgctactaaactaatattacct

SEQ ID NO: 393448 - DNA, 1388 bp, Cannabis indica
gttttgtcggtgtgttatatatatatatcaaaattaatataacaataatagcaaattaattacttgctaatttggttccacaaattaactataggctgccccaatctttattaatttcctttgtgtagggtgtttattatttatctttaatatatgatattggtctttttattaattacaattatttcatcccactattggtctattgcaccgttgacaatttcatatcaatgaaatttttctcattttcaaaaataataaaaaaaaatcttaaataatgaaactaaacctaattttcccatacataacccaccatcatacagttctaattaaattgtaatatatataaaatatattaattctgaagtaccccaccatatgcaccaccttattacacaattaattaaaccatcttcctaacttctactacgtacactgttagtaattaatctccattaataaacattaaacattaaacattaaatattatacatacatactcctatatatataatggtaatatttgtgtatgtatagatcactgtttatatatacaatggccgttgtattattactacttcttcttcccgttgttgttaaacttccacagccgtagtctcagttggaaatttcagccaagattttgatctaacggtgggagacaaccgagctcagatatcggacggtggtgatcttctaacattgtctcttgacaaaatctcaggctccggtttccagtcaaaaaaacagtatctttttggtaacattaatatgcaactcaaacttgttcctggtaactcttctggaacagtcattacctattatgtaagtaaatattaattaattaatttttatacatattttttttttattttattaatatatatgtgtatatgtctgtatagctttcttcttattcaaatgagtcatcgacattattatgggatgaaattgactttgcatttgtgggaaatatgagtggtcaaccttatgttgtacatactaatgtgttgactaaaggcaaaggtgaaaaagagcaacaattctacctttggtttgacccaactttggattttcataactattctattttttggaacccctttcgaattatgtaagtactaccctaaactcaattatacatattactaattttttgaatttaagaaatataaagataaagaggaatgaataaattatagaagagtaatatatatatctatatctatatatatatatactagatgagacttacgtgtcgagccacgtaaattttagttttatataagttttagtagtttttgtttaaaaattcagtaactaagcaacgacaacaacaatggtaatagatctatttaagtttttcatatttgtaaagattataaatc

SEQ ID NO: 393449 - DNA, 601 bp, Cannabis indica
attagagttacaagatgctacttacattttttaatatttaagtagttattgttttaagaattacgggatacttctgtatataaatctaagtagttacgggatactattagactaaataattcagatgagcgtttacagggtattgccacttagaattttggataatgaagtaagcaattttggtgtatcgccacttctgggagagtggctgtatgcttagttatagagactggtcaatgttattaagtcaagtaaacggtcatgtggggatttattagttattttttggtttttaataacctattaatccttagaggtaccttaaatatttcaataatggatggttatattttgagttgtggccggatactgaagcccttgttatggggtattatatggagcttaattgtgtctgaacagatgatcacgttacaatatttgttgtaatgtgtaaatgaactatcttttatgggcttggttggtagttgcatacatcttggcccttttgctgctacaaaaaattaatgtgacaacgtttttttcttaaaataattacataaggtactattttttgtaaaatatttacatttttacgtttaaa

SEQ ID NO: 393450 - DNA, 673 bp, Cannabis indica
aaaataaaataaaataattttcaaatgaaattttcatatagagagcacaagtatttgactagccataagctacccagttaagacttcgacagtcataactgaagttggaaagtccctattcgtatagacgtccgaataggtacttgtgggggcaaatgtttcccaattttttcttacatgatgtggcatgtccacatcagcaagattgatgccacgtggagtacaacttgtcactaagagtaccaagtcatcatgcacaacttaccagttgaggaaaagtcaaaatgttcaagcaggatacagatacaacaaaatggccaactagaagggtttggtcggccataaagtggcatgtgccgaccagcctctagcaaagggtaggccgaccagcttccattttggtagacacaattgatgtttctgcaactttcaccttggagagacaatggctcatttttagctacaaatccatgctaacaacccacgaaagtaagagttcaactttagatatttacctattctttaggagcaattaattagttattttctatatattatatatgtgaaaaagaaaggatatttccttactttaagggatattaacctactttagcttagatcttctataagctctcatctatataacgagcactaggctaaaccaaaaacctaa

SEQ ID NO: 393451 - DNA, 1076 bp, Cannabis indica
ctaattactaggaaagctcttggctataataataatatcatgcatgttaagtaattagtataatttgattgagattgtagtatttattattaataataatatatgtagcatttgtattattattatattttttttgaacccaagcatttgtattatttaatagcttttttatatatatctaattgttatgaataatatatataaagacttaaaatccaagaataatgcggaaataaataattaatgacaaattgtgaaactagaaaatatataacagtaataatagaacaatgttatgagaaatgctttgcgctgtaaaccagtagacaaagaattaactagattaatcaatctcaagccatcacaatttggatctaatctctgggaggaaccactttagaaccaaactttataaaattatgagatcttgctcaggggtatatatatggacgaatcaaataatgatcaaagtcaaaaatggtatcttgtacttccacagaactcacttgaaggtattgtgatgaaacataaacaactattgtatctctcaatcttttcttctaaatttctctctctagatcttcatgacctaaagctgagaatgaatgccctagcttctatagacacaagtccgggctccaaaatggtcggaaaacatagctaattaaactactaacccgcgcctatacctgttgggctctatgccctaacaaaatctaaatttaatttaatatcatttaattcaataaagtttagaaattatatattgaatttatcaaatgcttgcattattatatgtatagtatataacttttatttagtttatttttttttttttttttttttttttttttaatttgtgaataagaaatttattgctccaaccaaactttacatcactttacatcactaatctttacaatctgctatcaatacaattacatttgcttttatacaatcaaatcattagtatccatgctttatcttcatctttagctttcttaggaatcatcccttattcgaaatttactcatatgctgagcttttttgactgtgttgctaatgaggcatttttg

SEQ ID NO: 393452 - DNA, 1155 bp, Cannabis indica
taacatatgttttcggacgtggaggttgactaagaagttgtaacaggaggttgacggtagcaatcctctttttaatataaccaagctaaagtgaatttttagcatagataaatacaaataatataactaatttggttataacacctccatgtcagattataattaattttcattttaataaaaattgaatttagagtactattttgtaccattttgaaaaataatatttagattattactttaacaaaccagagaattttatcgataagttttgtaaaatactgagtctaaaataatatttacagttatttaattgattactaataattaatgggaaattattatttgagttttttttatttctactcattttttatttgttttatttaattgtggaattaaaatttatcacaaaataataattaatttaaatgtaataacaataacaaacatagtgtaaattataaaactaaaaacaaacaacataaaataaaataacaacattaagtaaagtataataattcaatggtctatttgatcaattgaggatctagctttaaaaaacatcaaaatattaactatgtagatttaagatattttgtaaaccttgatattattcttgaagtattttatcttgtcggtgagctttttttttccgcataatttttatttgctcattttgaagaaaaaactttatcgcttagtaataaatagtgtgagaatcgctttcaagaaaactaaaataaagtttgattcaaattaatcataatatataacaatatttttcatgaaaggaaatacgaacacaaacattattgaaaatgaatgttataatattggaaatcatttacgtagaaggataaatattattttggatcctgtgttttgcaaaagttaccgattggaccctttgttttgttaaatgacaaaatggatcctgtattttccaaaatagtaaaaatagaaccctgaactgattttttatcaaaataaaatttaataataatctgatctaaaagtgttttgacaaaactgtttacattttctatatctgttcgtattttcaagttgcttatattaaaaaaaatttgtcaaaaaataagttaagggtcctatttgtaccattttagaaaatacagggtccattttatcatt

SEQ ID NO: 393453 - DNA, 1060 bp, Cannabis indica
aattaaaattaaacacataaaaaccaatttcaaatctagaaacaaaataatacaaataaacttaaaataaaaaatatacaataatatcataaaatggagcaaccctaattaatatagaaccctcaaaaactcgtaaaaccacttacaaacatgtgaaccctctgaaataagtttcaaccttataaaaaaatcataacaaaactgaagttatatgaacaatgaagataacagaaactaattttatcagtcaaccaaatgaaacacacacacagacaattactaaaaaaactcacgaatataattaaaacaacacataatgcacaataatgatataaaaataaaaataaaatataagtgtgaaaactaatttggaacataaaaataaaataataaaaagaaaatataaaatatataataacatcataaaaaagagtaactcttttacaatactttcagaacatgtgaaatcagttttgaacctttgaaaaatcttaataaccgacctatgaaaccttaataaaacggaaaaaaaaaatcacctgtcccaaattttcctatgccaaccatgtccctccaatcaataattgccacataattttattttttccacctcatttattaatctttccaaacaaaaggctctattagtgcccgtttatttttcggtaacctcagaacaacttttttcacatttattaccttttttattaattaaatatctataagttaataataataataataataataataaaaaaaaaataaccaatgtatgtcagtgcacattctattaagggaccttctattaaatcattatattttttctttgtaaaactcaaaataataaaattatattagtaattttttaacgaaaaaaatcattaaaaattatacggttattatttttttaaaaaaaataaaatatatagtttacacagactaaataaaataaatttgtgatacttttataagtgtttagggtacaaataaaatttcttttaagcaatatattgaaaaaatgtgtttttgcaaatgtcagttgtatataagaaaatataaa

SEQ ID NO: 393454 - DNA, 576 bp, Cannabis indica
aaaaaaaaaactaaagagaaccacgtagctcgagatagcctttcaagatgtccaaaattcttggaatgtcaattctcatgagtaagatcgcgataaaatatgttaaaccttgtatttaatgtagcttcattttcattattggattttgtttggatgaaaagaaaatgaagaaaactaaggaacactccttgataattttttgttagagacttgctaatttttctatgtataataattagaataacaaaaaatatttttattcatacaattatattaaaatcatcattagaccaaatatatgattaatctacgaaaatactttaaatattttggcactagacttgttcttaattatgtaaaaatataaaattagataaataacaataattttatttatttacattattacttatttcatttagtttaaactcggccttgggccttggctactaataataagatgggatattttcaaaaatatgggaaaaatgagtcatcttatgataaatatggcaacaaaactaaatgccacaaaatatggcattaactaaggaagcaaactacaaatatggtttt

SEQ ID NO: 393455 - DNA, 1773 bp, Cannabis indica
aattaattacatcacattagtttccctaaatcaacaagaaaaaaaataagaaactagtttatttccataattacaatgaagaaaatggagaatttaggttggttgtttttattcttttaagatacgaatttatttcacaaatgtatggatttttctgtgactgccaagcatatatctcataaattgataattcgcacctcctgattagtgcatgcgagttacctactttagtagagttggtcagatgtctattcatgagctgctcggacatcctactatctatgtatgacgttgaacatcatagccgtttggacgacctattaagagtagaatcatctatccagactataaaatatgttacacgtgtcacttagacagatgccacgtatagtgtagaaattaagaaaatataaaagtgagttttgatgagttattttaaaaaataaacaaggagtattttttagcaaaattaaaaatgacgatgatggataatatatttatatataatgtataacctatgtacttttcttaactgggttctttttatttatttttatttatgcctcatttacattccattatcaaatgatgtgaattcgtacatacatagattagtgttggcagaatgacttgtttgataagggaaatttgaaaaaatatgcataaaataccataatattttatgcctaagctaatatttttcaaattgaaaacatatgaccactttttcaaaactccaaaaataccctattcaaaaacctaaaccctttctctctccttccctcaaactctctctgcctcttccccttcgcccgaacccacatcgcacgacccctcacacaacccactccgactgaacactctgaccgagacccacacccaccattctgaccctcatcaccgtccttcgcccaaacacacatcgcacaaccccccacacaacccactccgactgaccactccgaccgagacccacacccaccattctgatcctcatcaccacgtcacggaggagacccacttcggtacggaggagacccaaacggtgcccaacaatgtccaaggttcagatctgcgatttggagaaatcgtagtttggggaagacgatggcccgatggggtccgatgcatgtgcgaaaaaattctgtttttgggtctgacgggttcgatgggacctcgatgagggtccgatgcatgtgttggaaaaacttttcggtctgacgggtctgatgcagggccggagtaaaaaaaaattttgggtccgatggggacctcgattgggggcgaatgggtatgaagaaagagagaagaagagaggggataggggataatgtaaatgggtattttagagatattgtaaaatgtgtcatatctcacaaatattacatgggtaagcataaaaagtcaaatttccctttgataataccctttagtaggattcttgctttttactttaataagtctcactcctacctaatggtaaattttaagaaattatgcaatggatcttcacttttccaattgcctcaacttttttaaagtgaaaaaaggtatatcagtagctttggtcatgtcctttttaacacacgcaaatgctgaaacgtaccatatttatatcatttgttttatgcattgtcgaagatatgtgtataactcctgctgtgtgaatttgtttatggaactatgaactaattcctataattctttcggtgattaataataataataataaactattttaaaatataaaaataataataataatctgtttct

SEQ ID NO: 393456 - DNA, 1286 bp, Cannabis indica
tgatctcgctaaagattcaccttaggactccaattcaatcaatctgttctctaaaacagaccatttttcctcaatcattttcccaacttcttctctcaaccctccaacctcattatcaatcttccgatcaacgacctccaccaattagtcaaagtcttattcttcttcatggttgctcctctcaacccttccatacttcttattttctacattcattcttaaatttttagatttctaatcaaggcttgcgggcttgagacatcacaaagtgggcttgagacatcacattcaaagttttgaaatattttcttgttcaaaaatgctaaatgttatctagggttgagactttattatatttctcgttttaagaaaataagttcatttttgaacagccctaatggtgatgtaagagctagttaggccacttgtaattagtttagcattctgttatttttttttttttgttacaaactaattcattctaatgtaattttcactatataaataccattttctactcaagacttgattaacttagtattgagattcatgaatcaaagtttgtcctactatgatttgtatagataagttcaattttcacaaaaaagaaaaaatagactaaaatatttcttaatatataaataatgctccatcattggaggactaggaatttttttttatttttattaggagactataagagatttgaacttgttataatgtacatttttacattaaaaatattagacgatgcatgactccatcacatcatatgaggcaatgaatagtttgcttgtttggacgtggatcgtgattaaataaaagacaaaaaaataaatggaaaatatgcaattataagtgtaacgccctaaataattaggcacgctacccaaaatgattatgaaaccctaatcccctaaccgggattactaattaaaaatagcgcagaatttaaacttttatattaaacagactgaaaataaacttgtaatatatttaaacttttcaaacatagttgggatcccaaaaatatttacaaaattattacaagttctttcttactagccgacctaagcggcaaaacagaatacaaaagtcaacactgttagacccataacccgcttggtctgaagtggcgtgaacatgtacattcttcgtcctgctcctgaaactcatggctgatcagctaatgccttaccctttcctgcacagtagagcacccgtgagccaagcccagcaagacagtataaatcacaataaaatataatatgctcatttacatatgt

SEQ ID NO: 393457 - DNA, 1979 bp, Cannabis indica
tatttatgagttggtgttgaagtattttgtaatgagtgaatgcttttaaatttagtttataaattacaagtattttttccttagagttgatgcaatttgtgaaattattttatgatgcttatttgttttgcatattacaaaacaattgttatataattttcttttttttttgttatctaattgtgttaaaaaaaaaatgaatgtctaaacatatttagtttatatggacacatatatattaagaatgttgttttattattttttttaagattatttgtgttttttttaagttaacacagtgtgttgatgcttaataattttttatattaaaatagagttgttatctaattgtttgcgtgttgtaatttagttgttcaaccaggtaaaaactaactgagtatatgtttcatttttcatagatacatatttctttgagttaatgcactagtattttgtaggttttttttttcgagataatttatgtgttgtttttgaatttcttttgagttgatgaaatttgttgatgcctaattaatttacatcttactataaagttgttatctatttatgttaaagtagggttgttattaaattatttattactacatatttttttgttatatagtctatattttagtttttatggtacatatttttcgagtttacctacaagtattttgcagttacttatatttttcaagttaattttgggtttgtgtgtctttatatttatgcataattatttttaagctgattttaagtttatgtgcattttatgtataattatttttaaattgatttgggtttaagtatgtttatttttatatataattatttttaagttagttttggttgttttcaagtcgttatttcgttgctaattagttgttgcattgaaaaaagaagtccaacacgctcaagtgcactttgtctgaaattgactagtggcagccactggcacgttctgacgctgtaatattgcgtgcgtcagcaaactttgatggttttgtcccctcactcgcgtgtgagcctcactcgcctgcatagtctacttgtgtattttactttctcctttcgcaagtgggctttgtctccaaccgtatatttgtaaataaaaaactttacaaattgtattttgaaatcaataaatagtataaatatttattttctccttataattatattaatgtttattttgagtagtaatagcttaaaatagaaaaaaatcctttttttttggttcaatttatttcgatgtttagaataaacatcttgccaataataataataataataataaatttaattttaaaaaaaaaaaagaaaaaaaaaacaagcggatactaaggagataaatttataaaaaaaaaaatcatttattataaatgaatacatttatacatgtgctgcagaaataaaaaaaaaaaatcgaaaaaatcgaaagggagaaatcaaatttaaataataataataaaaaaaatcttttcttttttcttaatatattggtaagtgatataacagtattttaaattaaattttgacttattttttttttctaaaaaaaatttataataacatctaacggaaaagaagacaaatataactgtcagaatagatatttgtatacaatcctaaaaattatataagaattcattatgtaattaagtttctttaagcattttcttgtctctctttctcaactacgtcaaatttgccaatatccatagtcatagacgttctacctgaaatggatgtgcctaacaatggagaggaagaagagattggtacttctcgtacaatggtaaataataacaacaataatagtaataatcccactctactcaatctcatcgacttccccactatcacttctccacctttccaacaaaataactatcactataaaccactctccgaggaagaagagatcaagttaaccactctcacactcggctttccttgttaccataaagatttta

SEQ ID NO: 393458 - DNA, 678 bp, Cannabis indica
ggtaccgtacgaaatcctttgcagaaattcggtggatggaggtaccttggccctgatgcggtccaaggaacgagtaaggtcataagaaagattcaagatcgtatgattgcttaacagaatagacagaagagctatgctgattccaagcatagtgatattgaattctaggttgggaattttgcctttcttcaggtgttttttttagtgaatcgaactcgaaaattgaaatggaagaaaggttaactcctagaattaccggttcgtttgagtttctggaaggggtaggttgggtagcttattagctagccatacttcctattttacctagagtttacagcgaagactttatcgctagttaaagtactgtgaaaaaaaaaacaacaggtctaaaatgcgacttgggagttagagtcccacttgggggaactgtttccccggatagttcagataaatttcgaggacgaaatttctacaaggaggggatagttgtaatatcctagaaaatataataatatttatttggacatattttattaaatatgtaattatatgaatattaaagtaagattataatcttacttaaacaattacgagttgattagtggatttttagtaaatgaacaaataaagcgtaatttataaattacggagatttatatagcatgtgtgaatgtaata

SEQ ID NO: 393459 - DNA, 2239 bp, Cannabis indica
agagagagagagaaacaaaatggtattttggagggtaaattttcaattttcccactttttttttcaccctctcttctacaatccgtccaataaagggaggatacaaaatggtggaccctgactgatttttaatccctccaacactcctctccatccatttatccatcctgccaaacacataaaaatataatccctcctctccacactccctgcattgctcttccttcctcctaaaagctctcctgccaaacacactgttaggttcaaaattattagtatcctatctaataaaccacagagaaaagatgtcaaaatgatataactttcattcttttagttataaatattttccagtattagtgatttcaatgaaatgaattaccaattgctaataacattatctattttatcaatttttgttctctcatttagttggtgaaatgtttatgctatttatatgatgtagacttaattatgtagcatgccatgttttgcccatagcttctcattgttagaacttgatcaagcctttgaataatttaagaacaatcagattagtgattttattgagcctgaaggagaaaaatattttccaaaacaaattttttgttatttaatttttatttatttattgaagtaaagatcaacttgcattttgatgacattgattttcttatataattttaatgattaagctcatttttaattgatttattgcctcatgaatattttaaagaaattcattttgcatgctacaacctaatataccatactataccaagcaataatatattatcccagttttatttattattgtatgatttatctcatataaatttgtacttgttttgatattgcatttggatttgattgataatgtcttctttgttcaatgtataatatgtgggattattaaagttctggttatcttgatgctttataacaccttacaaatttgaaaggataaggtaagatgctggtttgttttgtaatttttggcaaaatttataagatgaagaatgttgcattgacaaatttcaacacagagatgagactcatgtactccaaaatcatgacacgagagagaaaatatatatattttaattacttttgtaattttaaaatagttaaaagtttatgaaataattgaaattattggaaccaataagagtacaacaatcttaattggcgtcttattcagctgtcatttaattgagaaatttaactattatagtgatttgccaacagaattaaagtaaatggggtattaacaccaaaataaaaaataaggggattataagtatacaaattaaaaagagatttaactacaaatttctctatatctaaaggacaaatccatctatataggatgttgttttttctatatctattaatgttaaatgtatttattattttattaatttcaattttacataaaaaaaaattgataacaaaatttgtatgtaaaattatttatttttttttataaaaatacctatataaaaataattcaaattaatttttttaaaaataataataattaaaattaataaattaataatttttttaattattaatataattttattttttaaaataaatatattattaaatattattataatatgtataaagttttacttgtatacaagcagtcctaagtaagaatattacatcataataactacaagatttaaaattaatggtaaaaaaaaacgttccctaccggtaggaaacttttgcaaagtcctaccataattttaccctatatatgtacaaaactatactaaacaaaccttgtacataaatatattatgggctttaaaattaatatttacagaattatggtagaacaaaatagtattacccacgacactgccaccagccaccacccttataccatcacccatttgacccatagagcccccgataacttttcagagacccatattaattcagaaatccaccacccaagcctttaacatcagcaagaactctgctcaaactccatctcttcacaccgtacattatagccaaaatccaacatagaaagttagaccccaccacgagctccatcgctcctctgatcaacttaaaggtacaaggtggttgtatagctagccttggattaagataggctaagtccacccagcacaagagctcacaaagttttttctctcttttaatcagggacggacccattaagattgatgtgggggctatagcccccacgaacaaa

SEQ ID NO: 393460 - DNA, 1702 bp, Cannabis indica
gaatttgcatgaaaacctaactcaaaaacttaaacttttaaaggaaaagggacgtaccttgagttggctagcaaggaccttgatttctaggctgaatcccttccaatttcaggttgaaaatggaaaatccccttagttttccttggttcctcttaggccgataatgaaagcaaagagaaaaagagagacgtgtgtttgtttctaattttgtggttttctaaaaacaaaactaataaatctatttttttttatttagcttatacttcagctaatgaattaacaaagaagcaataaaatcccactaattcataaaagacaaaaagaaggtaaaagacccttttaccctcacttcaccaagaagtaatctacataattaggggtaaaatggtctaaaatcataaccccaagtaagcccaacatttcaaatgcctaactataatttccccactatttctaaagtacaaaatcatatttaagtgactatgtaggccaaacatcgcattccactattaccgagcataaaatatgaaaaacataaaattttatatataacataatttatacacctagaatttaaatatatcaccataattgcaaaaataataattaaaagtcttccgacaataagccttaattatttgttaatattgaatataaagctaagtggtcaatacaattattctcccattagaaggatttcatcctcaaaatctaacttgaataactccggatactgagtcctgatatcggacttcaattcctaggtggcttcctccaccttattattttttcagagtaccttgaccaatgttgtcttattctgaatgactttatcctttatgtcaaggatctacactagttgatcttcataggacaaatttgtttgaaactttagggtttcataactcaaaatatgtgtgggatctgagacgtatttacttaacatggagacatgaaatacgttatgcactgctgataaagctaaaggcaaggctagacgataagcaactaatccaaacttctcgagaatctaaaaaggtcttgtaaatctagagcataacttgcccttttttcctgaaatgtttcaccctttttattggagatacctgtagaaagacatgatctctaacctaaaattctatatttctacttttcggatctacataacatttctgcctactctgagagacaagcattctggccttgatcttctccattacctcattggttcgctgaactaattttggacctaagtattttctttctccaatttcatccagtgaattatagatctacattttctaccatacaacatctcatagggagccatctctgttgtactcttatagctattattgtatgaaaactctatcagtggaaaatacttactccaggagccttcaaaatctatcatacaggctcgcaacatatcttctaatatccgaattatcctatcaaactgaccatctgtctaaggatgaaaagctgtactaaacttcagctttgtacccatggctcgatagagactttcccaaaacttggaagtgaactttggatccctatccaatacgatggactttggagccctatataatcgtactattttccttacataaagttctgcattttgatctactgtgtacgttgtttttaacggtagaaaatgtgctgacttggtaaactgatccacaactacccatat

SEQ ID NO: 393461 - DNA, 548 bp, Cannabis indica
agagagagagagacccttgcttcacagaatctgcaattggcactgggaaaagaggctcaacatcccagttacgcgtgtaaagtgtaccatcagccctggcattggtgatcatctaaaaaatgggtgaataacatgattaattaatagtagcacattcatatgcttgtctactgacaaggatactataaacatatagtgcaagtatgaactatttgtgcttgtacatatgcttgtctgaattaaagacatatttatacagaccaagacatagatcactgggattcatttctgcaattattataaatttataagcttacctctttcatgaccgcctcacaagctgtcatttgtttatcatctttacatcgagccaaagccctctcaacataaccacgtagggacttgggaaacatattaggctacaaagcaagtaactaaaaacgttaactgctgcaactaaccattaaatcgctaaccatattattttggaatcacttcgacatgatattatgacatcaaagttgacatcagtctagcagtacaaacaa

SEQ ID NO: 393462 - DNA, 1331 bp, Cannabis indica
cttactttttcgaaaaatatactaggtttacagaaaaaatttataaaattataatttataaaagtaaatactttacaacaaaaaaatctataatatgccatatatagaaactcaacttcaataaaaaagaagtacgccccccccccccccctctctctcttaagtatgtttttttcaattcaatttaagtgtatttaccctacttacattttcaattttcaaaaagataaaagaaagcaatttaactaagtattaattatttacctgcttatgaagtataattaaatatgagttcatagatataaattataatctaataatattttacctgttgtgaaacaaaggtctcaaacttgaattctcttccactgttataaatatatacatacctacaatgcatatatataaatgttataaataaacaaatgagcacattatgatgttggtacaagacacactacaacagttgtacaatttgtattataataaaaaggtcgaactggacatgaatgctttggagatgctcaacacgacaaaatgctaataattaatatgcacacaatatttatatagatatgtattcttcacgtctttttcatttggtgtcatcatgtcaattagcctagcatactaatctaatgcatgctttgttcttttttttttatttccttgtctttcatatcttacttggctacatgcatcgtggaattaaatcattaatataatattaaaaattttatttttaacctcaacaaaatttataactaaaagtaaaaatattttaactaattataaatcatcacttctatattgtgactaaaaggtccgtagctaaaggtattagttaaaaatcacaatttgttatgactatatacaactgggctttaaaggcagtttttaaggcctttcaacgtcgattttggcaaaattcgctgccgacactgttacgggtgacactaaaagggttaaaaataaccgacactgcagggaccctacgacgtcagttattataaaaaaaaaactgcctctgtaaggtcctacggcgtcaattatttcataataaccgacaccgttgggaccctacagagtcagttattatgaaataaccgacttcgtaggggtttcctataattttttttttcaactttaaaatttgcgttttaacattttttatttttattaaaaatctgattttatttttatgtatagattattttattattaatataattaaattattaagtataaatctttatatattaaaagtgcctatctaacggcatttcttggtttaacagaatatttcttaaaaataaaagaatattctgtta

SEQ ID NO: 393463 - DNA, 893 bp, Cannabis indica
aaagaaaaaggcaaagtcgacagttgtaacgagataacacatgttagaacaacaaatatgccacgtcaccaccataattgatagttcaacctcagacagaggtgtcctctttcgccatctcctccttccgccacgtcagcagtttgttgagatgggccccactctctcctattttgtcctttttcccccttgctgacctggcattcagataagattggaagaacaaactcccttgccagctataacgcatttatttctttttctttttaatttttttttatttttaaattttaattttagtttcccaaaaagacagcatatttctgtgagttttttttttttaattttttaaataaaattaattttaatttaaattttgggattcagtggaagaaaattgatacccacataatattccatgattcccgctatcctaagccgtatcctcagttcgtaccacttccgttcttttacttattttattcggattttgcttttttccttttcacgacgtcgttttgattaacaaatattttttattttgcatttatttatttttcatggccaattaatcatacgacaaaaaacatctacatcaatttctctaactgataataaataacaccaaggatagtttgtaaaattatagtgtaattattgataattacatcatttaatttaatttagtatgtttggtttaattatatttttattatgtaattagagataattgagtgtaattattaaaaattttatatttagatattagccattaaaaataattagtattacacgaatatatatgatcaatagttaacatttaaaataaaaaaatttaagtaattataatgtataattacacttaattttattttataaatgaaaattaaaaa

SEQ ID NO: 393464 - DNA, 735 bp, Cannabis indica
acttattattttttttatatatacttgatagacatgtacacatgtacataaaattaatcgtgatgattattcataatcatatgattaatgaataaaaaaaaaagttaaaattattaatatgaaaagggaattaagaaatttttttgagccgtgtgatatagtttgcaagcgtctttttttcttttttctttttagaaaaaaataaataaaattaattagtgaattattgactttaagaaagaaaaacatgtcactagttttggattatatagttaattatagatgttgtgtgtagatagctagttgatggttgacattcattcattagcataacaaaaaaaaaataaaaaacaaagggttgataattacatatcgataaaatcatgatatcgtagggtcatgaagatcacacgtggaccctgtcattctcataacccatatgcatgcgttccaatttaatctctcttatagcttaataagctttctttctttcgtcatgctttcgtttttttcaactcaaatttcagacagcaacaccagctacctcctcctaattattttccctttcaaataataaatattaaataattaaaaacttccaagttgattttccacttaaattttgtgaacttagttattttaatatctagtttagattataaatagggatttgttagaaaaatgtttgggtatatatatttttcttattagagtaatttgcggcaaaaccccctc

SEQ ID NO: 393465 - DNA, 1037 bp, Cannabis indica
gatataataaatatgtgaacgattccctattataaatgtctttcatattaatataaaataggatatattgccacaaaaatatttaatgtttatttttcttttaaaaaaatattcaaatttattaaaatatagcattaaaatatcattctgcttttagaaaagtaaatatcaaagttaattgctcgaagttatacaaataattgttcttatttttttattttgataaaattaaaaaattaatataaatagttaaaaatataggaaaacaacctaaattaattaaaaaatagaataattaaaattaatagataaataaagtttactagatttaaagaaataacattgttccacagttaagtactattgtataaaaattaaatacaaaatctcctaaataattattatagatatatacatagttaagtatccagttccacctattataatttaaaaaattactaattattcgtaaaatgtattatcttatagtgatgcatgcctatgatactctagataatatacaattcataatatatgtattatatattcaattaattcattcagattctgggcatcaagttgaaattattgactatatgttctggttattaattaaagcaagggaataaagaaaaagaagttgtttcagttatatatacattaagacagatatgtacgtagatacataccagaaatgtatacaatgtggaaattaggtaggtatggtttcagaaaaccaatgaaacgaataaggtttagcttattggtagatacatcatgagtttctttcagggtcttgatcggttgctgctacattagctacaaatacaaatagtttaattatttatatatgaaacaatataagtatgatcatgaactcacgaaattataagcgcttacccaatattagaatatgatcgatccttcaaatgagaaaaatgtagtgtatgtgaatgttccagatggtttagtttagtttagtgagagtaaatatatatatatatatactagcaaaagttacgtgcgaggcacgtata

SEQ ID NO: 393466 - DNA, 583 bp, Cannabis indica
gttgtaacggtctcttatgaccattatttgcaatcgatgtctactacctataagtagaggcttctccctccattcaaaggggggctgattataataaaatatagaaccagagtgctcttttcaagagtgaattaggcagaccgagcctgaaggtcctgttgaaccactatacttttctgtatctattttatattatttacaatactcacatataatacaatattctttgagtattcgctattctaagtgagtgctcacgtatctatttttgagtattcaagcagcccttgaatatttgcataaatttgatgttgtccaaatttctcagacaatatttgcgctgtctatgggaacgtcttgtttgattttggagaaaaattatcatgactgctaaccagactaatagaaacaacaacaccggatcctttaatgttggaaccatgaatgttcctctcccaagggatggaacaaaccaaattgacttttgagaagttacatcctttgggaatttatattgtgaataaagagaatttgaaatttatttttcaatagtgattttcaaaagaaaaaaattgtgactttt

SEQ ID NO: 393467 - DNA, 612 bp, Cannabis indica
aatgcccaatacacttgcacgattcacaggtaaaacattcagactgaatgtgataacagatttatcaaaattgacttgctggccagaggcatactcataacattgaagaatccgacgtatagactccgcctccctcccattggctctaccaaagatcaaactatcatcagcaaagaaaatgtgagtcacccgaggccccgacctagaacaccgaaatcccatcaaatcaccactaacttcagcattacgcagcagggaagataacgcttcagtacagaagagaaacaaattatatcaaattaccaaaatcattattattgctgttttattattttttttttattgtagtatactggtgcacaactaataaataaatagatattatttagtatttttataaaatctgacatataacatatttttctccttaatagaatattttactatttaatatattctttttatctaataataacatatttaagattaactagttattggttcctataaaatttgatacttatttgtaactaatgtgaattcgatacttctgttaaaaaaaaaaaatgtgatttcgatacttgactacaaaaaaaaaaaaaaaaaaaaaat

SEQ ID NO: 393468 - DNA, 596 bp, Cannabis indica
aaaaaaaaaaaacaaaaaggcaaactcaacctatacataagaaattttttaataataaaatactttttcattataattattatttgatattggatttataaattatatattttaaagtataaaatatatatgtaaaagttatcaactaaaaatatgattagtctttaactttacaccaactataaatatagcatcattagtctattataattgtattttggtattttgatttatataaatcaattggtgttaaatttttttatcatctttttatttatattttatcacatttttaatacttatttcttttttagttaaggtgtagtttaatactataattatggtgtctagcactactcaatgtgtcatatgactattagtgcaattaagtataatattccatataatttaataaaataatttatataaaatattactaacaattcataatgtgcaaccttgcggtaactgatgcgtaatagtaatactcaattatttgtattaaccaattagtccaaatcttttttttgaatgactccccaaataatttcttcttttttttttttttggatgaaatgagaacttcattaaattta

SEQ ID NO: 393469 - DNA, 567 bp, Cannabis indica
ctcaaccttttgacttcatcttttagcgcattagcacgcactttgtccaacaacttccttttattttgcacaggtcagaaggttagatcaatgtttaaggcatgggtcatcacagaggtgtctattctgaccatgtatctatgtgacaacgcaaagaggtttaggtttgcccttagaaattttatcagtactaattttatttatggtgctaaacccttcccaatcttctatcatcttgctggacaaatgggattaaccaccacttttgcaattcttctacaggtccaaagttgtctataggatccccaaaggaaggatctatctctgcctccccgcttttggttggccgtcattgcccatttctaggctattcatccgagctctggtgggaatcttctctttcatagctctagacaaggccatgttgtaagagagatgggcaggaggctggtctcctctcaaacttcctaccccataccttgttggaaactacatgcaaagatggtagatggaagttaccgcctttaggtcgtataaggctagatgaccttgttgggttttatgccc

SEQ ID NO: 393470 - DNA, 745 bp, Cannabis indica
tctgtcttcaccgccatcgttgaaggtaaaaaacaaaagattaatttcttcacttattatttcgtttacattaatattagaaaatatattaatattaaggaaaaaaaatcagtaatatatatatatatatatatatatatttataccataaatttctcaatctacatatgaccacaaataatttttgattcgacgttaatttaatttacagttcatgaattgattatattaattagatacaagtggttttcttatatgggttttttttttttattttgtgttaaaattaccttaaataaacatttatactatcataagcaaaaataaacatttatattgtttattaatttcaaatatactattttcaaagtttcttatttataaaaatatacttgaaaaactcctccagatgcgcaaggagatgtgtggcacacatgtggttatgtgggcgagtgagactcacacgcgaatgagggacaaagcattcagacttgcctgacgctcacaaactgtagcgtcagaatgcagcagtggttgccacatgacgaatacggacaaaatgaattttaacgtataaggcttcttttctcagtgcaaaacaactaaacaacaacacaaaaacaactagaaaacaacttaaccatagcatataaatcaattaaagtttatcatattatttaaacaaaaataaatttataagacaaaaatttcaaaaaatacaatactgaaataacttaatagcaac

SEQ ID NO: 393471 - DNA, 708 bp, Cannabis indica
taatatatatgtattaaaattaactgcaacgatttaaatttttgattagatacatataagtgtattttagtcaatatatacacttaaaagtcatatatatcaagggttaagaaaatatccttatactgtgagaacaaaataagaatgcctaccataaaattattcttaatattatttcaggattacatttttattcctattcaaagcatttcaaattacaaatttgtccataaaatctactgccaagacaatcagtaaagagaacgagttatagtacgtatattttatttttttaaaattactgtaaattttttatcagtaaaaagtatagctttatagcatgtgtcagtagattattatcactttttaattaatattgtccacattaattattaatataaatattactatattgttgtgtgacttgcagatggagcctatacgtaggaagagttataataataataataataataataataataataataataataatagcattgctattaggcaccagtagtgcctagcaccttctcgacatgtcgcgttgcgattggctagcgatactccctaaaagctattatattaaattatatgggacccgatacttagttgaactaatagcaatattgatacataagagggtgctgggtgttaaataaattaacaataaacccaagatctatttgtatataacatagaaca

SEQ ID NO: 393472 - DNA, 1504 bp, Cannabis indica
gattttttcaattccaaatgtcaatcatagccctgggtggtcttctataaatagaaggcaaaggcttcagagttgaacacaactgtacaactttcacaacattattctgacagaattttctctctgaaaattctctctgagccgccaccctctctctctctcttccttcactgtttcgaaatctataagtgctagagtagtgcccacacacatcaagtaatacctcaatcatagtgaggaaggctgtgtagaattcagaaacaacaaagaaggactatcgggctcagatcttgattatactctgctacagaaaggaatcaagggttagagatctgagtgggaggagacatatattccgctgcacccaatgtaagatttctgatactcttatgtgtttaattttctatcgttttagaagttcatatttaggttgttaaatcaacatacttgtgagtagatctaagttcctggtaaaataacttccaacagctttgttttgggagccaacccttcgtttaaagtatttgagggttttgttaagagaatttgaggaaatttaggcattgagaaagttgttagaatgcattctggatgtactttggtgaatttcggggatgaggccacacgagatcttattctggaggctgggggttataaattttggtaaaaagccggttgttcttaggccttggactacagatattgattcgatgaggatgattaattttatgatggtttggattcggttgaatggattggggttacaatattggggcaagaataatctaagtgctttaattagcactatttgaaaactgatcatgatcgataaggtgactcaagaacgttcaatggtgaaattttctcgtatacttgtggaaagtgagattttggatgctcctccttaaaccatttcattcattaatgaaagaaagcaattggtggagcaaataattgaatacgaatggctcccatcaaagtgttcagcttgtgcgaatctaggccatatagtggctaattgcaataaagagaagagagtagtttggaagaagaaaccagctactggaaaagagacaaaggagaccatgaacattgatcatccattagtggacaatccagggaataattcagagcaggaaaacagggaagaggtcgcaaaagttgttgctgttcaggtattacaagctagaccaattgagaaatggaggggaggtcgactactaatgctactggtggtagttggattactcctaaaagaattgcttggagacaagtggaaacaaaggtgacaaaggttgatcaaaaagtaaagagcactaataatgggtatgctgttgtgcttgctgcagcagttgaagagggtccaaattcaaaatctatgaatggtggaagaaaataacatgattaggtggaatgtaagaggcatgaataagaaggacaatcaaaaagctattcttgatgtttgtagattgaataaaataggctttggtgctttgtttgagac

SEQ ID NO: 393473 - DNA, 924 bp, Cannabis indica
aaaatataaaaagtaaattaaaatataatatttagctaaaataataataaaattataattatacacttgactcctttatttttattttttttatggtaaaactcttttaagtattttttttttttgtgtgtgtgtaaatttgatacttcaattaaatatcaccgttcaatattaactaaatgagtattgtgtacaggtgtgtacgtgaaaataaaatttcaaagtcaatataataataatctaattggtattaacagtgatatctaactgacactttaaatttacaaagaaaaataaatataaatgcattttgagagtgttaagtgtaaaaagtcaaaatataacagagtttcgttgcaaataaacattagagtaatttgtgtataaatacttaagtttaactctcggttgtaaatgaatacctacgtttaatttttaacagtaataatattgaagttatatttttggaactccataagtacctgaccattaaatgtcaaattattatctacctattattttcttattgatatatttaaactatttttttttaaaaaaaataaatatttaatgacataaaccaattaaaaattaccacctgtcaaattacttaatactttaagggaaatttgattttctatgcttagaaaatcaaaaaatttgatttctaaaccaataattaaaaccctaaaaaaactataccttttttttcaaaaccccaaaaatacccccaaactaaaactatctctctttctctctctatctagccggtcccaataatcccacaccccaggtccgatggtcggaccatggggtccgatggggtccgaccaatcggacccatcggaccccaaggtccgaccatcggacctctctcttcccctctctctcaaatcgcaggaaaaaaaaaaaattaaagccggt

SEQ ID NO: 393474 - DNA, 981 bp, Cannabis indica
atgggttacaagtaggggtaccactgggtaacccttttccttcttctttttaaaactgtggaacgaaatgcaaataagagccattgccaggtccatacaaataacaaaatgggctgttatttcaaggaaaaacaaaaaaaaaacaaaatgggctattaaagtatcctaggtaattttcaattttacaataatatgaggatacttttttcgaaattttaagaaaaaaaaattcataaagaaaaaattacggacaaaaaaaaatgtaaataccaaaacataatcaatattaaaactatactaaattttgtacaaaaatatagaaaattaaaatccaaattttttctctgaaagccaaaaaactatattttaataaaaaggaaaaaacaaaatttttacacaaatcttataattaaaaagaacctttctccaaaaaaaaaaatcttataattaaaaaggtgtaaaatttgttatttccttcctgtatattgaatgccattagtttgttaagcgtatggctgttgggtatcatacgggtattgttggttatcatactggtattgttaccatgttaaagtaaataattaagatttgaaatttttaactttttacttttttactatagggcagaatttttttcaaaaatactgggtaagttttatactgtacactgtattaagttttaactattgttccacggttgttttttagttgttccacttttattttaattgttctattttattattttacgattattttataaaaatatagtatttttgtaaaaaattctatgtgacagcaagattgtaaacttttacccaaaattcaataatttttttttaaaaaaaaaactccataattatatttaacctaagaaaggttactcagtttcctatttttgaaaaataaaaggatattaattgatagattacttgatactccatttatatgtaaactagggtactaagccgcgcttcgcgc

SEQ ID NO: 393475 - DNA, 781 bp, Cannabis indica
actatttttattattttctagttataacctattcctaatttttatttaaccaaatagaagtaaaagtttaattttaacatatttagctacaatcctcgtgggatcgacctcactcttggtgagtctattacttgtaaacgatacgtgcatttgcgtgtgcaaaatatcacaatagagcttgttactaaattttcccggcaaaaaccctatcagtctgaagctctctagattttatgaattgaaagatcagacctatccaggagttggagtgatcaattatggctttttcccccagtgtttcaatgctcagagtttgtaaatggtcgacaggtaccactccgtattacacaatctctgggcctgttgctaactttgccaacatatccacgaatgagtttttgtcttggggcagctgatgaatgttgtgacttttgagactttgaaaaaattctcttgaccgcatcacataagtagaaattttctaacccttagcttggtattctgaagatatttggtttatcactaactgggagtcactgtgcacttcaatactttgggcccctacttctttagccaattgtaggccatttagcatagcttcagttctgttgtaatattggaggtgggaaactaaaaatagagagaactttggagctaatgtcctttcagagaaattaaaaggattcctactccgactacctttcgtttgatgctcttgttaggttttatgccctaaaataaaactccatttcaatgtaatctattttattcaacatcaata

SEQ ID NO: 393476 - DNA, 757 bp, Cannabis indica
agagagagagagagagataggacatgagatggagagtgtcaatgggagtttggatttcttgggattggggataataatggtgtgacccgtttgggcctaggattgccgacggtagctcctttgagctggggaaggatgtcgcacaaagagaaaaagatggtagggttttggtgtgtggtctgtagaagatgaaaggtttcagggagaaaaagaaagaaaagaaaaaataaaataaaataaaaatactttttatacaattttattattataatttttaaattattttttagttaatattatgtggactactaaaaatgtgtcacgtgtatattagtgtatacgtggacagttcacaatggtacttaattgagtcttttggatggaagtataaagagcaaaatagactgtgagtttgatatattttgctactaaaaaatcagtttatgtggttatgtgttacaaaaaatataaagttcgggtaattttaccgctaatatccattttataaataccatttatttcaagggggttcaataatacttttttgtcctaaagccctaaaattttcaggggaccctaagtttaactttctgttgtaaataaatacttaagttaaatttttggcgataataatacttaagttataattctgaaacttttataagaacttggctgttaagtattaagtaaattgtcacgtgataattcctgattgattcaagtcattaaattttattttttgaaaaaaaattagttt

SEQ ID NO: 393477 - DNA, 1221 bp, Cannabis indica
taataatattacaactaattaccaggagtagtacgagagagagagagagagagagaggaaaagaaagaaagaaagaaagaaagagatagagattgaaagagagagagagaaaaaaggtagtattagtagtactggtcttcaatagcttaggctttgtaataatatacatatttaaatagccagtaataatatttttaaacaactcatctttatttgtttaacacgagtctcaatttattaaaagtgactttgacgtataaatttgtgtgatttatatatatgctattattattactcttaatttacaaaaatgttaagagctaccgatatttgtacaattagtggtattaggtctaacataatttacattattcttactaaatattagtggtgctcattattttttatagttagtgcttcttggttgtttagcgatttttttgaaaattattttttttaaattatataaaactcaatatttaactatacggtataacactaaaaaagatgcaagatactaataatatttttttttataatttaatataataacttttataaaatatgactaccattattcgtaagggatcaattgagggctcaatattctcaatataggcttatattatcttcaatatttctcttttctctctccccctcacacacacgtttccacagttcaaaactcattattagaccattttgtgtgtatgtgtgtgtgggggcgagtactagaaaatttgaaggtctaatgagataagaatatctgccaataataattaatagtaattattatagtaactctatgattagttacattattaatttatttctcaataaaatataattatctgattgatgtcataatgttatattaatatcgttattaattatacaacacaaatatatagttacatatatgccatttttcatatgttatcacctctaatttttgtaaattaatttgccaattactaaagaattcttattaaatattttagtttgataactttcatagaattaaaatagaaaaaaaatagttcattgaattttctatattaataataataataagggtttttcgttagcacatggcatgctctaagttaattatttggcattttgatagctacaaagttgccaactaataataaaagaagagaaaatgtcttcatcaataatatgtttttcatttaatttttgttatttttttttagaaaa

SEQ ID NO: 393478 - DNA, 3803 bp, Cannabis indica
agaccatcttctccaagattgatatttgatctagttatcactaattgaggattcaggaagaggatattcctaaaactactttttttactcgatatgggcactacgagtttctagtaatgtccttcggcttaactaatgcaccagtagcattcatggacttgatgagtcggtgctctcaaaggcattgtaataccatgcagaggtgttgttcatgggcttcctctgattcagaataaactaggatatcattaataaacacaatcacaaagttatcagaaggaatttgagtagattcggcgaaaattgaagctgttcggaattcgccacgacctaagacagcaattgaagttagaagtttcttaggattggttgggttctataagagatttgtggaaggttttgccaagattgctacccctttgaccaagctgacccaaaagaattgtaagtttgcatggattaataaatgcgaaaacaatttccagaagttacaggagagattaattatcgcaccagttctgagcttgccaatcagtgacgaaatgtttgtgatatactgtgatgcctcgatgaaaagcttgggtagcatgttaatgcaattagggaaggttattgcctatgcctcttggcagttgaaagattatgaacagcgttatcccactcatgatatagaactggctgcagtactttttgccctaaaagtttggcgtcattacttatatggtgaaaagtgtgaaatttacactaatcacaaaagcctgaaatacttcttcactcaaaaggaatcgaatatgagacaacgacgatggttagagttgctcaaggactatgattgtgaaatcctctaccatcttggtaaagtaaacatggtggtagatgcgcttagtcggaaagatccaaggcaaatctatgaattaatgcaaatctctctaagattggctgaagatatgaatagggcatagattgagttcgtggttaggaaattggcaaacattacactacaatctgatttactataaagaataaagattggccaacaaagtgatcccaaattgattgaacttggaaagaaacttaagactgatactataaaggattttactgtaactctaagtggattattaaggtataaggattgagtttgtgtcccagcaaatgatcgaattaaaagggaaattcttgatgagtttaatactactccatattccttactttcgggaacaataaagatgtatatgacgtcaaggcactatattagtggctagaaatgaaaagtgatattgttgaatatgtctcgaagtgtttaacctgtcaggaagtaaaagctgaacatcaaaggctagcaggtttactccagcctttgagaatacctgtatggaagtgagaagacataatcgtggactttgtggtacgtttacctaggactactgggttacatgattctgtttgggttgtagtggatatattcactaagtcaacacacttcttgcatgtccgggtgacctatactgtggaccagtatgtcgaattatacattaaggaaatagtaagactccatggtgcttcaaagtcgattatttcaaatcatgatccaaaatttacttttaaaatctagaaaagtctacagaaagctatggttactaagttagcattcagtacaactttttatccttaaacagatggccagtctgaaagaactattcagatactagaagacatgctgcgggcatgtgtgatagattttgaggtatcttgtagcaaattcctaccccttgattgagctttcatataataacagttatcagagtaccatcggtatttcaccttatgagatgatatatagtaaaaaatgttgatcacctatccactgggatgagacttgtgagagacgttaccatgggcttgaattggttcaaagggccagtaaagccattgaaaagattggatctcgttgctcacttcacaaagtagacagaaaatctacatcgattcgaagcgtaaggatattgaattctaggtgggagactcgttatttcttcgagtatcacctatgaaaggggtgcgtagatttgggaagaaagggaagctgagccctagatttatcgatcattttgagatactggagcgaataggccaggtagcctattggttagccttaccacccgcccgcattgttcggggtacataatgtatttcatatctctatattgaggaagtacgtgttagatccaacatatattttgagctatgatgatattgagctccaatcaaacttatcttatgaagaacaacctatccagattttagaccaaaaagagaaagtactctggaataaaatgatctctttggttaaagtgctatgcaaaaatagtaaagttgaagaagtgactttgaaattagagtcacagatgcgggaactatatccaaaattattcaggtaaatttcgaggataaaatttctataaggagagaatggttgtaatatttcgataagcctaatggtgaataattaggattttatatatatattatggactaaccatgtaatgagtgggatgatgatcctactaatctatcttaccataaatcataattttttttcataagtggataaataataatttattaattacggagaattatatagcatgtgtgaatataatatgagttttttatggaataaaaatattttcaggtttagcgaccttagagactcgatcggtggccaaaatttcataacatgttaaattagtgactttgatgagagtattatgataagtcggtattatatttattaaggtaattagagatacttgggattcgacctaatgccctataagtagagatttcttaatggctaagaaattttatatttattaataaaaatttttatacttctctgtttataaatatatattatgtttaaaagaaaacatagaaaaacacaaaatgaaccctcccctctccgtgcgacgaaaccctcacctccaccatctatttttacttcaattttcaaccaaaaacctagtgattcaagccctgtcagtacctggatagtgaaccattgaagaggaagagcttgaggtaatgattggtttttattttaagttgaagaattttggttctatatattgactttgtgtttagagtagttgtgagatctgagactacataatttagtttctaagttgctgggagattggtttctataattacttgctgaatttgagatggttttgaagtgaaaaatgagtttgagcgtttaaagctcaaagctcaaactttaatggtattttccttttaaggactcgtttctcatttctgttacataggaactgttatatggatgatatatatatatgtcctatgaagtttagaatgatttggttagatttggagttattttggagggtttaaagttaaggaaaaatgtattttagactattcaaaactagaattttcgatggtaccaaccaaaattccatttggtcagtttttgggaaacaccaaatttcgtattttggctataactttttacttcggtgtccgttttagatgttctttataccattttgaagcttgaaatgagatctacaatatggtttatctttcaaagccaaaatacgtattttatttgatggtatttttaccacaaggtttggtagaaaactgtagattgttttatgcgagtattaggcagtgttttagaatagacacttatcgatttaccgttgttgtgattgttgagttttgtgcactaaataaaacccatttcaatataatcagatttaattaataaagat

SEQ ID NO: 393479 - DNA, 628 bp, Cannabis indica
gggggcccttattgttctcaacttctaccttcttgccctgcagatgccgatcggtgacaattttctccttttctctatacatattaagaaaaattatttatcgcttttagttatgtttcgaagttggattttggtgactaatatatgtttatgtattgttcatgtacattgtaattaatatagtatattgtttatgtaattgtagtggagatccatatttcttagagccattttggatggaaaatgcagctatgagtgcaatcttggtgtctggttggcatagaatgagctataccttcaaccattcaagtttcatgtccattcaactcgaaaatctaattcgaaatttgcatgacattgttggaaatgcaatcactaaggaaaaatacattatttttgggtcaggcacaacacaacttatcaatgctgctattcatgctctttcaaatcataattcttcctctccttctaagattgttgcttcaatcccttttttcccggttagtatcctccatttttctataaatatatttttttaatacatggtagttaataaaggtattttgatactttcgataaataaataagttgcaattttattcagataattacataaaacattattttt

SEQ ID NO: 393480 - DNA, 820 bp, Cannabis indica
aaggtttcgtccttcttcttcacataaaaaaatcgacgtaccccaagataaggtactcggtctagcaatttcaagcctaacatcccctataactaaactttcaactctccaattaccatccaatacagaactttaagtgtaaattttgctcccagtgtcagttcaattcaaaatcaatctttcgcttgggtagtaacactagtagcttctctaggaatgcatctagaaactctcggaccacgagattgagtctcggtcccactaatgttcctttcgtaatattcaccacactaactaaaagttgatgcatcaatcccataaaatatctctcgctttaagtgcttagatcaatggtatctaggatccttacaccttgcccacaaacacaaatgggtcctcacactctggttcaaaagttaccatatttcttttacaattgatggtcacattatactttgcaagtcagtccatcctcagtataacatcaaaatcctctagatttaagtcaatcaaatcagctgacaattcccttccttccaccagaactagaaaggatctaacccacctgctggagattaccaattctccaataggcaacaaagtactgaaaccatgctacaaaacatcactaggtatatccaagttcccaagtactctacttaaaatataagaatgtgtcgcaccaaaattaatcaaaacggtcaataaagtgccaacaatataaaactgatccgtcacagtgaaaggaccagcatcggcctcttcttaggtcaaggaaaatacccgagcaggaacaagagtatcatctttcttttgttct

SEQ ID NO: 393481 - DNA, 579 bp, Cannabis indica
gcattgtagaattttctaatattttatatataacacttaatttaagtaagacccaaactacacttggggatggggacgatatcaaaacctcttattattattaaaatatgacatacaattacatcagcttgtaactccaataattggtgacgttactgaacttctagaaggggaattgtcatttcgttaattttatattttatatacttacacgacgtattagcaattgctttacttgagtgcaccagatttaaaaaattaaaatcattgatacatttatttttattgtttttttttcctttcttcctatcctaatcaccatatttaaaagtataattatagcatactttatatgattatatccatgccaagagcgtcgtttacttttatttttgtgaaacctaattaatataatggacaaaatgcttatcttcgattgacgtttatccctctctgaaaattttatagtataataataataataataataataataataataataatttaattttgtaaaatctaaccacgatcaacctacactaaaatttaatcaaaccatttctttttcttttttac

SEQ ID NO: 393482 - DNA, 849 bp, Cannabis indica
tctttttctttgcttaacaatttaataaaattccctaacacaagagcaagggaattcaaaatcctaattctattgaacatgcttgatgattagaaacaattgtctaagatggtcataattgatgaccatgtagtagtttcaagagaaacgcgcccggttcacgtcattaagtcaactccacaatagtgtaaagttgacttggtgaaaaatattaaccctgaaacttttcctagtgacgttgacatctatgtttgatacatggcaagaaaaatgacatctcgaagttgagtagtcctgagtcataccagtcaacctaggaggtataacagcctaactattctaggcatgttaacctgattttaaacttaactgtgcagttcgttgctaatcagcgagtttattgaaaatcgtgattaattaaaactttgcttaattaattataaacattaaaataaaatcgggatccctgtaacacccgtatttgaaacttgcttaaactcaagagctaattttattatattataattaattaactatataggtcgggatcccgagttataaacacagttgaaaaccacatttgctattacaaaatccctaaacattttttttaaaacaaatgacaggcaacaacaaaagtaactcaaaatgttaaaagatcgaaaccctccaggttgcactgccgcgatatgtacaatcactgccgagctccatctctctgttcctccagcttagcttttcccttatctacacaaggtagcaaactgatgagccaacagactcagtaagatattataagcaatgttataccgaatttatgcttaagccgccctgagctcaacaaccgag

SEQ ID NO: 393483 - DNA, 1193 bp, Cannabis indica
ttgtttttttcttagctgcaactatcaaatatgaaacccactgctgctgagttcaaagctttgaaattgagcagtatcaagtttgacactgattacaattcttacaagagtattcttgttccggaacaaccttctatggttgagagtgtttataaataggatcggaaatagcccaagttgacaatatatcaacctatgcattcggtccagtttcaggctgccagatggttctgtttgactcctgaaaacacttgcatcttaatctttgactaaaacagagaatatgcttggaaaacttcttcaaaaaacttcttgtaactggcccaggttgataaaatatcgacatgggcgctagactagcaccagatgtcaacatgggtgttggaccctctttatggctcccatgtcggtctgtttcttcccttaaagtacttgtttccacattttttatgaagacgaagaaaatgcacaagatagttccttagtttgatgcatggaagtactccaggttgacagaatgtcaacctaggggcttggtggcttgggcacctggtgctttaggtggttaaaacgaattttattctgatgcctcaaatatatgtttatgacatgtgtaattcgtgtcccagtacaaagtttgacccaatttcactaagacggtcccaaaaagtaaaaccctagttgggttgtcaacctgggcgttgggtgaaacactagatgcccgggttgatttctgaggtgttgtttcgtgtgtttttagctcccaggccttggacttggattgttcatatcttcatggtacaaaatactgaaagatagtgagttgaaaacaacttggcagaattcaaacacccatttcgaaactcctgaagtcaacctaggcgcagggctaggggcccctcccaacttgctatgattagggactacttaaacccaagatattttatttttttttgccacatatcaaatattgatgtccacgttattagggttaattttggtgtaaacactctctttcacattatttttggcatgttttgatctaaaatattttaatggtaatcacttttaaaaattattaaaataatattatattattatttaattattaaatggttaattttttttaattttacaataataataataataataataagatataaagataggtaaatactattttggacgct

SEQ ID NO: 393484 - DNA, 667 bp, Cannabis indica
tcaaactactctctccagccacatgcataagatttttttttctctctcctacaattcaaattatttagtttctcatgcgatagaaatcaatcaccaaagattcttcatcaagaaactaatttttttatcaagaaggttgtcttacattaagaaactgattttttcatcaagaaactgactttttcattaagaagctagtttctacatcaggaaactggttttgattatataaaagtaaatttataataaaaaacttaaaataaaaaaagacaaacacaataaaaaaaaaatgaacaaccccattacagtaaaacaatgctaaaaaaattactgaaaattaccctataaaacttcctaaaaacaaataagaacattaaatataagcttttaaaacctaatttacatatatatgtcattttaaatactataaaaatacctaattaaaaaaaaatcacataaattagtcaaacttaaaaatgttatatttaagtaagtgtaaattcctctattacatatacacattaattcactaacgtgctccattaggtgttcggctcaaggcccattatattataagaaaaggcccgtatcttcattcatatcaatattgaatttttataaatatgagatttttttagtgccatttatttttttatgacagaaaaaa

SEQ ID NO: 393485 - DNA, 765 bp, Cannabis indica
ctaacaagtagtctatagttaccctattatttctatacaaacaagtctaacgtgataatcaatcaccgttattaatattgctatccacacaatgatactaccaacaccttatattttttaaagtactatatttacacacacacacatatatctatatttatatatatatatatcatttttttgtgtatgcactaggttaaattattttatcattaaatattaaagcctaatatagtcatctcaacccaataggctcaatctaacttaccccctatattattgtactaagtagggttgcattgtctaataaaaaataattcaattgtttataacttcttcaaactgtagtcattgggttggcccatgaaaatacctctaacctagctaacccaacccatatgcacctctatgagacagtagtggtattttcatgaggtggcacctttgtgaatggttaataatatttacaaaagttgttgtattaaatagggatatgggcggtaaaaccacctatactttagaatttttaacaattaactacattaatcaatttttggtggcaaaacgatccaaaccctctttctattagcaatttactcatttcgtcgaaaagtctcagttaaatatctcagtggactgcctacatgtacataagtgtacatgtgacacatttttagtgatccacataatattaataaaaataattttaaatttaaaaattagaaagaatatttaaaaatttaaagaataaaaaaaataaaaaaa

SEQ ID NO: 393486 - DNA, 725 bp, Cannabis indica
atattaaagacaacagcttgaatttacattgagaataggaattaaaaaaaaaaagaaacatttgggcttgttgtctcctagtggattgaaagcttttgtttttacattcaaaattcttgtcatctatttctcaatatatatatattgatatcttgtaacataagatactgcaaagtgttgtaaaaaaaaaaaaaaaaaaggcactgttaaggttaacatccaatttctttttattattaattttttctttctttaactcaaaacatttacaattacttctaccttgatcggctaaaacggatattaaagtagttttgtttgatgagtctttttaatccaatttgtttaactaaattcagaattaaactctaacatgaaaagtctgcaaaattgcaaaactcggaagtcttaaactaaagtttccaattcgaatgaactacacaaataatattacaattgattttgttttccaaataagacaattgattttgctgagcgatttccttacacagaaaattttgattgaaaaataaaaaaaaaaaatacaagaaagcaaacgcatgttaaatatatttatatatactagcaaaaaactacgtgcgaggcacgtatattaaattttatgttaggttttttctatgttatttgaaagtgagattattattgaatactgaatgcaatatattagtgtttaagaaagcttaatgatttaaatatatttttaa

SEQ ID NO: 393487 - DNA, 938 bp, Cannabis indica
ttatatatatatatatatatatatcatgtaagagcaatattttaatttaatcatgtaacaagtaatatatatatatatatatatatataatataacaaaaaattaaagaaacttttccaatagtttatttttttgtaaatattagtcaaaacaaaaatatttttatttctttattttcggctctaggtattgtaatgaaatcctgaaagttaaattgccatttgaatttcaaaatatttttggttagcatatttatgggtcaataattttttacattgttcgtcctaaaaatctttatccattcgagcttcaattaatatatttttccaactccaagagtgacaacccttcatcttttcaaatatttaatttaatacctgtgaggatttagagttgagattttttactttaaagattttttgatattatttgtgtaatggattaaagcaaagaatatgatttaaaacacacacacaaaatctagaatttaactattataaatcattatatagtattttttagaatttacactaatattttgttttgttttaattaagttgagtttgttttgatttgttcctcttgataatattttgttatccgcttaaatttctaaagactagcaaataaactagttggagattgtgttaaatgataaattaaatagtacatatttaatagtataagaatacaaatttaattaaattttaaataatattttcataaaattaatgttatatatttgtttattgaaaatattttgttaagatttaattctatcattgtttataaataataattagtatttatggctgttgaccgaggttttcggcaactaataaaatatgaatataataacgagctgtaagaaagcgagatgaagacttttttacgtggttggggcgttaatgagccttagtccacgagccactgatatt

SEQ ID NO: 393488 - DNA, 948 bp, Cannabis indica
aaaaaaaattgaaaaaatttagtgaaaaaaaagacttttagcaaaataagtttgaaataatcaaataatttctaaaaactttgtttttaatttcataatttctagaaattttgagatttcttcattatttgacaaatgagtacatttgctattttgtcaaactcaaaattgtattcccataaaagaaaacctaattatagacgatgacctcaaccacataataagaaaatatatatattaataattaataaacaaagataaaaaatcagggtaagttaatattattataaatgagtgataaaaaaattattattcagattattttgccaaacggtattttttctaaaataaaataataatgtggtagtggtattacactatataaatattaaatataaataaaaattcattagaaaaactcctctattttaaaagcatttacgtcatgcatgggacttgattaaattacacaagaatatagagaatattcctctattttattcccatcttagaaattaaactatataattcaatttactatttgttacttttctctcgttctgtaatttacggtgtaaatacttatatttaaaagttattatattaaattatatgacacctaataattaattatactaataacgatatgacaatcacatttctcttttattgaaggataaatagtggcataagtactcaaatttttgagtttgtaagctgcataaactctattttaaatttattaagaaaaaaattataagtaattgatgctacatgttttcgtccagaccaaatgatctaaaatcttaatcttatataggctctatatttaatttaataattttagatatttataccgctatttaccctttaattaataagggaaatttgaatttccatacttacaaaatcccattatttttttcctaaatacatacttactaaaat

SEQ ID NO: 393489 - DNA, 996 bp, Cannabis indica
ttttttttttttttgcattgttgacattggaaagcgattcgaagtgtagtaaagtttaatttatgacgatctttaaaaaaaaaatatatgacgagttcattattattttatactttttttttgggaaaagcttacttgttataatcagggccagctgatatgttgtaattggatatgccaacgtgcagcagctttttattggtgaaatttcagtgcaaagctgctgcaagatacctttgggatgaaattcatgcaacactgaaaatttaaaatgcgaccgcatataaaacgacaacaaaaatgaattagaaaagtggaggaacattgttattggaacatgtaagtacctattgcttagtattttttaaaattcttgcaattagttaacgataaaatttttttttatggtatttgatatttaatatcatcaataatgatattaataagtaagagagtattaaaaactacaagtgtcttttagcatttctaaaaataacaaaactttttattaaatagagagtgatggtattttaggcaattcgctcataaaagtaggtatattttaataaaataaaatatgaggatatttttgattggtgaatacaaaaaagaggtattcctcaacttatctcaaaatattttagggcccttatttataaaaaaatataacatttttcaaaatcagtaaaaaaatatataattttaaaagaggataaacttttttgagcccttgagttaggtggaccctaagcacaggcctagcctgccgagacccagggccgggccgggcccggcaggctaggcctgataggcacaaagccacaaaggtttcaagatacaaaagaacctaaaaaattaaacaattaaatcgacaaaaagacctaggtaacattgataagatgattatttcttattattaatcataagagattttcactaataaaaaaatatttaactttttttttttgaataatgattaaatttcattaaactaaa

SEQ ID NO: 393490 - DNA, 516 bp, Cannabis indica
ttaagtaaattctttcatctttcattgtcacttcacaatttctcttttacttgttagtgtaagttgtgccagtgccttatctttcttttgggtctttttcaggattttctttggaatcttcctttgggtcttcttcgggatcttcttcaggatccttttcttttgggtctttttcctcagaatcttcttcttctaggtctttttcttgagaatcctcttcttctgggtctccttcttcggaatcttcttcttttattttcatagcaaatggatgatccaacaacatctgagcagaaggtctttgattggggtctctggtgaagcactcgagtaaaaaatctttagcaatgggagtaagttaagatggtataaaaggcgattcagtagaaatcttgttgtacaactcttcttcccccaaattctcatcccacggcagatttccagtcaacatcttaagaacaacacacccaagagcccaaatgtcagacgcctggtcttgagtttcttcacacacat

SEQ ID NO: 393491 - DNA, 557 bp, Cannabis indica
aatcagatgaacacccctaattttcacattatttcttaattacgttaattatacatatttattaaaatttagaagtctccatgtcttgcggcctctgcaacttaagaaacctcgatcccacccccaccccacccaagtataaaatagtagtaattatatttgactaagttacattaaagagaacaaatagacaaaagctaacgtaatttttgcaaccttcagatagatatttttggtctacaatctttggatatgattcttgtcacaccattaattttccacgtaacagtccctttgtcccacaagcaaggctgtccaataatttcatgtcttaaaaacttttcattgaaagagatttatcgtcaacaacttatattaaaagtgcctatttaacggcaattcttagtttaatgattcttgatttaatgattcttaacagactattaacgttaaacgttaacaaataaataaacccaataattaaacccaaaaattaaacaatccttttttaaattaaaaaaaatatcttacccacatatctctctaacaaatcctac

SEQ ID NO: 393492 - DNA, 2558 bp, Cannabis indica
atgcacgctaaacatgtaatcatctatgcatattattatatgaatcttaccttgattctgaattcaagtgtcccgatcaatttgagtggaaactgcaagtttcaaaagggcatttaatgatcaaatcttgtttgctacaaaaattgcctagtttttgggatttcttcataaattccaggtgaaatttcttctaagagcacattttttcaagggcttttaagactagttggcaaatttctctaattatagcatttgttaggtgttttcccaatccagagagtagcctgaaattttctttagaggaaaggaagaattgctttagatttggataatcaatgccacctgtttggtagaatcattgagtcattctcttataatgctttcccaagtctcttttctctattgaacaacacttgatctttaagaactcgtctctaagtctttcagttacttatgcatcttggccacataactcgacttagagatagcttaaggcatttgtgatagatgggagattcaagaaattcatctatctatattcgcctaagcttgtccaccaatcttgaaaatttcttgtgaatcttgagataaattcaagaggatcgtccccgtctatgcctgtggtttttgtgtttctaggctaagccaagcttggaattcttggaatctttctcaccacttagatgggagaatgtcatttagagtaaaagtttgaaacttagaatatttactcttttgatgatgattgaaatctggttttattgtagttgcttcttcttcttaacttttgtcttcacttttgacaataggctcggtttgggaatgtgattcttttgtagattgagccataaaatgtggtggtacgtcatcttcacttgtatctgaatcttgagactcatcactagtatctgaatcttaggaccaagttaagtctcttccttgtcagaggaagaggactgatttccttcattgtaaagttcttcatttgtttaatggatcgtggcagaaataggattattcacagttcattcggccatgcattgtttaggctctttctccaatagaaaagatgcttgtggaggaaatttatctaggatttctattttctttgcctttttggtttttttttttttagttgttaatatttgttaagcattcaactaagtcgaagtagtgagtcttcttgtgaagagaccaagaaaggtgatctcggagaagtctttggtattgttgagaactctcatggtactgattttgtatttgctccaaaaagcattgaatttcctcctaaaagcattgattgagatcctgtagaatatgattctctttgaaaaatttgcttttttagattattcatattgggtttttagaggtttcattttagcttcttttgccaagaataatgacatcggaatagaatttgattttatgatgaccataagttcgacatgcatctattgaatcttgtttgtcaacttttcgatgatcgtgtcttgtgatggttgtttgaccattatctctgtgcaggtgatttgtttttctactcgttttaagacatcattttgggcaatcataatttgtaagaaggaaagactatttgtggttgtgaagctattgaagaattatctgaatcccattcagtgggttctagtgtaggctgattatagctctatggtgcaaagtatttgactatatagtcaaattttctggatggttggcctaatagatcgatgtttttatcgcctttttctagcttttgcttgagtcgctttcttgaagtgaggcgtggtgagggctcatcatcttttagaaaacttttgtagttacaaacatcccaatatttatgtctctttaaggattcaaaagcataaattggctttccttgggaattgaagtacatgatctctacatctattggttggatgggtgtgatgacaattgggtgaaaaaataactaggtggttttgtttggcttctgtaaaaaaaaaattcaacaaatccatcttcttttgtgtggtaggaaggctcagttgtggtttcaatcacatgttgtggcttgtgaatatttttatagttggtgacccacaatttgggtaaaagctttgtgagttcttcaatggtcatttgctttgggatatgtggataggtcggtacttgtttggaatccacggagatgagtaaagcgtcttgtgtttgagggatgttaagatcaagagcatgatcttggagccgatatgccatctgataatggagtttggtgccaagagaagttgggtcttggtccatttctactatctacacttctactttaaaagcatcagtcacttgattgtctttaagagacatgttgaaattggaaaacagagtgacgaccactgttcttacaattaaagtagtttcaatagtagttgtacttgcatgttgatgtttcctcattcgagtatcaagaggaccaatacgagcgctaactggaagtcccttccttccattattatttagagcaaggaaaatagcaccaaggtggttgtgggtataacgctgttgggttttatgcccta

SEQ ID NO: 393493 - DNA, 1071 bp, Cannabis indica
aataataatttatatatgatatattaaatgggatatgtataaatattcaactactaaactaattaatattgtcttctaatgatgtcctaatccaatataaatcatgcgctggtattggcaattgatctcgaactatatatatataatacatatatattgctatcttttccgcacttacgacaacagacgctgatgacgttgctcaatcgagctactacttttattaagttaattcttaatttgtttctttattaagttattattattaaaatacctaaaacaatcataatacaatattaactaaaatgttatagctatacttatattaatgatgatgatcaggtatagtaatatatatagtagtcccgtccatatatatgagtcacactcacaaccatgttcaaatatatatttgttgtttaattgtgctgtgtcaattacatgaaaccttatctcaaatgacagaggtgatgtaacatttatagcactattgaggagttattcacattgagatttgaggtctgtgaggacaagctctaaattgatgtgtcacttgtcgcatggaccatctcagtttccaaagttgtactggacaaaacttaataaccttgtcttctatatacatatatacgtaacactcacattaataaattattataaatattatatataaatattactacaccttatatagccagctcgttacatgtctaataataatttttattaccatgcagagagggtagcactagcagcaatatcaatgttatccccccttattattatctgaaaaaatagatatgtatcaatgtgtatttatttcgatgttattttgtggttcttattctgtctacgtatactgaatactgagccccagctagctacgtatatgtatactagatgagacttacgtgtcgagccacgtaaattttagttttatataagttttagtagtttttgtttaaaaattcaataactaagcaacgacaacaacaatggtaatagatctatttaagtttttcatatttgtaaagattataaatctaaacttttaattttcttgatttgaga

SEQ ID NO: 393494 - DNA, 532 bp, Cannabis indica
agatttgatcattagacctgatgatatctcaccagtagcaaaaaaaattctagaaccgtcgacaccacatccgcacccacaatagaccaacttttttgataaaaggcaggagtcattccatccggacctagagatttatccggattcatatcgaaaagagccgttttcacttcttcagcagtcgctttaaggaacttctgattatgaatagctgagacagatggctcaatacaatcgctaatttcatcccaatgagaatggcctaaagcggaaaaaatatcagagaaataccgaagcatgacctgatcaagacccctgccccattcaacccattgttatcatcttggagtttttgaatgacattgttattctttctagtagtagtagaagcataaaaaaaattgtgttactatccccatatttgagccaaagctggttagatctttgacgccaatgaatctctttttgatggaaaatagtattaagatttttttctcagcttcataaagggaacaagaagttgggtcccttt

SEQ ID NO: 393495 - DNA, 872 bp, Cannabis indica
gtggatctcttgagccgttctggctatcttgaaaaggcgtacgactttataatcaaaatgcctgtggttccagatgtagtcgtttggagaattttgttaaatgcttgcaagctttatggaaatgtggccctatcagaggttgtcacaaagaagcttcttgaagtggatccttgcagtagtgggaattatgttctttcatcaagtacttatgcaggtattgatagatgggatgatgttgaaaaaatgaggcaattgatgaacacgaacaatgtgcagaagccatttggttatagctccatcgaagtcaatggtttaacatcaaataaataactcactgaatcggtaagtgagatttacacatacaagtacagatttagcacatcaattgagatactgtggttgaattggatagaccaaaacatgttggcattgcccttggagttattctgaaaactattctggtgagttctgagagatcaaacataatcttaatggcgttgccgccaagcattctgtgctttttgaattttttttcttctttttcataaaccttaacaataatacaatgaaaataataaataaataaatgtcaatatcatactatgtatgaaatttaatacataatttgacattttccatatctacagaatgataattttataaaattcatgatatttcatgctgtgcaggcacaatcttcttccaaaaccaatggtttctccaaactgaagccatatcatcaatagacacacctttagtctcgggcaggaacatataaacaaagatggtcataagaaggatccaaccagcatagaaaagaaagattccaaatttaatttgacaaagcagaggaaggaaagaatctgcaacaa

SEQ ID NO: 393496 - DNA, 1130 bp, Cannabis indica
gaagtattcagacggctggaggcccaagctccttctacgaggcttctaggctggtaggagctagagcatctgctatctcagcgaggggcaagtccacgttctgaccagaagtagaagtggttgcctcggaatctccattggccacctgggaagcacagtactcgagatacatgtctttggcatcacccaggtaatcaaaatttgcctgaggattagccttccaaaagtcatagaaaatctcgagaccagctgtctctaaggcattcaccttccctttaagcctctctactttagtgttaacctcctcctcctaggacttcttctctgcctccatcctgcggaaggtagttcaaagaacctccctttcttcctgaaggttgttaacttcttgggacaaggaggtcatggcagcttaaagttgatcagaagcctcaaatccttggtcagctcagccaccttcttctcggtagcaagaagcttttttttacttcacccagttccattcagacggccccgagttgaaccctggcttcatcagcgtccttcctagccaagtccacttttgccctcatggtgttggacatggcagtgttctttgaggcagctgacttagctcaggaagaaacgtaagccatcttcagactagtctgcataaggcaaaaaacattaaaatctaaaccaagaaggattaaaggaatctgtgaaggaagactcacccttgtaaactccttcaggactccttccatcaacagctctagagaaggctcgttgtcaacaccggccatttgctcatttaccttagggaccaatcgattcatgttgtgggtgagcatatccttacctctcttagtctctggatgaagtgattgttggaattattttactaggatcttagatctactcacaagtattttgtttaacatcctaaatatgaacatctaaaccgatatgaaataaacacatataaaatatgagaaaccttatagtgcttgcagtggaataatatgtctccttccactcagatctgtaacccttgtatcctttctatcggagagtatcaaaaagatctgagtccgaatgtccttctgttgaatctagattcttcaggatcttccacactatgattgagg

SEQ ID NO: 393497 - DNA, 951 bp, Cannabis indica
agagagagagagggcttcaaacttagagcttgagagcatagggtgcttgggacttagagaaattagatttaggttgatgctcattatataggagagcttaattacatgagaataataatctaatatcccaaaaaaaaaaaaataggaaatataacatatttgctacataataaaataataaataattaatatgataattaatccccaagaataggtaaatagttgatatttatcccctatttttgtaagttgtttaagtctaatttgtagcttggattgttgtctcggatgcaaggtgcacatcaagtgcctgccatggtgaaatttacacaccaagtgcctgcgagggtgcaagctggccggccaagtacctgccaagatataggctagctggcccttcctttgctggaggctggcaaatgcatgctggccatagggccggccagggggtcaggatagacccctctaggtggttagttcattgtctcttcgtcacacttaagtatttagacttctcatcaactaacatgttgtgtacgatgacttggctttcttgttaacaagttgtaattcacgtgacattaatctcgcccacatgagcatgccacatcatgtaggtaaaaattaggataacattagggtttatgtaacaccctactagtttaggtgtgttatcgtgattttatattaactttgcagctcgttgctaatcaatgagtttattaaaaattatgagtaattaaagcttttgcttaaacacttataaatatcaaataaataacatatatatataagtgggctcccaagtataaaatatttacaacagttacaaagtatgtaatacaaaagttgtcacctaacgactatacaaaatgtaaccagctttcccaaagattgtacgctccaagtctaaccgccccgacatgtacaatcttcatctgctcgctctca

SEQ ID NO: 393498 - DNA, 2077 bp, Cannabis indica
ggctgaccatggcctaagcagactggccgaccatggaatcaacaacatggtcgaccactacctacataggctggtcagccatcacctcattaaactagccaggtgatgctccctcaacgtggctgtccacctagtctgtaccctggccggcctgatttgccaacaatttactcttatacttttggtctactatgacaaagaagtaaactacatcttgctagcaggatcccctaacgaaaagaaagaaagaagtgaccaagccaacttaaagtagcatgtttgtcagcaaaaagttgctaggtacttcaacaaacaagtcaaggggaggaaattcttcgtaagagacttagtgttcaaaagaatattccttcataataaagattctgcagcaagcatgtttggaccaaagtaaaaaggtctacaccaagttagaagataataagaaaatgtgcatacaagcctgtcgagtagaatgagaacttggagttggctcgtcaaccaaaatattcgaatggagaacatcttagtaagtaatctctctaaccaacttgtactcttcaatagtggttggtctaatgtttcaccatccaggaattcaaaagagctaagtacttatggctttttagcgatggcctcccatcactcttcagtgatggcccttgcatggtaagtcgcataggggtagccacaacgtgatttcaaaagtagacattaagctgtaagttttgttacacaaaacatgtacatttcacaacaacaacacatgtgcaagaccaattgatgaataaaaattgtgtttcagttcaatgatatttgtctaaactacttgctaataagataacttcttaaagttaatctttttcagttccacatgcatacacccagtagcgccccaagaaaattcccacgcaaggtctatgaaaattggtgaattgcaagtgaccaagggactataagtatgtgtgctcacttgggggcacccacaccgtacaaaacatcaaactagcacagagagcttatgtagagaaatttaaagcttagtataagctactaaagctatcgctaagtcaagtgtaggaatactttaccttgggataaagaaaagtaaatctggatacttaaatgtcaaggaaataagaagacaaccaagatagtcatatgtccatagtgaaaggctttaaggataaacataagtaatgttcgaaaatagagggcctataggccaaaagcaagaacatgaaatccctaagcccaaatatgaataaaaaatttgttcaaatgcataatgccaaggcctttgaagaaccatgcgattcaaaatgcataaggtcgaggccccgcgagaatagtacaaccaaagaagaaccagatagagatcctataggaaccatgtaccaggctaaatctctaaggcaaggtagaatttctagcaggttccaagccaaaaggcagagttcctaataggttccaagccataaggcaaagttcctagtaggctccaagccaaagggtagagttcctataaaggttccaagccatagacaagactctgataaactgtacgcaagggtacttgccaaataatgtcattgtacaaggctgggtattagtgaagtacggtttctagtgtaacaacttagataagtgtttagtcttaagttgagcattttattataagagactcatcataaagtttcatataaagtttaaaatggaaccatgtatgagacaaaggttgtatagattcacaaggtcatgataggattcttactgaggtcaaaagaggatgaaaaactggccacccacttgggaccaaggcctaggtcagccagggtccgaaagcattgagagggtcagccagagacctgtgacccatgcatgaactagccaagttcctaggacaaaccttagaaccaaccatcccctatgaaaacaccatgggtcggccaagacttaaacaagatcccaagggtcggccagggcatgtaatggattaaaatatgtgtttttccaagactcaaacgtgttcttcacgttcttcatattcttcatgactcaaagagtcaagaatcagaat

SEQ ID NO: 393499 - DNA, 534 bp, Cannabis indica
ttatttatttaattaaattattagcttttcatatattttgattgggtgggactcagggagatgagggagggagttggagtattaaaacccaaaataaagcgccatttttttgttccctacttttatttgtttattatttggggccaataattatgtgtttgcgcggttggttggtgctcttttttatttttcgtttttgggttttggatttcctatttaaattttgaaattttgagcgttttttcagtcccaaatcctttgagcatctctatttttagatcccggcgggcttttcaaaagcctctctcaaaactcaaaatatcaattttttcagttttggaacatagtgactgtgactgtgagagagggaaccctttactgaatttatttaatttaatttattacatgaccattactcactttatacaatttttgttatagaggttaatatagcttttggaaattatatttatatgagataatattagggttttacaaaaaaatttgtaaaccgcctaaaccgaataacccgcc

SEQ ID NO: 393500 - DNA, 1625 bp, Cannabis indica
gatgacaaaaaatagcatgtttaaaaaaatatatagtgtatatcttagtttatactacattaattattgagctcatttatgtattttgtatgatagctttatatatatatttttattgttttgttcaaacattttcagaattttgtgcatttttattgtagtgtttaattattaaattagttagtgattattgcaaactgcccacatcacactgtaccacactttttttgtggtgcaatttatgcagttttgagctctatgtggtgcagcctgcaagtgtggtgcagtccaaaaaattagtcaatatttgtaccactcgcaacacaaacacccttatcatttagtgctttcacacccatcacctatcaagagcaatgttccatcacttcgggatcaagagcaaagaagtgggtctcgaggaaagaatgtacaaccaactcaagggcgaagccaagagctatttcaagaacctcgtcaaacctcctcaagagaccatcttgcttgtgacagacgagctaatggtgtggagccaagaagagatgcctctcgtgacttgccaaggcaagaagaggcacacaccaattattaagagacaagaagggttgcttctcatggctttcatacacaatatcaagctccaagaaaggaaaggcgagaacttgcgagaaaaccaagcttctcatgggccccaacttagggagcatagacgagaaagataacacattgtctttcgtgacaactatgctcgccaaagacagtcaccaaagaagagggaactcgagcttatattgctcaaccatcgccacagtatgaaaccaaaaagtaacgatatgtatacacataattcacacacaaatttgacacacacttatgtgacaagtaatttcaaccgaacatctttattaaagatagatcccactaatcaaaactaactcgcgacatgggtgtgtgtaaattatgtgtgtatgtaactcttttggggtatttggtacaagggttaaacttgatgtgaatgttaaacgtaactcatgtttagtaaattaaattttaatgaccaagtttgtgtttccaactaggtcttactaaattaaaattatggataattacataaggcactattttctgtaaaaaattatatttttaggtttaaagattttttttatatatttttacggtttctcatagaaataacacgaaaataacaaaaaaattacaataaaagtaacatacaaaataacatttaaattacataaaagaacatacaaataacaaaaaatcaacaagattacaacaagaaaaaaactgtattatctagtaaataaaatacaaaaaatcgtaaaaatgtttaaaaattgtaaacgtattttgtaatttttgttttgtatatttgtgaaataatctcttaaaataatggtaatgttaacctactctaatacgggtttcatattttcttaattaagggctcgtatggaacgtcgtattaggtcgtattgtattgtattgtattatattgaattatattttatgcaatatttttatgtaaaactatatgtggtattaacttttatggacacctaaatatataatattttagtataaattaaagtttaacatagtattatata

SEQ ID NO: 393501 - DNA, 1372 bp, Cannabis indica
tttttaaaaaaattcgacccacagttaaaaaagtaaaaagttaaaattttcaatatgaggtgtaaaaaaatcccagtattctatggtataatatattgtcaacttgatttagtattaatgatatatgtctcttcccatttgcttaatgtgtacgatcattaattcaaaaataataaagaaattttataaaaggaataggtaaaaggaaaatgtagaataaataatgatttagttcattatttattaatggggttctttgtaaaacactcatttttatagtgcaatttgcactataccctaaattcaaaacatattagcaaaatactattttttatctttgcaaataaaaaagggtattcggcaaataaaaatgatatttttgtaaataacttttaaatttagaatacactataattagggtgtattttcaccaatttccctttattaatttataagggcaaatatacattataactgttctcaactatatatattgtacttgaattttatttgcatagcatgttgtttaattgttaacttaattagtaggtgtttattggatcacatttaatatttttagatatatttaaattcgatctaattatatattactatctcatctgatccaattaattttagtcacccaatcgatctaacatctaatggtgttggattagatcagttgtatccatttgatgtatttcatgtgtatctattaatttaattttaatttattcaatccatctaatattttagatttagtatcatggattgaattgaatctatcccgtctaaaaaaaataaaattttaatgttaaattttatatgtatatatatatttacctataacaacataaaatctaattactcattcaaattaaatgaaaacattaattaattcgattggatgttgaatgtattggatttttggataccccatccaacattcgatcctattcgatctgattgaatattcaaaaataacatccaattcgatcagatcacaattagatatctaatagcggtaagttataattggatcgatcgattattattgaatcgatttatgcataccccttgttcttataatttgattagtaaattacttacacgtacggtaagttaggcaaggaaacttgaggtgtttggtgtaaaagttttactagggagttaattagttaataggggttaagattaaggcaatcttaagagtttaatattctaataaaatcataataaacatagatttaattttacattctcattaccaaaatcacaacgcttcatcacagtaactacaaaacattccattaagaattatgtatatatttttttttaggttaattaagatttttgttccttaaattttaac

SEQ ID NO: 393502 - DNA, 1142 bp, Cannabis indica
gaaaaaattaatataatttatagatctatagctggtaaatatagtaataatatcactctcacgcacgtacctatatatatatatgcaataattaagaaaattctaaagattatatgtttatatatatatgtattttatttacatcacgattaacgttatatttaaaattaggataattaatatttttgtctcccgaacgttaatttgtactaaaatatcatgtccgttaaatttttaagatcgttaaaaatctttcttttgaatttttgagattgtcaaatttaagaacttttgtctaattttaataaggaaagtctaacatggatgaaagtcagagggcatgatttaacacatgcatgtcaaagtttgagagtcatgatttgataaatatgaaagtatgggagcataatttagtacatggacaatcgcagaattaataaaattgaatgaaattaagcaaaagttgttaaatccaataattttagcagttaaaaaaaaataaatttttaaccgctagaaaaatttagatggcataatttaataatgtaaaaattctatgtaaaattcttaacgagccttaaaattaatatcttttacaaatctagctagtagtaattatatattagactgacacctatatgaaataattaaggaaaatgttattggatactaatggagttagctagacttgaaattaagggggccagattataatactaatgggagaatttaaaacaacgtaattaaaaaattaaaatggcataataagttagtcgtaatatttaagagatattagtaaagccttatatatattactactgtataatttaatgttaggaactatttattatactttaataataattataaaaaaatattaactaattataatacatgatctcataaaagatgttaaggtatactatgatgggcaatagcagtactcgtaatagttatggtacattgctgaaaaaatacattcttaaaatatattttctctctcttatagtatcatatatatttatacgaaaaatactaaaaggtatcagtagtagtatctagtatcacataaggtatacattattagtaattagtaattttttcttcccaaactttgatatatgtatcaaatcatgctcctt

SEQ ID NO: 393503 - DNA, 1342 bp, Cannabis indica
ataactcgaaacatagcaaaccaataaaaaaaaaatataaattatcaagataatcttatttaattgagaaaatattaaaagatgaagaactataaagttatcgtaaacagaaaagtaaataatttttctttttttaaaaaagaaaaaaaaaaacctatactacacgtcacgtttttaacaagatgaaaaataacttaaaattttgaatataatgtacacaatcaatatttttatgtatcaatatttattttattttaaataaaattatatttgttaattcaaattttcattaactaataaattatatttaacaattaaataatactgaaaatgattctaaataaatgagccacaactggaacaatgtacggaactaccccagtgtcaaactaggccattgcgaggctcccaaagggtttgtaccagtcacatgtcttatttatttgaaagacaacgcccaagacacaaggctcatcctcgaagggctatttcgaatgctgctgaaagcgaatcaaggagaagccatactcaatgttgctcctcgcggtcccaaactctcgatgttctcgatgacaataagagtggaacccatgacgacagggatcctcaaattagtgaaagtgatttttatagctaccagtttaagagtagctcgccttcataacggttctgaccttcaagaatggtcgaatcaaagacaaccagaccaccgagggcatctgaattgtaacactccagacctccgtgagcaattaaatagaaactcacgcgagtgacgtgggccaacaaatatgagagctctagatgatccaatccagatttaggtcatagaattggaggaaaagttcaaaagatatcaagatggtgactatgggaaattgcccaggtatgactctgatgaggagccagaatccttccacccggacattctcaacacatatttcccaaaagggtttaaaaattcccatgttgctccctatgacgggaccactgacccagtggtgcactttagtaaatctaataatgttatgcgagcatgaaatattagattaaatttacgatgtgtgttgttcccaacttccttaacaagagcagcaaagagattgtttgacaaatttacttaacattcaataacctcatgactatcttaagaagttgaagacttgaagcttcttcgttgtctaatgtgaaataacaacctagaaaatcattgaaagagttcttgaattgctttaacacagcaacagctaaggcgagaaaccggaatgatagtattcagttaaaatataacaacactagtcacattacacttttatatcatttaaaatacaatataatttta

SEQ ID NO: 393504 - DNA, 2527 bp, Cannabis indica
tcgtttttagggtgatacaaaggtctcttaacctaatagacctccaagctttttttttatttatttaagaaatatttaaccaagttcataaggcccccaaaagcaattttactagaaaaaatgtttacaaacttatttgaattttattttattattcaagtaaaagattttttttttcaattttactgcagatccatacatatccctaaagaaaaaaaaggtgttatcaacaattttattaccagggacggacctattaagagtgatgtgggggctatagcccccacgaacaaaaatattgccttttaaaaaattaaatgtaaattttttaatttaataattataggccaaaatagtaaaaaagcccccactaaattagataaatttagtaagagtgattataatgtagctataaatatttttttacaataaataagcccccataaaataaaaatcctgggtccgtcactgtttattactatgatagcaaacacaagttaggtcaaagtgggaatatataattataaatataataagttaatatatatataagtaatgagttagtatatagaaggcatgcactttgagaaaaatggtgaaagtgattattacctaaagtaactttgaaatgtgccatattagcaaagcaaagcatgattaattataatattaatatacatatataacttcttatttgccaagctaagtaatcttcaattttaattatttttaaatatatgaaaagtggtcctaaaaaattagataatgttaaataaataaaagtggtcctagctagtactatagttaattgcatacagaacatatatagatatttatttatttccctaaaaagttcgaacatgagtacacaaaaaggttttttctatcgtgggattaacttaatttgcaagaatcacactttccaattaaattattattattattatggaatgtgtttaatatgttttgatacttttgagtgtaaaaagaatattttaattttgttttagtaaattatttatcaagacaatatgaaagaaacatttaaactagaaagtttgttaatagaatattaaaaaaaaaaggcatatagtaagtttgtttattttttttttttgttaatctcctatctataatcgtatatgttattagttatttaagactatttataaatttttaaaaaaactcaagtagtttaataataaaaataaaatttacatattttgttatacgcgccactattttttttatacacgtagtaagtaactgttcatcaaattaatgtgagatggatatatattaatattaaatatgattaatattattttaaattttatattttataaaaattattgattagactttttgttataaaattaaaaaaaaaaaagacttggtattttttaaaaatagtacaaatagaatttgaagacaatttctaacacgaacaaatataaaaaacgtaactaattttatcataatatctttatatatatattggttattattaagttttattttcacaattaaatttattaagatctatatatattttagttcaataaataatataaaaaattaaaactaatctatgtattatggaataattatatttaaaaatttatgtttatgttttgaataactaatctaattatttgtgatgaatgtaagaaggtctcaattttgaagtgttatattcatctaaaataagcacaaatcccattaatgtgaatgattagaggccttttatcaaattaataattcatatttattttatattattcatatataaataggcctttatttgttcactatatagataggaatctttagggtatatatctatatctatatatgtatatatctttgttgttatgttcagttttatcaactttttctttttgactcattataccaagagagaataacaagtgttgcaaatcttcaaattaatatgtatagataaatttgaaacacaaacaatatgtaatgagtaatattctttttttaaaaaaataaaaaaataaaaaataaaaatattccactacaagtacgatttcatatccacatgtacaatttatatagctatatacaaatcacacaaatattatgtaatagtgtaactcaaaaacaaaaattaaatagtctcacctaaataatatgtataaaaatataaaattataatttttaatataatcaaatgaaattttaatgagtattccttctaaatttaataatcgatccacaaaataaaaaagagataatttcacaaatgtacaaaaacaacaaaaaaataacaaaaatacggtttcatggaatgttacacatttttacattttttaattttatttacataaatacggtctttttatattgaaattttgttcatttgctgttaattttttgttattctgtatgttattttttgttgttattttgtatgttactttttatgtttatttttcttgtatgtatttttatgttgttttcgtgttattttttggtaaaaaccgtaaaaatgtaaaaa

SEQ ID NO: 393505 - DNA, 753 bp, Cannabis indica
tcatataaaaattttatattcaacaaatacaaaataagcaattagttttttttcttacttaaatttttaggaaaaatcaattaattaatttggagagcatagtcatgttcggtctccacgacgccaaataaacaagaaaaatcatcatttttccatggagattcccagctttctttacgtttttctagacagcagttttcatatttaattattacacattatgtcgaccctcatcaacaaatccttcacacacatcttctcactcttctttttttctctgcttttgttttcagtttaggattgataaaatttacaattcagaagaattcagaatagcaacgtaaaataccaatccctcagcaatattagtcctcatcaacatctatatattgtaagacctagaacacacaattaaaataaattcatgtgcctagatggatgttccgagatggatgttaaattgtgtgttagttttagttttaatattaaattttatttaatttaatattaaaaattgatttgaaatattttaaaaatgttaaaaaaaaattacccatgaatttctcataaaccaagaattctgttatataggcatactttatatagaatagatataaaataatcgtccattttatttatattatttagaataattcattgtggttgaagatcacaatgaacagaaaaagtggcaaaaacataaatgtagttcaaaatcatagtaaactaagaaagaatgagaagagattatta

SEQ ID NO: 393506 - DNA, 1255 bp, Cannabis indica
gccctctctgtggaacagaggatgaatccattgaacatctttttctttcctatcatgtggcgtctcacttgtggcgatctgtggcacgggtatccggatgtgggattgggtcaaattcttgtggaaccttaaatataaaggaatcaactctgatgagatctacctttatgcttcattaattgttgacaccatctggcgaattcgtattgataaggtacacaataattgtccagttgatgtatttacttgtattgacactatttgttcttcttttgcagatcaccatgcttcgatgctcccttgttcacctccgattggggcagttgtctggtgcccccctcctcaagactggattaaactaaattgtgatgttaaagtgggatttgacagcatgtgtgctgtagttgtggcaagggatcatcttggcaaggtgatttgggttcatacgtctagattggagtttgctgatgtgttatgtggagaagcgaaagcttgctgctttgctctagatgttgcattggacaaaggctagaagtttatcatggttgagagtgatttgagggtagttatcaacgctcttaatagggaggagacccgttgggagcttgagaattatgtctatttctatattaaatcctctctctattttaatagttgtattttctctaatatcagtcgtaactgtaattttgttgcccacaatgtggctaagtggacattttcccaccgaatatttggttgtattctggtttcctctatccctgaactcattttttgtaacgaccatgcggtctaactgatattatctattgaatgaccgctttttttcttaaaaaaaaattgtttttctaaaattaatcttaaaataatctaatgaaaataaatttcatatatcttaaaactaattatgttgctaattcaatttatataattatttaaataaggtaaataaacattcacaattggagttgtttgtgtgagggagggctgggttcagtatgttgtacccactactatggcccctaactctcacacaaggtccaaaggagaggaatttaaccattaaataaataattgttattcattgaataagcccaatactaattgggcctaaataaaaactatctaatgtgatattttatgttagcaacctagtttatttaattaattaaactaaatgggcttcctatatgccgtcaagctcaaaagcaaacatataggctcacacatgtcaaatgatttggatgggccctat

SEQ ID NO: 393507 - DNA, 1269 bp, Cannabis indica
aattctcttgactcatttgctttaagcttctccaactcggcaaagtgcatgtatacataatattcagctgtgggatcaacaggcatcatgtggaaggaaaacataggattagtcacattttgtggggacatagctgtggccataacacttggtgaaggctggtaaatgttagaactggaatccattgtcaaagacagagatgtgatcaaaacattgcgacctgggaaatgaaatggctgccatatgcgatcataaacgtcgtctttatacctaattattaattaaaattaatcaaaaaaaatataccctgattgattaattatcaagtttctaatatgtgtaaattaagatctcacctcattaatgctaagacattttaaattattttttttttacttttcaacattaattcatatattcttttttgctttttcatatttgtacattaatacaataatcataagactaatttatattacatacataatataatatctcatcttcaaaataatgcttatgtataacaaatatttcaagaattcaatcacccattaactttaatttttttttttataaatattcaattttaagattcatatgcactaatggcaatattctttgggataattatataatacattatcttttgaaatttttttatattttacgtttaaagatttttttttttatatatttttacagtattttataaaaataacaccaaatgagctacataaaaataacaagaaaataatattcaaacaacaacaacaaaaaataagatacaagtaacaaaaattcaacaacaattaacaagcgtacaacataaaaatacatcaaaagaccgtagaatttctataaataaattataaaaatcgtaaaaatatttaaaattctgtgcaacccgtatttttgttaattttttatttttttttatttttgtgtatttgtgaaataattatctcatattcttgtatatatggtgtatccatattattttcttataaaatgtggtgtatccatactactgattgtaaagtaatgggaaatttgaaaaattatccataaaaatctctaaaattatttccctaaatctatatctattaaaattgcccatatatgactccatttaatttttccccataatacccctcccatttgaaaaataaaatcaaaaatcaatctctctccctctcggtgaccacgcaccaccacgccgccctaccacacccggccaccgacgaccactcaccaccaccgacagcagcc

SEQ ID NO: 393508 - DNA, 883 bp, Cannabis indica
tagagttttaatagcttagattacataagtattttcttcgatcttatacaattcccatgggttcgacctcattcttcacaatctctacactacaataaagattcatgcgcttgcgagttgataaatgtaaaacgtactatttttggtcacaataagtttttggcacattgtcggggaattgcaagaagaaaaactactttaatccaggttagtataattctgttactaatgattatattatatttattattaaagtaaaatttatatatatataaaattatatataatattaatattattattagtttaaggtatatatcaaatttataaatatattattatttattattgttatatatattacttaagtaaaacatattattattttaattatatataataaaatatatattattcaatataattaatattaatatttatatttctgttatataatatttattatatatacaattatttatacttctacctttaaattttttattttatatcaatattaataattgtatttttatatatataattatttatatctgcatttataatttatttttgtacatatattaatgttagtatttatatttttgttaaatatatacatattatttattttttgttatattttaaatttagtctttatttttacaaatatattaatattagtatttatatctctgtcaaatataaataaaattggtcatggaactttgccatttaaagacattagatggaacaaaagtccccagagcttagaatgctaaccgcatgcaccgatactatcagtaaactggggtggtcagatccctttttattttatttttcactttttattttggtactaatttccatgtacgcctcaggg

SEQ ID NO: 393509 - DNA, 584 bp, Cannabis indica
aattttgatatttgtagtagggtcactcattttcttggaaggctagattggcttccgagaataggaggatcttaattctggaggggaggcccatggagatacgatgggttggggccattctctaatttggattgagccttcgtataccgaaaggcctaggtcaagtattatacggattggagactctattagcatgtcatgtgttattcatccagaaatatggataacatttacgacccaagcttctggaacttgggatggaggaagcttgtagtctcacctatggatgactttgagcactttagggttacatcctgcactttacacatgtcattattttgctaattcgtgaatttcacgtgttcttgagaagagtgtgaggcctgagatatcgtaatgacaactattttatgtcaacacgagctttgaagagaatattgatgatgaggaaatgcctcgagtaccgtaatgttgggttttatgccctaaataaaactcatttcaatataatcagatttacttattaatatacatcagaaataacatttaatgttgcatggttcacatggtttatttcatgatta

SEQ ID NO: 393510 - DNA, 1450 bp, Cannabis indica
ctgccaaaaaagtttaggggtacgatttagtacatgtcaaagttcggaggggaaaaattactaattagcctttttttaaataaaaatcattatcttaagtgctactattgatgattaacttaattaaatggggagaaatttacactaaattgacctcacctttttttttaaaaaaataattacctaaaacacaaagttttgtcaaaattttacttttttacgtttatagtttttttttttaataaaaataataaaaaaaattatataaaaataacaagtaaataatatcaaaataataataaaataatattaaaaaatataaaaaaagatcgtattttatgtattttatgtaaataaaatttaaaatactataaaaatattataaattcactgtatttttgttaatttttttttttaattatttttgttgttttttttttttttgaaattatcttgcttcttttttaagaaaaaaatttgaccttaattatatttgatatatattttcaaatatactccaattttaatcaaaatatcatggcaatgaccaatatatatattgataaaatttaaaagcttaattaagaattattattatgtatagtatatatagctctagaatatgggcagcaagtaattaactattaattataaaaacctaagcttatatttgtcgagtttattagtcaacttataatttcgtcattgtgtgggttgttgaggggacatgatgatcatagtgttcaataaattttataataattatattaattccactactataaaaatagtttttccaagtatttttaaacaatcgtttaaagtattctcatcggtttctataactactgtcacctatatgatcgtcgctaatgtggactaaaaccgtcgcctataacatggtataggcgacgattttaaaccgtgccttacatatatagattagttgtaaatggaaccatctccactgatggaacccaaaaaatattattttattgctgacgtggcgcggtcaccaattttttttttttgacgtggtgaactgagtcacagccaccaacttgccatagcaagtttttagcaactttaaaaaatcaaattggtgatgtggcattaggggtgtgcataaatcgatccaatccaatgagaaccgaccgatccaattacaaccgacctccaaatattagatatccaattgtgatcggatcagattggatgttatttttaaatatccaattggatcggatcggatggtggatgtggtgtctaaaaatccaatacatttaacatccaatcgaattaattactatttttatttactttggatgagtaattagattttatattattatacgtcaaatatatgtatatatgaaaattaacattaaagtttacttttttttttcttggattggatggatccagtccaatccaatacatactggatcta

SEQ ID NO: 393511 - DNA, 557 bp, Cannabis indica
agttctcactcaacctcacccttatccatatgccctcacttccttccctacacctacatccctctaaagtgtactcacgccttgtcactaccactcacgcacactcgccactcgcatccacggctcctcgtactccctctcacggcttgcacggccccctactccctctcacggctcgcgcgcccccctactccctctcacatctcacccctcccctctagcacacacagctcgagtgcaagcccccatgggctcgcgtgggggctcgcacgcgagcccttcacgtctcgcccatcccctccaatacacacggatcacacggcccccactccaactcacgtctcgcacgacccacatgactccccactccccactcgcatgcccacatggctccccactccctactcacacgcccacacggctccccactcccgacttgcatgcccacacatctccccactcacccttcacctgcgggtcaaacggatgctttgttggaattatatgacataaacacatataaagtttcagaaaccttacagtgggtgtagcggaat

SEQ ID NO: 393512 - DNA, 1004 bp, Cannabis indica
gaaaaattgaatggtgaaaattttatgaaatgaaaatctaatctgaatttgatgctgatttgtaagaaccacaaatttgtcctaattgaggagcgtcctgaggatcccagtgtcaatgcctcgaaaaatgttcgggacaaatatgagtcttagattcaatacaatagcaaggccaaatacttcatgcttgtaaccatggacgatattctgcataagacgcatgaagaaatgaagaatgcattagaaataataaactttctacaagccatgtttgggaaacagtctaatcaaacaagaaatgatactactcgtggccctagtggccctagccttggccttcccttttcccttaacgcctttcgtcttggcaacggtcttggaaatcctatcactcaaagatttcaaaatctttgcttctagtgtttttgcaaagatgacaatcagatggttagcaagaaactttcacagcagcaaagtcaaaccaaaattagcacatgacaacatattttaatagtgtgtgtgtgggcacaacaagtcattgagcagctatatggttccccatgggaaaataagattacatcctcccgaccattgaggctgccatattctctaaagttagcgaaatatattgttgcaaaaagttccactctaacagtatgtggagatgactctggattactgggactcctaatactttcatctaccctgtctatgaagtcttcatggagtatttaagatgatctaagtttaaaaaataactattgaatcccccttggtccatccgggacatatgatggaggttgggggtacggaatacattgaagggcatgttacctctttagaaagtgctggctcctagggcaccttctttcaggtacacagtagcaaaccactcaaaaatctcctcctcctccatcaaggggttatgctggcaggtaggggtgttcatcaaactgttagagatattattacaatggaaaaaaaaatcaagacattacaactct

SEQ ID NO: 393513 - DNA, 767 bp, Cannabis indica
cacgcacaaggtcccaaatgtataaaacagggcatgcacaacctacgtagtaggctgcctaggttttaggtgagattagcttcatcctttcttgattgatgtgattcttcataatggagccatcacttgcacccttgattatcgtgtaattgctaaaagacgggtttatgacgtctaacacgtcctcttatgggtgttcccagacgcttccctcatgctgccttaaatgcgaggtgaccgttcatctccagtttcgctagtctgaaggagttcttacgcccttcgtctctcgaagaggaagcatgcttgttttctcacatctgggagcttacccttgaacttagttattggttcctttagagggaatttggttaagtattttgttcatctccagataatgggtcttagtttgccacgtgtcctatgctgaaattaccacgtatattagaaaaaacttggggcaacaatagtaattatatattttttgtaataaatgaatacttttttccatttaattaaataaggaaaaaagaaaagttgttaaagtaaaatttgtcgagacaagatttgttaggatgaaagacactaaccttgtcctaaaaacataggtaggagcctaggcttgttctcgtccctattggatttgtctttttgggctaattaattcaaataggtaaatatgtaatttgaaaagtggctatagatatttcaaggttgttgagatattctctcaagtagttgagagattccctcataaatattagtaa

SEQ ID NO: 393514 - DNA, 1297 bp, Cannabis indica
tcagaaaatatttgtatcaaaattaatttaaagtgttgttaacaaaaatgaaaaaaaatgtaaagtggttagacttgatttatgtgatttatcaagaaaaatcgttaaatatacggaagtttttctttatccacttagaacaacaggtatattcttttcatcatagtaaaaaatcatattccattttcagaaaataaaagcgcatttacaaacataaattagcataatacataaaactaaaaaaaaaattagtagatgaaaccagtggtcgtacctttagaactcgaaatgaaacctggaggaggaggagatggagatggaccaggcggcggcggcaatggggttgctgcaggtggtggtgttgttgcattttgagtgtaaaagggatagagctcgtacctaaaattacagctaggcaacagaactcttcccccaatctttccagagcaacacgtggggagctctccgagggccatggttagacatgtacggcaactggaggcgttcaggtccggtgtacattgcgcaagggtgtacaatctttggaacccattgaagttggcatctttcgtggcgtacttcttctccccacccacgcctttcgccgcctcaattgccgccacctcagtagtagcgttaactagctgattgaactcgtaaaggtccgtgatgtctcccgtgttcacaagataggctccaccagggctgttggataaggtgccgaagaatgacttgttagagtagtgcaattggcattcgtcgtaccatattatggtctctttctcaacagggcacagcttgacgatgtctttgacggcaaacgtcacacaatctcggcatacagtagcgttgacgtcaccgcggcagaggaagtttccgtatattggggaggaggagcctttaccggcggtgacgctatggaactcactggtggtggcattggaagatagagaagagaggaggttgttaagattagtttggtatgtgctgttgggggagaaagtggtggtgtttggacagatgtggtagaggtaagtaggttgattagctccaacgcttagaccgatcgagataaatagaaatgacaattgtaataaaaatagggtactggaattttttatgaaatttagcatcattatattttcgttcagctttctcaggtttgataaaaagctcacaaaagttgagtttgttatgtttatgagctttcttaatttcttatgaattatgatgtgatcatggactacggtagtaagcataaaaaaagaaaaagaaaaaaaagaaagaaaatgatgag

SEQ ID NO: 393515 - DNA, 919 bp, Cannabis indica
ctagtagaactacgacggttcacctgattaggtgatacgataatcctggcgacataccagaggcgttcgggcgtcaatgacatatgagtaccgagcgtaagtataggctcacctaattaggtgatactcttggcaacgtactgggcgcaggtacgggcgtcagtgacatatgagtaccaatcataggtacaagctcacctcattaggtgatgtgatactctaggcaagaataaagagaactagcatcttaaactcttcagtgcgtgaggattcaattaggagagctccctttcatgtgtgtatcttgccctttatatagtgttgggctacaagttgttacatatgtcaaataggaaaatatcccttcaaaataagaaattacatcttatatttcaaatacaaaaaggataaataaatatccctaaagaataaagttgttatttgttgatgaagaatccctattttcgtgggcattttgaattgttctgaagttgttggagcacttcgaagtcttctagaatgcccatgaaagaaaccacaacccattcatgttgtccaaaatttagtatactttttagctggccaaccttatttgaaggctattcgacacatactgttattcttgatcgaccaactagggtcttgaaagacttgcctggttcttcttgtttgattccttctcgtgatcttaatatcttgagggttgaggaaccatacagcactaccctgtccggttagtgatgaactactctccacgtgtcttctgcttttgaccatgtggatgggcaaaaattaggataacacatattatcgttttattgactctgcgtcgttgactagaaacgaggttaatatttccaaatcattattagtggttgggaataacaaattctctttggctgaaggagttattaatggt

SEQ ID NO: 393516 - DNA, 625 bp, Cannabis indica
cataacaacatagacttatctcaactatggattctgtaccatgtgtagtttttttttttttttgacattttcaatttactacgagtggttacagaaaaaatattaaacttatttttaatacttattaaaaaaaaatcaaaatttagaaaaaaatattatataactataataaatttcagtatataattagaaaggtaaaaaatacttcgatatatacttaaaacaaattttgaaataaaataataaaattatcactcctcaataatttttttttttataccaatcacaactattaccaataaagactttaggtaacatcactttagaatttaaacacaattcaagatgatgttagaactttatagagaattaagaaaaagactaaaatcactaaatggaacttagtctataaaatatcattacacaattcaatttatttttctttgcaaagagagggtcaaatgtctacatcaactattcaaaacaaaaacagcaccaagccaaaaaatagagatgagctctcaatgaacaatataataaatgaattcatgataatatttaaataatttgtagcataaatatataagtttaactctaagttataaataaatatataagtttaatt

SEQ ID NO: 393517 - DNA, 496 bp, Cannabis indica
gacaccgaaactgaagttcagagactaagtatttattttattttttatttatttttttcaataacctcacttaaaattttgccgatcgcgctttgttatggtccttttttgtttcttattgaaggttaacggtaacgttaaacttttgtttatttttcttaaaaaaaaataaacgttaaaaaaatttgttaaactaagaattgttgttaaataattacttttaatatataaagatatagatatagaattatatataatttactactaaattatacacctaataattattaatgttaacaatatctggctaagcctctccacctaagttacatccaaaataataataaaagaaaaaaggcacatgaatatgaatattacatatagggtatatagtaatttttagtaaattatgagaattataaagtaaaatattttctaatttcatgatcgtcttctctcattcagcatcttaagtccaacatatctgcatgaaaac

SEQ ID NO: 393518 - DNA, 1531 bp, Cannabis indica
ctagctcatggcaaagttgaccactcaccattctttgttgttttttggtttgattatgttgtaaatggtgtttttatagttagaatagatggttgtattgtttgaatatatatatatatatatatatgtatacatatatattgtgagattttagtactataatatatataagtatcatcgaattcataggcattttggaatagcctgctagaaattcttgtgccgttaactttgttgtgaatacaaaattttaattaattgtgttttgactttttgtttataactaatccaaaaaagaatataaagttgtgtttagttgggagtaaaaaaaagtgatatgaaaatgaaaatagaataaaaataaaaattgactgaaaaaatttaaaatgtataaaaaataataaaacatatttctttaagaattgtagcgaaaaaatcttgcttctacacatttttgatcgattattaagctttgatttgtagaaaaattacaattaatatgcagaaccaaatcaattaaaacttaatcatgcaaacaattaacaatagtaagattaataagtcacaaacaataacctgagattcaaacaaagatgaacatagtatttaaaaccaaagacgattaaagtaataaaacaataaaattaacaccaagatatatactgattcaagtgtaatagatcaatgtgatctatgactctaatcctgttttagaacacaaccgaaaacttctttattgattaagaaaaagaagatacaatacaatcaacatgaattctttgttgtattctgtcaaagtgtttatatctctcacactcttaaccaaaaatactttttcaactacaaaaaattacttcatacaaaacccaaactcagtctctctctacctctcaaactctctctttgaaatcacctcttctaactcatctgaactcgttctctcctttctgttttttctcgaatagataagtggaggtggtatatataggctcatgatatagatcttaaagttggtgggtacaaatactaagtttttaagttagttatgacttaacaaacttaacaaacttatcgtaacaatatctccacgtcaacacaaagtcaaagtgcttctagatgagacaaacgtttttgggaccaaggactgaagcgcatgctgaagggacttctcggatatgaagattatagatggagttgactattcgaaactcccttccaagagagaacaactagccatttgaaactccctttccagaggaagacaagctttctttggaaactccttttgggtggaaccaatagacatccaggaacatcctctggatggcatctaactttccataattaggacaacttttgggatttttttatttagaggaactataccacatatatataatattaattaaatgagataattttttttatatatatatatgcactcttaatgggtattacctatgaatgggtaaaattagaaaattttgagtttttatgcttaatttttctatctaattaaaataatctctca

SEQ ID NO: 393519 - DNA, 1092 bp, Cannabis indica
gtataatttatatagattttctctatcatatcataggcacacatatattgtaaatattatgaatgataagaacataatatatatatatatgaaaattcaataataaatatataaaaacatatacatacatatataatatatagatatatagataaaaagaaaaaagaaaacaaaggattcttgaaattgtttcagtcagataagtatatatataaatatatatttagtgtatcgtgactttgaaacaattcaagaactttaacaaaatacttacattgggacttgggcagagactcatgcttgaagcttgggcagagactcgtgctgataacgtgttataaaataatataaaataatataaagtagatgagaagaaagaagaagaagatgaagagagaaagagaaagtgaatgagaatttctgagttgtttattccaatggggtgaacccctatttatacaaatacaagagtgagatattaagaaactaagaaaaagggaaactaagaaaagaggaatgttgattacaattaatggtaataaataaaagatttggacatccacataattattaatatttataacaattaataatttttaatttattaatttaaatatgttaaatctaatattaaatttgacctttgttgggctgtttttttttttttttaaggattctaatattaagaagatcacaaaatatgttgcaaaaatatactaatgaaatcgggtagtggtagataattcaaaaaaatcaatataattatatattatatttaagatggtggttgtatttatttattatattatttaaatattcgagctgttggattaggtgagcaacaaaactatattttcacaaatagatttaatggtgacattaatggaagagacgacaagatattcaactgtttaatcacgtccttgatcaaaattggagtgatcatttaatttaatttacactatttttctcataatataccttatctgtattaaagtggcctttgattaaaaaaaaataaaaataagaatgagaataagcatagaataaaatttaaaatacttaaaactaaataaaaaattattaattatt

SEQ ID NO: 393520 - DNA, 774 bp, Cannabis indica
atttttttccttttagctatggcaacgtcttttgtttagtgattgaaaaaactatctttaaatatcctttttgtagtagtgcttgcccatttgtgatgcactcctcactgaaggacccttccacttaagccttcaacacttaggaaaatttaaaagtgttaagaaagggtaacaagggacaaaagacttggcatgaccaacgaaaagtcaaaagtacggccacgcaactttctaggcttatacaagaattagctacccttgaagaacaacaagaataaataagaggccatgataagaaccttaggaaaatatatatatatataggtataaggaggagtggaaatgaaaggaagaccttgcaacacaacaccatctcaggacagtaacgatgcacatcctctaaaatccttttacatatcgcgaatgaaagcctagaatacaatcaagacttctagccaaaaaaaggttgtggcatagaaaattacaaaaataatactattcttaaagagaagggggcctccatcaaataaaagaaatgacaaagcccaatggataaaaattctctcaccaaaatagttacatcttgtaaaagaggttgagaaggctcaaaaaattaacactgcctattgtggacaatgtccaacatggaataaatggtagagaattgagccatatataagaatatgggctactctactcattgccaattggctttgagatggaaccccatgattctcaacatgattcagagccatatcccttgcgggcaagtga

SEQ ID NO: 393521 - DNA, 1394 bp, Cannabis indica
tttttttctttttttttaatcacaaaatttgatagtaagttttactgtaatgtatgtacacaaaccaaaatcaactaaagtcaacatttataatggatttttacataaaatgaaattttggaaagagtgttatttggtggaatacagtataaaaagtgctgtctccaatcattgacagcaaggataacataactattagatgggtatttcgatttagaagcttaaatgttcttctaaatataaaaaattatattacaataacatgaaccacagatagtttatacttgtttgtttcccgggaaagttggcggttgatgatgataatatatatatggacataataatcttataaataaataaaagtgtcggtgcatgtgagaatatgattacccactttttctttgttttaggaatttaaaataaaaataataaaaattaaatgaataaaatcataagagaaatgagatttggaccaatcacatgtatcccatcgttgccacgatcatcaccgacgaaataggttcaatagtcaatttaattcaaatatatatatagctaagctcagctggctgctttgtttcctttttatgtgtttttgggtcccatttttattaatgtatctaatatttttgtgtgggtgtccaagtgagagattttgtggcaagggtcttatcgaaaatgaggggaatttatagtccttagagcacttacaggggctctttaagttttcaaaaatattgattccgaattcggttcagtacagaattgggttacacctgaatccggtctactaaaattgaaatttatttatttttctctcgagtttttcgggttttgggttgggtgggtttgccatgtgggtgggttctcgagtgtaaatgtgcactactattacaaaataactatcatatattatagtttaacttaaaaagacaatttagtcaatttaagtattttgtttactagggatagacatttctcttatggtgatggggcccgcggggacccatccctaatagattggggatttttcgtctaaatgagaaacgagacagagacgtgaattactttttgttctcaaatgttaaaccctgacaggaacccgtttagtattttattttatatttttagattttatactttttatatttttagtaatattttatactttaaaatttatgtttgcatttttaagtatattagtatattttttttataaattttaaattgtgttttagataataattagtttattgtaataattaatttttttcctactagtcacaatgattttatactactaagacgtgaatattaagattgttttcgtgttaaatttggttaaaatgatcccctaattaaaaaattgaaaacgttctacttttacggataaa

SEQ ID NO: 393522 - DNA, 586 bp, Cannabis indica
atagtatatgaaataatttcccatttaatactatataattataagtaatattataattaatattaaaaaacaaaggaaatgtcatatttggctggatcaaattttggcaccaagtaccaactatgctatttaatttgaagatgcccttagaagtaaaataatattaaaaaaagaaaattaggggtatattagaaaacttgccattataaaatgcttctatagccattgaccaaattgataatcattgcaaataaattaaaacttttatttacaaatatttaatgttattttttttttggggtagtgaggacctaattaaaatatatttaatgttttaatttgagacaactttatataaaatttatattcataaaatatatacaaatatgtatttttatattttaataaataaattatattattatgattagagataataaatttatattgcaggaataagtaactgcgggaacccgcacttaatgtggagattccccgtcttgatggttaatggggtgggtgggggtcaatttcaatacccaaagcgtggatggagtgggacggaaataatactatctgcaccata

SEQ ID NO: 393523 - DNA, 1039 bp, Cannabis indica
gatgagtctgctacaacaatttggagagatctcaaagtgcaatttcggcaaaatgaattgtgctcacatctacaatttaagaaagggtctcatgaactgcaagcaagaaaactagaccatgagcatgtactttataaagctcaagaccatatgggaacaactatctaatttcaggtcgaattgcacctgttgaggtgtaaagaaactccaagaacactatagcatggattacataatcgaattgtctgatctttatgcacaagtgtgaggtaacatcttggtcatggatcctttacctaaaattaatacagtttttcatttggagacacaggtagagaatcaaaggggaagtcaaaatccctcagcagaccccaatccaaatatggcttttgcctttcaaggagacaaggctactggaaacaaatctgattctcaaggaagtctcgtccaccaagaagaggcaaacccttctgcactcactacaatatccatgggcacactatcaataagtgttacaaaattcatggctaccctccagggtataacaagacaagcaagccaagagatgttgtggccaatcacgtgtaaacaacaaacaagaattgtccttctacaaaagacaatcataccttacttccacagttgtctgtcaatcaatagcagtagcttctcaatcttcttgcaactcaaacacctggtatggctaccacgaatcttggaacttcaacatgtaacacaggtgttgtcttgtccaattattctatactacctcaaaatgattcttggatagtagacttgggtgccactaggcacatttgctataacataaaaatgttccaaagcattcattctattcctcatacaaaattgattcttcccaacaataatcatttgctagtttacaaaagtggcactgtatgcgttaccaattcactcacccttattgatgtgctttatgtacttacatttcaatacaagtgttgggatttatgctctaaaagcaagtaattaatggataatatattagaaatatatatat

SEQ ID NO: 393524 - DNA, 2884 bp, Cannabis indica
aaaaaagcattgttttttaaacaaaacccagaaatgaaacgcctttattccgtttttttactaaaaaaaaaaaatacctaagttgtcggccattgactagttcataagagagcttaaacagaaaggtgcagcaaaaagaaaaaagaaaaaaattacccagccatttgaatggagactgaagaatcgagagagaagtttagtctctccggcttcggcgctgcgatccttctgcagtatgaaactccgttgacgaagactctgtaagatcgtatttcataaaaataaaacaaaacaaaaagaaacactgctattcttttgactagtttatgttcattttgaattccattttactgtttgttctacttctaatatggatataaactaaaggaaggagggaaggaaaataccatgtaattttcttaaaatagcaatttaaagatttttttccttttttccttttttaattggaatgtcaataaagttgaaagagaatgacataaattatcaccgagtatgcgccaactaaaacaaaatattaaaattttggttaacttttaaaaataattgtcacatgaaaattcttttaaaaatattgtatttttataaaataatagtagaacataaaacagaataactaaaaaataactgtcgaataatagtaaaaacttaacacagttcacagtatagataaattgaaaaatgtctcttatttgaatccattaatcaaaaataccctcaaattatatttcattaaaatataccgacttttatgagtgggttaccaatacgaatagaatggaataaaatttaaaatgcacaaaaaaattgataaaaaaattattaaattttttctcaccatgcattggaatggtctttccttccatttcacaaaatagaattgtcattccaccaaaatggtggaaaggcaacattctaacactttaatatgcaactttcctttcaaaaaaaacaaaggaatagaatggagattgtttcctttcctttccattccatttcattacctccaaccaaacgccacctaagagtataatggagacatcatctataaaagtgattatattttaaaaattatagaaataaaggtaaaaattaaaacatctaaaataaaatgggtatacaatctaattttccaaacttacacagtatttttaaaaataattccatcccatagtaaaaaagtaaagaaattagaaatttcagtatgtggtgtaaataatcatacatttaattgagtatttttattggcactagtggtgtctacaattggctagcgatacttcttaaaaattattacattaaactatatgagacccgatacttagttggaccaatagcgatattaatatgtaggaaggtattaggggaaaaaaaagtagaaattacactatatatgggaaaattataagagtttacttttttatgtcataaataaataatgctaaggggttgtgagttttttgttttttacatctatatgaggttttttatgctatatttttgtaaaaaaatatggaaatcctacatttgtaaacaataataagttttgccaaaaaagtcgacagcgctgaaaaagtcgtcgaaaaagtcaacggcaccgggaaagtcgccagaaactcaccaacaccgaaaaagttagtgtcgtcaaaaaagttgccgaaaaggtcactgttgccagaaaagtcactagaagtagatatctctaatataaacaaaaaaagaaccggttctataacataataaatgaaaataaataacacaaaataactcaaaccagttataattgaaatataaccggttctataatataatgaataaaaataaataaaacaaaataactcaaattaattataattaaattagaatcggatctataacaatgttataatgaataaaaataaataacacgaaataactcaaactagttataactaaaatagaaccggttatataacataatgaacgagtacttttgaggtagatatggtatgtgtgtaattatatttggtgggttggagcaagttgaatggatgtttttgtttgagatattttatttaactggtttttgtgtgtgagtgtttatctttgttgctttacagaaccagtttttttgtcttaaattttttagttgataaatataactggtttctttatattatatttgagttattgtgtgttattatttgtgtttatttattttgttatgaaactgactcttttcatatttatgccttaatattttttaaaatggatctctatttttttaaaaaaaaaattattatcgattttatgaggttttttattgtagaactagtttggtttttaatctatgtttcagtattttaggaactgatttctcctttattgtttaattgtaatcggtttgaattattgtgtgttacttgtttgtattcattataaccagttctattttatttataaccggttttgagttatttcgtgttggtttttattcattataacactgttataaaactggttctattttaattataactggtttgagttattttatgttatttatttttatttattatgttacaaaattggttatatttcaattataatcggtttgagttattagtttttattcatataaccggttatatttttagttatacatgagacatttacttctggtgacttttccgacggtgactttttcgacgacttttctgatgactttttcagcgacactaactttttcggtgatggcgacttttctggcaaaacttattattattttacaaatatggaatttcaacttttttacaaaaatatggcataaaaaatccatataaatatttaaaaaaaaaatcccataaccctataatgttatttattt

SEQ ID NO: 393525 - DNA, 891 bp, Cannabis indica
tttttttcactccaatggttaacacccattaaaagatactaactaaaagtatgaatattattattaggcaccattagtgtctaggaccacttaaagttagtgtcttgtaattagttagcaatattctctaaaaattattatcttaagttatatgagatacgatatttaattacaccaataacaatatgatactgaagaagatgctacgcaccactagtgcttttaatattttttttcaaaaatataaacatgtcataaagcattcccaataaaatatgcttttactaagttttttacacaactataattttttttttgctgctgcaactaaaagtttgtttcaaagcagtcaaatataccaatactctcttaaccattttgaacaataccatatttgaagtgctactttggtgaattctttacctacctaatccctataacataagacaactcgttgatccttattaagtgaaacaatgaatatagggcaaagttttttcaggtaaaatcttaattactattggaaaaacaagataaatgttagagcctttatcgtacatgcaattttgatattgctactttgccaaattgtaattatgaaaatgtcactgctcattcagtaaaatcatgattattacttttgctttgcttagtcttagtgatgaagtgttgagaaaagtagtcttcacaaattagtcattaattcaaattaacaagcataattagttcaaattcaaaccaataactacttatgtataagtagtaaggatatttttttctgctgtattaacgaacatagtattttttctgctgtattgactaatagtattttggccataactctcttgatattgctcggaattggacgattcaagatgttctgaaaagata

SEQ ID NO: 393526 - DNA, 818 bp, Cannabis indica
tacattgctcttactgaagttgttaaagaagctatatggctaaaatgaatcatgatagagctgtgttttgaacaaaatgaagtgaatgtgcattgtgattctgaaagtgcaattcgcttatctaagaattttgtgtttatgaaaggacaaaacacatcgagaagcttcatttcctaaggtccattgtcaacaaaggactattcaaggtggtgaaaatccacattgatataaactctgttgatctattgactaaggtgataccagttagtaagtttatgatctattggacttacttggtatcaagacatgattcctagagcctctaagtcaagtgcctaaatacatcaagggctacaattgaaaaaattaggaaccaaggtggagaattgtgaagtctggttcttatttctcagcctatcaaagacattcccttggattgctgacatggcatcaagaagttaaaatagtaacatgacattaagccaactattttaactgtccaagacttaagctaatataattagttaattctattgtccttctcttctctctcccctgctaccaaattagaagcctatataaacttacctagaatgatcaactactaagttaaacagattgatgtacaaagctagttatgaaaccaggctgagagctaatgaattgagagaatttgtaggtttgttgctcaaatgagatgaaaccagatagtgtaatctttgtttgagtgtgtaactgttaggtgtgtgtcctaaaagtatgtaaagatatatttattagtttcacttgaacaaataaatacaatggtttattattat

SEQ ID NO: 393527 - DNA, 2195 bp, Cannabis indica
ttataagtaatgaatgtagtgatatttttaaattattattttataatttgattttttattttgtaaaaaaattaataattagatgaactaatttttacattttgcagaaattttaaattaaactttataacatgcatgtaaaaattaaattaaattatcataattttattttaatcttaatcttttatgaagatttatttttaaattttatttttatattattattgagtaattttgattctttttatttgtaaaatttaataattagatagactaatttatacatttttcttgtagtaatttatgcatatagtttaaacaataacatataaaaattaaattaaattgtcataacttttattttaagctttaattttattatgaagattcattttaaatttatataaactttggagtactttgcctaatttaatattcttagttatatttaagtttattcgttcattctactattttaaattatattcattttttttacttaaactatataaaagaaaataaaatatatataggcaaatatctttcacggagttaagcgtaagagtcaagtatgttattttatcattaatttaagagataattaatgaaattccattgaccaagtactgtcttgttatggtatacgtatgacgtttcacaattgggtctcccagtgtattacgacaacaaccctcaacatctgtctcaatgggggccggtgggcacgattaaaccctcatgtgttctttggcaaggggattctctgaccccttaccttttcatctagactgccgaaattttatcaacgctccttcatgatgacctctgtaagaacattattaaaggtattaggttgagtagaggaggcccagttctctctcatatcttctttgctgatgactaaattctggtgggcaaagctaatttgagcgaagctagaggttattggcagtgccttgagagttttcgttcttggtctcgccaacaagttaataaacttaagacctcaatcttttttagtaaaatactcccagtggcctgaagtgggagattcgagaggccctgggaattggctccccagaaggaaatgtgaagtatttaggcttctccctgttcagataaagatagaaggatgctaattttaatttcattctggacaacctctcagctaagctgcaggagtggaaagcgaaaacattgtttaaggcgggccaggctactctcatcaaatatgtgggcttgtcgatgccgatgtacgctatgcaaactactaaactatccaaacgtctggttaccaaaatcaacaatatgatgcgtgacttctggtgtgattttgtgaaagaaaaacacgagatttacctaaaagcgtgggataaaatttgccttccaaaatctcttgggtgcctgggttttagaaaatctagagaaatgaaccaagcttttttggctaactgggaaggaacatccttaagggaagttagtctctgtgttgtagggtgctttaagcgaaatacctcaaaggaaaagagttctttaactgtggtttcaaagactctgattcttggtttggaaaaatattgttaaaatcaagtccatcttaaggaaagctgcttgcaaactggtggcggatgggaaggatacagaaatttgggaggaacctagaatccctcatatgaagaatttcctctctaagcccaatgggtctcctgccagggaccacagacttgttgcggagttgctttctacagatggaggttgggatagtcacaagttgaatttcctttttgatcatgagactttttttttacgattttaagaggtggtgctccctctagcatgggtcaagataagtgggtttggactcttgaaaaggacaggaggttctcttgtaaatcaaattatcttacttaggccttggaaagagctcccttttgtgaggttgctctgtcactttggaataagctttggaacagaaaagttttggagcgtcataaggtactttggtggtgcattctctccaatgccctccttgtcaggtctgtaattaggaaaatatttcatatcgaggaggcgagatgccctttgtgtggaaaggaggaggaaactatggaatatttctttcttacttgtgatgtggctttccatgtccggcgagcttctccttggggtatctatccgatctgtgacactggtat

SEQ ID NO: 393528 - DNA, 1005 bp, Cannabis indica
agagagagagagacctcgggagtgctgcgaggatagtgaatggagccagaaatcaagactctgcgtttaccatcaataaccaaagctctatggtcgtacgttacattggctgaaaacgacgtcgtagccaaaactccgagcaccaaaagaatcatcaccattaacaaccccttcttcctcattgtttctttactgaactcaaaacccaaaaaaagaaataaaaatacgatcttttttgtcttgttaatgaaaaaatttgcttatatacccaaaccccagttgggattcatagaaaaaccagtaaaagttgttgctttatgcaaacattttgcttaaatggtttggatttctttaacgctctgttttatctatctattattttgtttgtgtacaataatatctcaagtaaattgttgcttggccgctttgtaaaaaccattaaacaattctcagaggtaaagctaacgtgccccaagaagaccccacacgtcaccttctctctctttctctctctctctctctctgttattttcttcttcttcttcctcctttttactgctttttgagttcagtggccattttagagagacattaatcacagtgaacagtagaaacaaaaagaataatcacgtgttgatgagtgaatcaatgtacagtaaagcctccaataatattacgccacgtgggtaaagttggtctacagtggcggtggtgggggactggtattttattagacataaatgcccttaatgagatttgggtgaataatcttattgtacaggtgtcgttttattagaggttggtattgttctttacggtggagttgcggtgtatgggatatatttcgcggcaaattcggtgtttgtaaatccagagagagatcacttggcccgaagtggactcgtttaagggtaaataccaatttggaccctctgttttacaaaagttaccgattggaccttgtgttttgttaaatgcaaaaatgaccgtcgatttctaataatt

SEQ ID NO: 393529 - DNA, 1605 bp, Cannabis indica
tatgatcatgtaatgcattataaataatttaaatttttttatattatttattaaataataagtatgagactcgatattaaattgtaccaataatttaattatttttttaatgctatttagcatctaaagatgtcttttagtatttataataaaaaaatgttaaatataatttaatacatatctatttatatattttgaaatttttgatatatttcaatttaataattattataaaaaatgttcatcacacttgtaaggtgttatcacactgatattattaataaacaatgtaatatgtacattatctaaaatacgaagagtataagcttttttaaaataaataaataaagaggaagagtataagttaagtcaagataaagttgatatgttttagatgtataaattcatgcacgcgtttatgtatgtaattaaaaggacattattttttttttttctattcttgtagggatttgttttcttatctctcatttttctcttaaatatatatatatttatatatatatatttatttattgatgaattaaatcagccatgaccccatgggtatatatttttctcacatatttagggatgaatttttttcattacaaacttttaataatagtatgtaaataaagaagacgtataatttcaaaattataattttttttattatatttggttgcgctcgacaataaattctactagcactgttataaatggataaatagttaaattaatcaaatagctttagttattgaacaaatataagtataaagtaaatggataaattcaaatataattattgaacaatgttaccggtatggtagagatatctactatacctgttggtctaacttgaattttatttataaacacattttttttaaaagtaaattaaatttacagttaaatgtataaaattaaacataaaatacaccaccaccaatacgaatgggaaagggtgggatcaaatcttgagccaatcatcagatctaatatatctataagctgtcctatcctagtggtcacacataaagttaaattagctgtagtaaaattgaatcgtgaggcatcttttgatattataagtataaaaatataattaagttgaatataacttaattatttattatatagtataaacaagagtcaatataatatatgttttatatgtaatatatatagttatatgctgataattcgaagacataaaacaagagctttcatcatcagatacgattttctcattgatccaaaatagttttatatatatataccttgatacaacaagcaaaaaattctcttttacttaataatattaattatcatttcaaattatattgtaaattaatcctcaatgtcatgacaaacttaatgtcatcatcatatattgataatatagtagtcttttatatagatctatgtgatgaggggcggatctgttgggattttatgccctaaataaaatttatttcaattataattctaaaattagactatgtctagtttatgaattttcactaagcaagggcttgattgtgaagaaaagagattttaggtcttatttattaattaaaagactttattaagtttaattaataa

SEQ ID NO: 393530 - DNA, 798 bp, Cannabis indica
tatatttaattatttatttaaatgtgtagtattttattagttaagttaattacttcccacacacacatataatataaacttttttacctcaatctaatacttttactctaatatttatacatttttagtgaaatttattttaattctattagaattttatcagcacaataactgtaataagatgttctcaaatattttgaacatgtaaaaaataagaaacaaaacacaaaaaataattcaaaacaaataaaataacattaacaatacaaaaattaaaaccctactttactacggatgaatttttaggacaacttcgaatcacgacttaaaaccatctttttagcaaatgaattccagagatatccttgaccgattcttgaaacaaatcttgttcttgctccaattccacttccttattagcccagcttgtactaaatggggtgtgagaaattcaggtacaattaataatgattatcgagcactactctacctcaattccccagtatcacatatattcttctcaaggatcgaactagtatcaccttcctctcctttttctacttgcagaccatgagtggaatcaagatcaggcaacctaggatctggcttttaaaccattcatctcttcttcaccatggaagagagagaaaatagatacctgctcctcttattattattattagggtaaataccattttggactttctgttttacaaaagttaccaattagaccctgtattttgttaaatggcaaaatggaccctgtattttctaaaataatacaaataagaccctgaa

SEQ ID NO: 393531 - DNA, 1331 bp, Cannabis indica
ggggcataatgtgatatggtacatgtcaaagttggaggggactaaaaattttacagtgcgtcttcgtaactactttttttaattaattttttgtttttaaaaattagaatagtgaaaaattattttactaaaatcattattttataaaacttattttacttttcaatttttaattaagaatactaattttttttttttaaaaaaaaaaatactttcaaaaattttttaaatattttttttaatcaatatcttagactccaaccccaacttagtccttggaaaccgaactcaaacccagccccagacttggacctacccccgatcccgacctccctagacccgacttaaataaaattaacaaataaaaataaaaatgatattcacagaataggcttttttttgttttaaaattgaaaaataaaaataacacatttttgtttttcaaaaaaacaaaaaatttacttttatttttgtgataaaaaatttataaataaaagtattatcaaacgccaccttaattagcttttttttcttaagcatctcatctttttcacaccttcctctaatattcctcaaaaacggctaacctgctctaaccttgaagcttcattttgatacctttcaccaaatcattatcagaacctttttaatatcattatatgttatgttcaacagtgggttgaacttagctaatgatatgattttcaagctttgttggttcatttttttatgtgatatcaattattaacgacatttgtcatacatctatagtaggtaatctactttctttttcctcccttatctcattttagagctttcatgaaagagctttgtaattttgtagtattaaaattgtgaataaagcttttagaaaaatgttggggattagtcacaaatcttattttaaagtaagaatcttgtaatgggaaaagctttattggttctatcttctaatcaactttttcttactttggaatcgggtagcttttgttggccatgttattgttctatatattgatttgattactcgtactgaaaatacagaacccatatccatttaatttgcactcaaaatgcaactctaacttttacttgacactttctcaatatttatattggctaattagcatagattttgtaagggtaaaaactcaaatttcaacgtgtttgatataacatttgttttgttaattttgaagttaggtaaatgcggttttggattttataaattatagaagttaccgatcaaattttttgttttattaaatgaaaattcagattatatatatatatttttttaaataatacaaaataatattgagaaattctac

SEQ ID NO: 393532 - DNA, 711 bp, Cannabis indica
ccttaaatctaacaatgtcaatagtttagaggtaatttttaacggcaaaaaaagtttagaaacataatttagtatatctcaaagttcaaagtcaaaaaatcttaattaaccttaattgtataatattgtttgacatgagagagtaggcacgtcgcacgtgcccagctaggaagatgcggtggcagtggcacgtgttgttgcacttgcaatttcctttgcgtgtggaagatactgccatgtttggatgcatgaataaactcattctctcatctaataattgactatctctgtttgagcgtggtggaatggattacatcttttggtctcaagtcaagccatacatcatatactatatttaataataacacttaattatttagtctagtctttttctttcttaatgtacctttcagactaaaacatataaactataaaaaaaatatatcagtttacttactcaatgtaattcatgtagtctctgtctaatcataaaataattaagcacaaaaatgaaaactttgtgaattgcacaactatgaacgatataattaacttaaagaaattataaaccagttttgtgcataccgtatcaaaagtctgatccatattggcatatacatactattcatattgggtaaacttaaacaaatattagaatttgagttaatttttacaaaaatactgtcacacggaaaagttttcaaaattact

SEQ ID NO: 393533 - DNA, 1153 bp, Cannabis indica
ggtgagacaatctgccgttttgatcagtgtgagggaatatatcgaatttccagctgcttgtttaggactttatcacgcacgaaatgaacatccaattctatgtgtttggttcgtgcgtgatagacaggatttgtggcaagggcactcgctcctaagttatcacaccatgttattggtgttgctggaagggggaattttaattcttgtagcagtgattgaatccaagttaattctgcagacacttgtgccaaagctctatattccgactctgtacttgagcgggaaacgactgcttgtttcttcgaggaccaagacaccaatgagtctccaagatacacacaataaccggctgttgatcttctgtcgtctgggcaacttgcccagtctgcatctgagaatccaaccaagctaagtctgtcacacactttaatgtgtaagccgtgaaacaatgttccttttaggtaccttagaattcttttagcagctgaccagtgggctgttgttggtgccttaaggaactgacttaacttgtttacagagaaacttaagtcgggtcttgtgtgtgttaaatactgcaaagcgccaatgatactcctgtattcggttggattttccagtagttctccatcagaaatagacaacatttttccaattgtcattggagttgcacaaggcttcacatgcatcatgctggttttctttaataactcatgaatatacttggattgactcagatagattcctgtttcatcacgcactacttcaattcctaagaagtagtgaaggtctccaaggtctttgagagcaaaggcttggttgagtttgtctacaaactgctgaagcttgatagtgtcatttcccgtgattatgatatcatccacgtagatcaaaacaatcactatatccgttggacttgcataccagaacagagaggaatcggctcgagagttcatgaatttccagcttgccaaggtggatttgagtttgtcgaaccaggcacgaggcgcctgtttaagaccgtagagagacttattgagaaggcagacatgattcgggtttgttaggatctataaatccttcggggttgctgcatgtaaactttctctctaagctttccgttgtgaaaacgcattgtttatatcgagttgccgaa

SEQ ID NO: 393534 - DNA, 1753 bp, Cannabis indica
tgagcatcaaaaaaatgtttgttaggtatcaacctaacactcacaaagtataaccacgctttggccactgggtttaactcacaacgatacaactgatagggttcccgattatattcatgaaaccgtagtctaaggaaacccaaagttttagccatatcaacatagtctaatttcctttcttcgtaaagcatctttagacgttgctcttcgcgggaaaaagtttgcaagtcatagatggcatgtatagctctagtggaaactggcacaccaacacccctaactttcactatgtcatttttcctctcgggccagttagcaaaaaattctaatgctagggtttggttgtttctctcagtaacattcacaaatttcatccattccctcctgaccacttgttctcttattggctcaaatataggagggatgcccttgggtttctaagagcaccaatttccatacccctatcttcaatgaatggcctatttttcagttctaaatagcactcttgtgcttcggcacttacaaacagcgccctatcaacattggatcaccccgatgacctaggtgggttggatgaagagacacctttttcactcactcttgatcttttgggtcccatcctcactcaatactcttaacactcaagaaaatttaagaaaatttttgacagcacttccccttaaaattcctctttcccgggtgaatacccaatcacaaacaacctactctttcaatcaaaaacaatttttccacaacaatataccaaacaatagcacaaacacaccaattttcacaaaattccaacgattaaaattttctaaaaacaaaatttcgtagattattataagaaattacttacattaatgagaatttccttcactcaacctccattgatgaagacattgcaagttcttgaggttgaagatgatgaatagtgaatttttggaattgagtggaaattagggatttgagtgtggtgttgagaggaaaagatgaattgatgagagaaatagggtttttgatgttattagagatgaatgattaagagataaatggaagaaaaatggttttggtgagatgagattgaagattggtggtatgggggatggagaaattggattggagaggttagggttgaagaatgggtgttttggggttgaaattcgaaagtgcccttttatttccgtctaggcattcccgccgcagccaaagaaggtctcgtcacggcgagatggcgaaaaaatacacaattctaccaagagtatttcgccgtggccgtaaataattctgccgcggcaaacactctacctcgccgcggccacatacgggctcgccgcggccactggacagtgcccagaaaaattactttttttttttgtaacaagaataaaacacaataaactaaaattcagtttacaaattcaatgaacataaaccaacaaaaagcaagaaaaacaataagaaagttcaactaaaaacaccattaaaacttgggttgcctcccaagagcactgtctttatcgtcatatagtcggacgttgattgttttcttcaaagaggcgccaaaatcatggcagacttggcttggtcaatatgacctcccaagtaaagctttaaccgctgcccattaaccttaaaagtgtttgggtttttgccttttagttccacaaatccatatgggaatgccttgaccaccgtaaatggtaccgactatcttgacttctgcccgagttgaaactctttcctaactaag

SEQ ID NO: 393535 - DNA, 991 bp, Cannabis indica
agttttaggtctttagactttacgttaaaacttaatcaaattttcatttcatttcttttattttcacatttaatgtaattagttttaggtctttagactttactttaaaactcttggcatccttcatttatcatttgtgaacatattatctaattaggaaataacgcacgcgaagcgtccagttatattttgtttattgataattaagttataaaaatatattaaagttaatatttttttttaatagtatgagtaattattttgagtgtacttttatttagaatatttaattttactaaataaatgtaaatgaatttatgagattttttttaaagctgaatttatgaaatattattagtgtttttttttttttcaataaaaggtcttattttaattttttggccaagcttcaaatcgcttgggccggccctgaatgtaccaagtgtacttggtggttcaagtcgccaacccctataggctataggttttgatctcgttttgtaactacaccccattattttggctttagattttgtaataaatgtattttttattttatggaaaaataccttaaataagtttggtgatgaaaatatctcttgaagtgtggttgtgtagactgcaataggatttagaagatgtcacttgctagttctacacttagtttttcaaatgacttgaattttgtagatttattaagtttgtgctgtaaatttggataaaaaaatgtgagcaagactattatctggtataaaccagtaaacaaagaaaacagagaagaagaagacgaaagaaagaaatcctttattactgagattgagaatgaatacaacagtagtcaaaatacaagggatacaagatatatatatagctgcaataaccaaaaggttacaatcataacaaccataaccaattctaactaacttgacagctaagaccaactaactatgtaacgccttaatgctaaggcacgctacagtgctttttcaat

SEQ ID NO: 393536 - DNA, 999 bp, Cannabis indica
taaagtcaatgcactaccctccgaggtgcctagtttggctttggaaactaagtacggggttcgacgacccaaacgagggtagaaggccttctttgatgaagtcgttgttccaaagtttctctatctcttccttcagtgccttagctctctctttgtcgggtaatcttcctttttgttcaactggcttgaagttgtcaacatcaatgtttaaagtgtgacttatcaaggtggggcttattcccatgtcttcgtgtgatcacgcaaaaacatcttggttctcttttaagaacttgatcaagttagatcttatgtctttagggagttctttaccgattttgattagtttggagggttgtttggggtctaatagaacttcctccaattcttcagttggaccaacccctgtatcagtatccccaaaatggagatcaatgtgttcgacctcgttttgggcaagtcgtcattgctgagaactactcgctgtagctttgagggatttggatgctttttccctagttgtgatggataggctgtaacactatcgtgctactagttggtttcctttcaggtaacctattccaccctttgtaggaaacttgacgaggaggtgaaagatggatgtgactgcttttatgtcatatagggcttgatgacacccccaactagcttattgctagtccctagcaattcaagcggagaaaaataataatcgagttgaataaacaagtcaaaccaagcaaaaccatccaagcattttcaaaatattgatagagagtcaaaaatttctatcaatgttatttcagttgtaattctagagttgtgtgtgtgcaccaaactttcacccattttttctaagtattaacacaaatagtattgaaaaatctcaaaagtgtaaaagtctcaactccaatttcctcacgggtattgaaagtatttgtattgggagagggtgatgctctttttggagttggaaatgtagcaattaacacacaaatgaga

SEQ ID NO: 393537 - DNA, 608 bp, Cannabis indica
cttaactctgtttacaaagaaatatcatctagcttgctgtatgatgaatctgctgcagctatttggactgatctcaagatcagatttcatcagagaaatggaccacatatctataatctaagaaaaggtttaatgaaccttagacaggaaaatcaatccattagcatgtactacacaaagctgaaaactatatgggaagagctgtctaattatagacctagctgtacttgcaacggttgtacttgtggtggtgtgaagaaactccaagaacaccatcacatggagtacataatgtctttcttgatgggattgtcggatcatttttctcaaataaggagtagcattctgctaatggatccattacctgaggccaatcgggttttccacttagttactcaagaagaaaatcaaaagggtactcaaaatcttggaaataattcgaacactaaccttgcttttgcttttcacaatgataagggtgctgctgctaaatctgaatcccaaggaaacaaaaataatcagagaaagagcagacctttctgcactcattgtaatgttcatggccatacaattgaaaaatgctacaaaatccatggctatccaccagg

SEQ ID NO: 393538 - DNA, 770 bp, Cannabis indica
agttacatgaaatcggtttacaatgcaactgatcttccactagtggaagaatatgactacattgtgatcggaggaggcactgcaggatgccctttggcggcgactctttcggaaaaatactcagttcttctccttgaaagaggcaacacccctttagctcaccccaatgtgttaattgcatcaaagaatcttgctaatctcatcgaagaagacgatggtgatacaccagcgcaaaggttcacatcaatggaaggcgtgcagaattttagaggtagggttttgggagggacaagcatgattaacggcggtttcttttcagaagctgacaatgattttcttactaagtctggcgttgaatgggatttggatgaggttgagaaggcgtataagtgggtgagagatagcatagtatcatattcgaatttgtcggtgtggaatttagcagtgaaagaagctttgttggaagctggtgttggtcctgataatggagttactacaaaacataaggttggaactaaacaatctggttctacttttgatgataagggtcgaagacatggagctgtggagttgcttaataaaggagacctgaaaaacatgaaaattgcaattcatgcttatgtgaagaaaatcatcttctccactaaatcctcaagtatgttttagttatgttgcatttcatttgaacatatatatttgaaaagcattcttatttggagtttttacagaaattttcaattttttttatttttttactgtagggtagaatt

SEQ ID NO: 393539 - DNA, 769 bp, Cannabis indica
gggagtcatgaatgagccattttccacacaaagtgcttcaccattgagggattttcaacttccacaacaatgcatggggggattttcaaatttttgatggattcccaaggacatagtggtggtttagaaatgttttggaagaatttggaggagtttacattctcaggtattcacaacatcatattgattaacacattcatattggtgggatgcaagagtatttggtcacagggttatatggggagtcgaatagggtgttaacaaagcatacatgggacttgttggggaaatcgaaggaagaatctaagttgtcttggtatgtagttggtgatttcaataatattttcagccaagatgataaaagaggaggtcaaccatacttaaattggttagtgcaaggttttcaagaggtagttggagattgtgatttaattcctcttgagcttgatggatatcaatacacttggaaaaaaaggtgcgacactgataattgggtagaggtgagactcgaaagggcactggtgtctcaaagctggtatgatattttcaatagggataaaatgtttaatatatatctacaccatatcgtaatttgttgtctttggatctttgtattactattttcgtccctattctcaaaaaatttaaatttgaaaatacttagttaagggagccatattttaaaatttattttaaaaatttaaatgtataaaattattaaattacatgaaagataaaatattactgttataaatattaataattatgt

SEQ ID NO: 393540 - DNA, 1117 bp, Cannabis indica
aaaaaataaaaattatattatatataccaattgagttctctaacttctcatttgattttaagatcaaatgatattgacaatactttggctaagcaacccatataggcttttaagtgagtctcatataattattattatttttctttttttttaataaacaaataaaataattttgggactaaaaatagagaaaatgttcagaaaatgtggacacttgaacaaagaaagagacagctaataataataataataggagaaatgctaaaagacaccagtggtatctaatacccttttatgtgtcagtatcgctattggtctaactaagtatcgggtccttcatagtttaatataatagattttaaggagtattactaaccaatcgtaatataatatgtcgtgaaggtactaaacaccactgatatctaatagcaatattctaataataataacatgaatagtaaaaagggggaaaaagtgttaaggagtatgggacaaataaccattggaagcttgagaagactagaaaagatgattaggtccatggaccatacccataacacaaggcaggcaaaaccatttataaatataaataaaaatggaccacaattttgtacttctcttggcctttttctctccactttaacttgatcccaagtggatattctttctattcattattgttctagaaaagtccaaccccaataattcattttctttttcttaaagacacaaaattaaggaagcagtttgattagaggtaataaaataaaatgaaatgaaagaaaattttttttttctattttaatatttatttaaaatttaaagtattgaaatatcattctaatagaatgttctttctactattttagaagaatgactattttatttcaaaataaaaataaaaatcattttaatgtaatatgagaaaaattttaataattttttttatcagttttttttcatacattttaaagtttatttcattgcattcatattcttatgttttcaataatcacaaccaaacgcaataggccatttaaagtttatacctctaaaaattgctcaaaattaaaattagaattttaaaaaagtaatgttaaaaaaattaaaaaaaaat

SEQ ID NO: 393541 - DNA, 1146 bp, Cannabis indica
ctcccccaaaaaaaaagtaaaatacataatatttaggcatttatataaatcctacggggccatggcctctatagactataataaaatatgcaatataaacgttagacaaattaagttaattttttttagtatttataaatatatttttcttgagaatatattatcatgtgtgaattagttattgaagtttgcatggaagttcatctttgtatcaaacatttttaattcactaatattattgtcatatatgttaaacctataaataaaattgaattaactaataatcgcataaatatacaaatacataatctcaataaacaaattaatccaaaaaaaacatacctttaacttcccatagttggtgattagtcgtaataattcaaacttttggaaacaaatcagttcaatcgttttgtgccaatgcaaatggaaaatgttttgactcagttctacctgaaagttgcttatcaaattaattgacaaatataattccttaatttactttgctttgtataattaattattttattatttgttgtaattttattatttattatttgttgtaattttaaattttttgccacgctaaagaattttagggcaaaatcccatagttagccttacaaattaccttttaaaataaattttcaaaataggaaaaaaaatatatatgtatattagtaaaaaaaataaaaaaaaaaataaaataaaacaaaaaaataaatatatatcaacaaagtcttaatgttgcgtaaaaatagagtttgtaacaaaaatataattaagctaagtaatattcaagtgtctttaatttctgtatatgtgtacataatatggagaattatatatgtataatttacactatagaaatataatgtataatatatataatatatggtcccaatttattatggccaaataatttgtaaaatcattaagtatataagtatgatatttaaaaaatcaatttgattgatgaaaatctttcttgataaatgaaaaaaagaaaaatttacacaataaaaagggtaaggtataaaaattatttttcaaatcaaaataagaaaactgtataagctccaaaaaattaaacttaaataaaaaaaatacccaaatcatcttataagcactcaaagtatggtggaa

SEQ ID NO: 393542 - DNA, 805 bp, Cannabis indica
aaaaaaaaaaaaaagtttgtataaaaggtaaaccaagacattttatcaaataagaaaaagataaaccaacacatgataaattactttctggacaattctagttatggaatttgtagatgaattctagcacacatatatataaatgttgatgtattaaaatactaactttcccatggtaataaaactttagtcagggagaccatgagctgttataactaataactacctctcgtttggcttagaatctaaagtagcattttgagtttgccaaacaattctaaacaatacgcgattttctttccgcctaagaaactgaaaatcattattacctacaacaaaagctaatttcaattactagagggaaaacaacattaactgaactgaatggcaaaatgttgaacgttcatacgcaaaaagcaagctaataagctacatcaatcgtcaaaggaaccaaattttatgcagaatttacatgaacatctttttttttagaagagagagagagagcgtacagagagaagagattgacgcataaacatggagatggagatgtgagttaggggatttgtgaaatagaagggagattttggagaaacgttgtaaaaaatgaaaatctgggttggggtattattatgagtctgtgacgagctgtctttcttgttccacgctcccacttttcccaccgcgatttggctaacgtggctctctccgtaggcatatatattcccatttattattggacggaaattaaggtaacgtttggttggaggtaatgaaatggaatggaatggaaaggaaacaattt

SEQ ID NO: 393543 - DNA, 613 bp, Cannabis indica
ccccttctttaactctacttatttttttgctgatgacagcctcattttttgctcaactgagagaacctcttgtgctgcgcttaatgatgctctctcagtttattctagagcttctggccaggtcatacactttgcaaaatcatccattctattttcccaaatgttccccttgatattagaaatgatttttgtaccacttttaatctataggatagaccttttattaacaagtgtctaggactccctcaatgcctaccgcgttcaaagtatcactccttttctttcttaaaagatagggtctcttctattgttcagtcttggcatttaaaacacttctctaaagctagtaaggaaattcttcttcaagatgtggtacaagctattccagcctatgtcatggcctattttcgattgcctgtcaagctttgtaaggatattgaagctgcgattgctagattttggtgggaaacttcatctaagggacaaaagaatcattagaaaagttggctaagtgtttgtcaatctaagtttgaaggaggtttaggatttaggtctcttattcactttaatcaagccatgcttgctaaacaagcttagagaatcttcaacaacc

SEQ ID NO: 393544 - DNA, 623 bp, Cannabis indica
ggacctgcaccctcccacggtcaattcttcgcaccaaggttcgtatcagtaaacgagagcaacgctgaatctcgtgatgtcaaactttcgactttcacttaggaaaggctaaaagtgcacaagagatttaaacaatgaattttcttgcaagagcgagagagtaaatcattgtcgggtgagtgagagtcatgttgaatttttatgaggcacacttcggcttccgcaaaggaaggataaagttgcattaaaattcaagcttagagttcgattgaaaagataagagggaaagcatcacggggagtaagaaagacttaaatcagtctttccattttaggaaggtgggtttaagatgtatcgtaccgccggtgatctttcttgcacgaaaaataatgtgcaggcgagagtcatgttgaatttttatcaagcaaacttcggcttccacgaaggaaggctgaagttgcataaaaattcaagcttagacttcgcttgaaaagatcaaagggagaaagcatcacggggggtaatacaaacttcaagcggtccttccattctgggaagaaggcttgaagacgtgccacacccctagtaatctttcttgcacgaaaaatagtgtgcatgtgagc

SEQ ID NO: 393545 - DNA, 964 bp, Cannabis indica
aatatgtatccatatataatttatcttaggagggaatttttcttttaactttgagctcttgggaattggaatggtacatttttcaagtgaaaataagaaagaaggattcactatcactcactcactcacatgatttaatttattaaagccattgcttatgaaaagttactattactattctcacatcacactcatcttttgaagttgcatttaccataatatatatacaccataaaatcaatctctcaaaaagagagttggatgtcaatttattattaattgcctcattattttatgactttataaaggaaatttttcaaaagaaaaaaagaaataggtagtattccatttctatatttatatgcataatagcctaaccttgaagttagttcaagttcacctatatataaatatatattatattgttcattggatgccccaaattttctctttgggaccacctaatttttgattgctttcaaagacccattataataaatttctcttgttctatctgtgattttttttttcttggccatgtaaaatctctcccatgaatgcaagtctatacaaacaaccctaggtctatatttaataaccctaaaaaatataacccttaaatattaactttgatagaatatttaatgatagaaaataaataataacataaaataaacaaaaatatactcccaacatcagatccaatgtgtttagggaaagaacattattgagtactcatttattgatctataataagtctaggtattgggtagtcaatacttttgatcctactaaactagctctctctctttctttctttttttctttttaatattgagaaattgagtgaatatcttaattttatatatttatattctggtcctaagttaaggcgggctagacatgcgcttagaacctatccatcatagggatacagaaaaaaatattattattttttaataat

SEQ ID NO: 393546 - DNA, 1484 bp, Cannabis indica
ccatttctttctaaaattcttcaaagactttcttgtgtttaaatagtttcttccaagggtactctgttcttcctttcaaactatggcctttttgccaaaagactagatacataacacaaaagaccactcttccttttctaacattttctcaagcttgtagcctctggacccttcttttctttctctgaatcccttttcaagctttcacgatttcgaaccaatccctgttcccccattacacttctcggaggtctgcagctgtccctgttttgagcaagctgctttaggattagggaattatgcctcttccggtgtcgagcctgtgccacccttggcattgtgtcctttttccatttttcctcctattttggcacctatcgaggaggttaaagaagatcccgaggtgtcagaggggagtttgactcaaacgacagcagcttattatccagagcttgaagctactgcccaatctgagaaccttgaagaagtctgtctaaactgacgattcaccgtcggttttttgcaaatctgcttcttcctttccttaggagtcaccctgagtggtttctgagattatacgtcctcctacctcttccaactgccgaggctggattgcaatgcgaagaacctttcagcaacgggaaagtttttctgtgtagagggctgatttgttttaattttatttttcgtgtgtttagaacttgcattttttgtaagtttgcataagtgttttggtatgggtatctttgcccatgcatgatgttttgccctgccactactcccccaatagagtggaaaacttcgaacatgctataacgggggagtggctttttgtaaatgtaattagtttttaccattaccaatgggtttttatgctttttctcctgactttattaagtgttgccatgtaaatttcaagttcatgtgaactcttactttggtgtcgtcttactccgtggcagcgactcattttctaatcatgctttagtcactgattgccgccttatattcgtgaatccggctcatttattctttcatcgcttgcctttcgtgaaaggtcttagatatgcatggtctggactgaaacttttcatcccattatttataatccatccttcccttttttttatacacatgataacaaggcatagctacagttataattaaggttgtagtcatagttatagtttttatacgtagaactttttaagataccttgcgttccagcttctcgatatctcggctccatccatagtagccagcttgtaagctccttttcccgccgagcgcaccacgcggtatgggccttcccagttgatggaaaattttcccgcccgggactcctcggtgttgtggaagactttccggagaatcaactcccctgggagaaaatttctgaccttaacctttttattatactgccttgccactgcagagtaatagttcggcatccgggataaggaacatgttggaattattttacc

SEQ ID NO: 393547 - DNA, 2171 bp, Cannabis indica
ggtcttggtcaagaatatgattccgttgtagctaatatcacttctcgcagtgatgatctctctcttgaagatgtgcaagcattgcttctggcacatgaaacacgactcgaaaggcatcactccacgcttgatttgtccaccaaaatttctgccaatctcacttttgggttacgcaatggcccctatcgcccacccccttactacaacaaaaactccaacattgagcattcatctaaaccaccttccaaaaaccctcctcgacctcaaaaccataatcgccccctgtgtcaagtctgtctaaagtttggccatactgctcctttttgtcattatcaatttgacagaaattgggtgacacctaaaccaaatcctcccaatctcaagcccaccttactgaactacaacttgagtatgatcctcaggttcacatcactcagttcttgcctgattttggtgatgatgtaggttggttcgtggacacaggtgctactaatcatatcacctgcaacatggacaatcttgattcagcaaacacatactctggccaagaaaccgtggttgttggagatggtaagagacttgttatatcccatgttggtaaagcaactctttcctctaattctgttgctcctttgcatttaaattctgtattacaagtccctgccatgacaaaaacttagttagtgtctctacgttaactcatgataatgatgtgtttcttgaacttcacaaatcttgttgttttgtcaaggacaaacaaacgggggttgttctactcaaagggaagcttaaagatggcttgtaccttctaggagatgatgactccaatttgtccaaacatagtttacagtgtaatcttgttactgttccagtttcatcttgtactgattttcatagtgcttcagattgtatatctgctattgcagataaatcttgtaatcaattttcaataaataacagtaacacttttccttacactgatgtctcttctccatgtgcctactcaattacaacacagtctaatataaatacatggcatctaaagttaggacaccctgcatcagccaccttaaagactatcctaactcatgataatattccacactcactcaaaaatcttaagttttgcaatgcttgccaattaggaaaaagtcataggcttccttttcctttgtccacaaaagagcatcccaacctcttgaacttgtccacacagatatttgggttttatctcatgctgtgtctattgataattttcaatattatattatctttattgatgattacagcaggttttcttggatctttccaatggtccttagatttgaaatctttatacagttcaaaagccttgtggtaaaacaattcaacttgctcattaaaaagattcaagctgatggaggtggtgagtataggccttttgaaaaatttctaaaagatcaaggcatcaaatttcaattaccatgtcctcggcatgtcacagaaacagggtcaacccttcttgcacaatttggacttgacatgtcctattggtggcatgctttcctatgtgctgtgtattctgtcaatagaatgcctacccatgtaatttgtaatataagccgatttgagtgtttgttacatgaaaaacctgattataacattttaaaagtatttggttgtgcttgctttcctcatttaaggccttaccataatcacaaattggagtttcgttctgaattatgcacttttctgggctattctcctaaacacaagggctacttgtgtcagaactcatctggtcgaatctttgttgctctaaatgttatcttcaatgaggctcacttcccagctcacaagacttcctcacctatacaagtatctactgaacatcaccatcaatttccaacagcaaaatttgttacagatatacatactgctgtcactcaccctattgtttcctctgctgcaaccgagtcctcaaatgcaaggctaaagttgctccaccacctggtggttcagggcaaagcaagaacttgcgggggaaccaaggcaaaggtggacgtcagggttactcctatcctaagtgccctcgttgcaagaaacatcacccgggagaatgcaaccggaagacatgctttttgtgtggcatggtggggcatttcaagaaagattgccctcaggcaaagaaa

SEQ ID NO: 393548 - DNA, 654 bp, Cannabis indica
tttccttttttggtctcattattcattctaaaagcaccacaaaaaatgtgcatctctttctgtattatttcgaaaaatttattgttgtattactttgtaaaagaattatactggaatgaaacccacattagaattatgctcaattatttcttgattatctctcctaatttgaagaaaaaggtgagaaagtaggttggtttattattgctgctatctttttactccttgtagttgagacttttcagtttagaatcaaatacacgttataaatgcatttaagtatagagaagaaaaatcattgcagcaaaagataaaatgtattgagaagaaaaaagtgaaaattgcactaaatatgctttctcaaaactttgttacaaaaatatggtaatattaagtttgacccatttttatagcattttttaaattttaagttttttatggtattaactatgcatattatgcatattatgtaaagaaaaaattacagtctataccatttttatcttgtccttttttatttttaccgtcttttttaaagtctactatttttatctcttttttaaaataatgtaccaattttgtccctgtcacttcgagatcctctccatgtgactcgcttatgtcagggtattttgggtacaatacatataaaaa

SEQ ID NO: 393549 - DNA, 1581 bp, Cannabis indica
tgttgtttaacaatagaacattgatatttgagatcttaaggagtctaataacacactgatgtaacgccatataattgtttaatttttttccattttatttgttaaattaaaacgtgtgaatcaatattaaaatacaccaatagttgtataaaacattttgtggtgcttggctcgttaagggctagtttggtgtcgtattgtactgtattgtattgagttgtataatattgtattagattgtattatattgttctaatattatttaatactatactatgtttattattgacttgattaatagcttgtgtaaaattatattatatttactataaaatcgaccccaactccgacccctgcgtccgagtccaggtccagcgtttgggtttgggtctgcgttcgggattcggaatctggggtttgaggcctagtcatggtttgggtcggaggatgggtcagagttcgagttcggattgaaggtgcgggtccagggccagggttcgagtttgggattgggttctgggtttgggcatgagtcctaggccgagacctgggttctgggtctgggcctgagtcctaggtcgagtcttaggttcgagtccatggtccgaggtctaggggccaaatcccgatccgagtccagctccttgtcggggttcgggttctggtctagggtctgagtccaagttcagtaattagtgtaggtacgagtcatggttggttcgggactagggctaggtgtggggtcggggtttccaaccttaaaccctttgtaaaaattttaatacaagctgatacggattatttgttatgtattaaataatacgattcacattatattaaaaattatggtcgtaattgttatcccatttttcgcattgtgatgtggcagtaaatgctagtgacacgtggaccttattccctgcatatggatgaagagatgttccgaacaaagctcaacatacacttgcacggataatgtcttcccaaccgagcagtagacaattcgagcagcgtatcaacaattagccattccaagacttgcatcgtgaagcacaaaagtcatccctacaagtctgtgatctattgtccaaatcccacaatctgagtattctaaatatgtaatatatgttcttaccaattatagacattgtaagcaaaaggaaaacctcccctcaagcatttagcctataaatagtgatccattctcattggtaagggggtcgaaagaattactttagagaaatttaagaaagaatactcaaagatttcattgtgaaagcttcaagagagaaaatactgtattctttgtttttgagttgatacaaagcaatgggagtaggctattaccgaactaaaggggtcgaacctctttaaatttcggtgttctttattacttattcatttatacttcacgttaattacattttctatcatccaaacaaccattagagatgacactgagatccagaaccttcgtaatgctcttgggctcatgcaaggtcatactaataccttacatcatgatcaggaagagctccgtgctgcagtgaacctttgttgggaattattttaccaggatct

SEQ ID NO: 393550 - DNA, 570 bp, Cannabis indica
gatccacagggggaaatccctccgcttgacaattcaaaggttccacagaagaacttctagcttccttagctaacatatcaacaaaggaaataacatcacgggacacaaatgcacaagaacaattaactaaacttcttttaagttccagaacactagagaaaagagaccagcatttccagcttggtgagattcctttcagcaaagacttcaccaccacctgagaatcagtaaggatgcacacatcttcccaattcttgtccttagcccaaagtaaggctaaatgaacgacttgaagttcagcagctaacgggcactcatgttttctagcaatagtctgaatgaaccattgattgttggatccatcaatcgccacaatcgcacccccagagtttctatccttgaaagacccatcagccaaaatcaccttcgagacatatacacctggcatctttattgttaaagcaacacgattctgtttctataacagaatcagtgttgctcctatcaaggccgtctcaagaagcctagggcaaaatttgaaatgaggctttttttttactaaaattaaaa

SEQ ID NO: 393551 - DNA, 2005 bp, Cannabis indica
aaaaacagaatgagctgcacttcaaatcctacaaccctcatacatgtattgattaactgtacatgcattttaggcgttttctcaagctaaattcattatattgcatcaaattccagaaagctagcatggtactggcatctctaataaaatataaccagaaaaattaaataataaatcagcaataagtacggaaaatgattcgcaagaaaaaaaaaagtgtgttcagtggaaatacctcgagtgagaatgtagacagcgccgcaatggcttcttccacaggaacagccataatagtagaggtcttctttatgatctgggaaaattcgaatcatcgcatttcggcaaacattttgagcagaagaagaaaatagaattattcaaagtagtcaacacattctcttcacatatatataattatccaaagttcatggcttaccagataatttgggagagagaagatcggagagagtcagtcgcactaggaaacattggtctgaactttagttaacgctgtccgaaaatgggagtggttggagaagagagaccagtactccgagtgggtcggagtcggacaatgaggacatttttggaatttttcttctttttctttttttttttttttttgctttttaaagaaaatgttcattttctattttattacaatagttctgccatgccatgatctagtagtgtttgattattaattaaacttaatacatatattacaacctctctaacaataaactagttaagaccaaccaaattatattctaattaagaaagagattaaaaataaatagagttacactttacaaaaaaatcaaaacactaaaaatatcaatagaacaacaatgacaaaaaataatttctaatactatatcataaataaaattatttttatctaaatattattttatatgtgtattacaatttataataaaattattaattttacataaataaatttataaattatctgtatatattttaggggattacatcatatactattttttaactttttttaaaatttactgtttgggttgctccagtaatttttatgtgggctgctatacggattttagtagtaatttatgttgctccgttagttgctgtagagatttctatgtggaattccgtaaaaatacaacaaaaaaatattttgaagtgtaaaaatgaaaaatctctatattttatcaatatataattattcttatatagagaagtaaactttcttaataagtgactttgaaaatgtataattaattaaagcatttccattctctactctattttttaaaatacatcattaaaactccactttatttattttacctcaaacttttacattataccatacatcatcttctctatctttcctctatatcatttaaatattatatttttaatatattttattcattttatattagtaattcatataatattacacacgaaaaagttaaagaaaataatattaaaatatgtttagctcaatatataattatctctacatttagctaagcactattcattgagctaaaaattatgtaaaatagctaaggtttacctcacttgttggaagctcaattttgtaattttttctctataatttaaagattgagatattttagctcatttattgggagtgctcttacaatttagaagggtaagtttaaaaataccacttttattaatcaattaatcaaataatcaaatttatgtctaattttatatttaattgaagcatacctctttttatatgtattgtacctaaaataccctgacataagagaatcacataaagagtatcttgaatcgacatgagcaaaattggtacaacgttaaaaaaaaaaagaggtaaaaagatagagtttaaaaaatagagtaaaaataaaagatgacaatataaaaagggtataaagtgtaatttactccaattatttagagcttacttttatttatacctaaccgaacttaatttttataacaaattaaaattatt

SEQ ID NO: 393552 - DNA, 1751 bp, Cannabis indica
ttaatgagactagttttggaattgattgggtagctcgtgaccatggaggaaatgtcattgaagctgatttaaaattattgtcgagttgggctatggcaaaagttgtgagtgtcaaagaggtttttagctgaatcaagcatcggcatctatctcaaattattattgaaattgattgtcaagtagttgtttatgcaacccttcatactcttcaaatggcttctctatttgagttgattattcctaattataaacgtctaatttcttctttaaataatatctctatttattttgttaaacgatttgctaacaagacggtcaattgtttggctgatattacttgttctttttcaagtcatcattttatttccaaactggtattttattatgggatttgtactttgattatacagcaaatttcagtaaaaaaaaaagaaggattcttctaaatatgggacgcattgggaaagggcccatgaaagtggcccaaatgaatggaattggttcaattggaagttggctccttcgtccccaaatcaaaaatctcatctcagttcttctctgtctccatccaccattggagatctgagtttgatcttcgttttcaacaattgaagatgaattatcagtctcctgtggtagcaatggcactgctgctcttctcgttgcttctttcagctttgattccatctggatcatcatcctcaactgtccctgctttcctctggtatttttccttaccaatcattattttatctttctatcaattgtatgatcaattgaactattatcacattcgcagggttaatccatcatcatcgtcgtcgtcttcgtcatctgtaaattatcagactctttctccaaaggatctggctaagtcccttctctcccaagctggatggtcacacttactggttagttagtttattggatttaatcactgtcatcactcacaattcgacatgttgattttgaattttaagttttttttttctttttcttttcattagtgctcagaagatcaagttgagcaacctttggatctggctcttatctttgttggttcacaggtaaattaaattccattagctttactttttttttaatcatgtaataaattgagctttgaaattttgaaagcttttttcttgcttaactaaaattgcatacatatttagtttatggactaggagatacagaccaatgcattaagaacactttagaagtaaaagcttgtctttgggcctaattaggagatacatactatgctaatccgaaaattaaagtcttgcacaggaaaattcaccatttagcagattcatgtataaattcaaatacactcatcaccaagattgtctttgggcctcacgtttgctgaatgtataaattatcatcttattatgaactctgtaatactcaatcaattccatagttctacttttttgtaatcatgtactaaattgagctttgatatttgaaagctttttcttgcttactacaactacatatttagtttatggacaatttagaagaaatgcactcattttagcataattattgtacataatattactaattccaaaattaagactatgtttagaagatagattttgatgaggaaagaaaaagatatgaaaaaaagtggaaaataaaaaataataaattgtcatatttggtatggaaagaaaaactgtatagaaaaatactcagttcaacaaaattttctatatcaatcttgaaaattgattatttta

SEQ ID NO: 393553 - DNA, 543 bp, Cannabis indica
agctagtactaattaattatattttctcatgatttcgtcttgtacatatgttatataagattagataaataaaaaacttaaattaaaactgctggaagatatgttgttggtttgataagattacttcaagaatatgagatggatattccatatataagcagcattgtacattaaaaatgttctattaattatttaattattaaaatttatccataccaagtcgcctacattataacttattaattttgaaacctataagttatctattgaatatgttgttaattaattttcaatattgataaattaatagcagaaagaaatatggcctcatatcactcatccttaattttcaaacagatgcacgtagtgttagagagtcccatattgttaatgtgtggaaagataatattaatatataagaggaatgagctactcctcctattgctaattagttttgtagatagaaccccattcatcttattctcaaattctaacatggtatcagggcaaaaacaaacaaaaaaaaaaaaaaatctctagcga

SEQ ID NO: 393554 - DNA, 732 bp, Cannabis indica
cccactaaatttcaaggtcggccttgaaaacgtgtttaagatgtagttgagtctttatagaaagacaatctaatgcagcacaccaaagcaagtctttaactttcggaggaacttacagcttccaaattgctttgtctcctgtatcgtctgaaaggtggtgtgctctaactagttcttttgtctggatggttgtagttattctttgtacaagcccttttcttttcccatttcattataataatagtgtttatcactcttgtcccttggtttgattgatctataatcaatggttgcatttacttcctcttaaaaaagataagtaggatttttattcctgaatttaacatgtactaaattaaactttagaattttttatgtcgttaaattttggtcttgaattattaagattattaaatttaaggactttagtctaattccatttatctgtatattaaatggtgtcttccaaactttaatatttatcatgtccttcaatattaaattatattttcagaatttgtaaccaagttatatttcttttaataaaattataaaaagttttcaaatgtaataattttaatagttctaagaatttttaagagtctagaaagacataatggcacgtttactatacagtaatcagaatcggaataaattaatggagaaatataacggaataaatgaaaaataatcggaatcaatatttgtaatatgttgtttactaaaattttt

SEQ ID NO: 393555 - DNA, 580 bp, Cannabis indica
actttaaatttgtgattcatctcaattgtgaattggaatttctctcaagttctaagaagttatcacaggttgttcagttttggggagttttttatttgtgtgggaaaggttggggaaaagaggttaaaaaaatagtaatggatctatggagatgtgaccctgcttttctccgtttgcttcctaatttcttagccaagagattacatatactatggttttatgtaacacagatggtgtaatgtactaacacagttctgctctgtgttttacttaattgtatttactatttatcgattaggaattcatgacccgtcttcttaattccactacattttattttaggttcagtttgagttgattaacacaaacccatggtctatcctgtttcaattttgcttttttattttgcaatttcattatttcattttagcttagcattcagtttcacacttggaggtaagaacatggcatgggctgtttggtatacatgtttgcttactcaggattgggaatttaaagcccaacccatgtttggtattacatttttatttttgtagctggggattcattttactatggg

SEQ ID NO: 393556 - DNA, 531 bp, Cannabis indica
aactgcgatctggatacaaacaaaagttacaagcaacacaatgagcaactttgtttacagaacacttaacaaaagataatttgacaaaattcaaagaggctaaatggtacgcttacaatcttgaacgacttaaccaaaagggaaggcatatctaaagagcttaatatagcctgaaccgaagccaatgaatcatttccaagatgaataaccacctaagctttcgagtcaatcaaactcaacggttctttgaacacctccacaaatgtcggttccactaacccagcatgacacaacaaacgagcctcaatcagtttaccagaactatcacaagcaaccataccaatcccaaaccatactaagatggatgttaaggatgagttgttgatctctcacactaaataagtctttaacaatctcttcatcctaaactctagaacccaccaccataaggtttgagataggttatgtaatatcccagaaaataaataatattgaaataggcatattttattaaatatgtaattatgttgg

SEQ ID NO: 393557 - DNA, 810 bp, Cannabis indica
gcttccttttttttttttttttttttttttttttacagaaatcaaaactgaactagcttaaagagggtgatgggaatactgcttttttccattaaagcatcagagaaaggagatgtcaaaatagaattcttactattatcaatgttgaaggagacagagttgaagatcctgtaacggtaaacaaatctttcttgtcctactatcaacactaattggggactagtgtggagaataggaaacttgtaaatttaggattgtggctcacggaccagtgataaccagttagcagtcagaattcttagtaacagaatttaaaaaagatgaagttaaaagggatgtctttagtattcgttgggttaaagctccaggccccgatggatataacagtttattctttcaagacagttgggatctagttggaaatgaggtgtctgaagctattctatcattccttcatacaggttgattgcttaaagatatcaattcaactattcttactcttatccctaagagcaattgtcctaacaaagtaagtgattatagacccatagccttttgtaatgtcctatataaagttgctagtaagctcatctgtagtagacttaaatgcattttaccagattttgtagcttaaaaccaagggggttttctttagggtagatacattacccataatataatgatctatcagaaccttataaggcactatgagaagagatccaccaagtgttaggatatttttagtatttaatttaggttaattttagcacatttttcggtttaatttaaattatggttggagcattttta

SEQ ID NO: 393558 - DNA, 889 bp, Cannabis indica
atcctttttcccatgtgtgttgaactttctttttcactttcttttttatttcctttttctcttttctatgtatgaattttattctatgtgcttaattaatattctcacatgtttgtcaacctagcttccaaatttctaatttgtggaggtagaaataattttcattttctcaataatataatttgcttttgtaattaacatatataattaataattttctttaattattcttcaccttataattataaattgtgttttaatttttatctaatatttttagtcacaaatttttaaatgataattctttagtcaaaaaatttattgcgtcatactaaaaatatttttttacaacacttaaatatataattatattcataattatttacataaaaaaaacttcataattatttattaactaattataatttttgtcccttaaattttgacacgtactaaattatgctctttaaatttttcttaccgttaaaattcccccagaactattaagagtattgactttaaggacttttatcccaaatttcatttaattttactaatttggtgattgtttatgtactaaattatgctcatcagactttgatatctaacaaatcatgcccctcgaactttgacatgtaccaaatcatgtcacctgaacttaatttcatctatgttagactttctttattaaatttggatagaaattcttaaatttgacaatttcaatagttcagtttttaacgatcttaaaaattcaaagacataatttagtagtttaagagcaaaaatcttaattaaccttatttatttatagatgttaggttatatttagtctatgtttcgggtctgtaaagttagcattttctcgtctattggtgtcttttggagc

SEQ ID NO: 393559 - DNA, 628 bp, Cannabis indica
gctcaaactcgcatggtagcatcggagtgaaaaagacttatggcatattgataatgtttgagattgttatcttgtgggattgagttgcgaacaatgcatgaccatagatcatttcgtagataaagacactatacgcccaacagtccataacattgctgtaatacttatccttagcaattttaggcgaaatgtacttggttgtaccgacagtggacgacaacctggctatcaccagctcggctacaaagaaccgattagcagccttaagtttcacgactcttcttaaattcaagagctagttggagaaccaagaaaacaaagatgagtcagttgatgattcaggtgattcaacaatgactgagattgtgtccgagcaaagtgaaaggtcaaattcaatgagcataatgtgattgtccgacttgacgagtatgtttttcaattttaaatctttgtgatgattcctaacatgtaaagatactctaagactattagaacttcgacgaattaaattatgtaaataaaaatatgcatgaaaatcaaatgaaaacaaattttattggagttgtttatgttggaattattttaccaggatctagatttactaccaagtatgtttgattaacatcct

SEQ ID NO: 393560 - DNA, 745 bp, Cannabis indica
agcttagtagttggtagttagtttttttttttttttctcactgttataatcgcctaaggtgagacagcagatgacaccataggaaacggtgtcgtattgtctgagagagagaaacctgtaaagaatttgatgacaaatgacaactgctgcctcttcatatttttatcgcacacgtgtgcgactcacatcattttaatataatttcttctacttctaaaattgatttgatgtttagttattattcttaaaaatctaaattatgaatcgactcatctgataccaatagcataatattattcatcaaaaacgaaaaaataatattgtgattttgtgattgggttcaccaccacccaataagtttctttatcttcatcattataaaattttggagaagtgtcatcattccaattaaatattagtacactttttatgtatgacacattataataagttagcataatttttaaatttatttttttttaagttatataagacacaatatttaattacactaataataatataataacaaagagagtgttagacactaataatacattttactatttcttttttttcttaatctatagtagtttgacatatccttagtatagacaatttttttgggttaatttcacaaatgcacaaaaacaacaaaaaacaacaaaaatacagttttacggaattttaaatatttttatgatttttttgattttatttacataaaatacggtctttttatgtt

SEQ ID NO: 393561 - DNA, 1173 bp, Cannabis indica
aaaaaaaaaataacaataaagaccatgagatagctgaaacggaagtccatacagataacaggattggtatagcctgcctttggattggtgttggctgtttaattccaagatctgccaagttacgtaataatttcgccttacatccatatctataagagaaattaagacagattttttaggttttattattaacaacgggagattaacatcaactagaattaagaatcagcagcatatcagcttccagaaaaggcaacgaaaatcaaaagcttcaagttcaagcagacaacaatgattgtcaaaagcggagtaaggaagcataacaaacacagcaaagaggagaaactcaacgccacaaaatgaaacagtgaaaaattaattctctgattttattcagcacttacaggataaaggaaaatcatggccatttggacagaactaaacaaaacaaaaatccacgaagaatacacatgaaaatttgatttccaggtcttaaaagaaaaaaaccatttgtgaattactagagggaaattgcattgaacaaagggtctctcaagggcacaaatataacaagaatatggtatgcttaactctgcgaaagacagaccttgagcttaactctgcgaaatctataagtggggatgggacagtattcccagaaacatgaatgttatgctccttcctgaaaagtgcatcccgctgtgaaaataccaaagatgttaagcagaaaccagaagcaccatcataagaacaaatttgttcaggaaaagagagagagatagctgaaagaacctcctgttgctgataaaatttctttttctcttgggaaagtttcttctcagttttctcattctcttctttcactgtagcttcaactgattttgaactcttgaaaacgctaaatccctccacagattctgttttagcattacaaagataattatcaaaactaaagctttgtctaccttttaatggcacataaggaacaataacacaaatacaaaaccaataactaccggaaggtccagaaccaactgcctttctctttctcttcttcacacgtactttctcttcatctttttcttcttcttctgattcatctgattctctattttcgttcaagctcaaattctcaactaattcatcattttcctctttttctaaaaaaaaaaa

SEQ ID NO: 393562 - DNA, 847 bp, Cannabis indica
ataaaaaacatcaaaaacatcaagaaattaaatgagcgaaatagttccgatcttattatttaattggatattcaaaaataatatctaattcgatctggtcacaattagacatccaatgtttgacgatcggttgttattgtattggattgattaatgcacacccctaggattgggcatgatggtacgacacgaaaaatatgtgcttaagtacgacacgacatgacaagcccaaaagacacgacacgtaagaacaaataaactagttcaaaatacacgacacagtaagcctgaaaagcacaacacaacacattaaaatagcctataataataaattgattgtttgaacattattcttaaaattaagaacaatgtgtcttttactattctctggagcttgtattggatggacattttttttatcattgtaacaagttcaaagatgctaattttgcctagtactttacatcttgtaatgttgttacttatttttttggccaaacttatcttgtcggctagtagtaatgtgatttggtggcccgataattctagttgtatccattgatagctgatgttatttttgaataaatttttgcccctacttttttagagtgtttgctgctcttggtgtttggtagctaagactttctcctcaaataaataagtatatatttgtcaatgatatatgtgtttaaattataataaaatttaaatataacactaaatattataaatatataattaaaaattaaaaggttaattagcaatttttctccccgaactttgacatgtactaaatcatgcatcctgaacttttttgaccgttaaaaattccccctaaactattaag

SEQ ID NO: 393563 - DNA, 747 bp, Cannabis indica
tcatttaattttattaattcggtaatcgtttatgtaataaatcatgctctccatattttgatatctatcaaattatgtccctaaaattttgacatatacaaaattatgcctcttgaattttcatcgatattagacttgtcttattaaaatttgacaaaagctcttaaatccaacaatatcaatagttcaagaaaaatttgttatagtaatgttataattcggaaacaaaaattataatcagtctatttaatattagtaattgtggcattctaaaaatcctatttttgacattcaaaagaaaaaaaatatattatcatagattgcaatagttttccacactttttggcacttcactttgaaatgaaaaggttaattttcattcattttaatttaaattttgggtggtggtacatctttgtgtggtgcacctatttttatagataatgaatattgtattattaaactaaaattttattcttaatgttattgtgagtctctacatatactagaaaaacacactgtaattctatattattattcattggtgaaataaaaacactgatttttattaagagtgaagccaattacaaacaattgagtttgcaacataacaattctaactttgtgatcttactttgattattaatacttaatagaatatataaatcatcaatacacaaattacaaataagtaatatcaaacatccaagtcttcatttctcatctccagcaaaaaaaaaaaaaaaa

SEQ ID NO: 393564 - DNA, 796 bp, Cannabis indica
aagagaggagagagagagagctaggtgtggaaaatgaatatctattcctaggtttttctatttctattccttctttctttctcatcaaataaaataattaaaaaaacaaataataaaacttaattaacttttcatgcaaataatacctccgcccaaaatgcataaaagacaaaataccaattttgtaaaattactaatttaccccttacaaattccttaagcctaaaccaaacctaagggtaccttggtaattaaactaatccgaaatattccttaacaactcatcccatattgtcgtgacatttctaaccacttgtccagtttccacggtccccaggcccgaatattttatttcaaaaacagtatccacgatacccgcatattcttaaataatctccataattaataaattacgctttatttaaatcatttaataaatttaccttaattactctaagtatgatcataatcttactcaaacacaaaaatacttacatatttaacaaaatatgtccatttaaatactatattaaatttctgggatattacagcaagtatgctaacatgatttaaagttgcctctttaataaccttgtcaagaaaacctagtgggacaaagcctgagctaaggaaaaagagtgcaatatatatttcatatttataactatttgcaagttgcctcgtgttgggctttatgccctaaataaaactctatttcaatgtaatctctatcatttaaatattaataaagagacagaagtattttcatcacttatttaatgtgtcatttggttca

SEQ ID NO: 393565 - DNA, 2094 bp, Cannabis indica
taaaggctaattgtgtaattcaattagtgaaagcccaataaaccattctgacttttatataggttataaattttatatgatgtgtttacacaattaatgaatggttgctacaattatagttacctatagcaattgtgttaaaacgaaatcctttacaattgccattcttcccatctccatgcatcccaagtggacatttgcattcgtaatctccaggtatgtttttgcatcctttgcaatgtggtatgatattaagatctgaacactcatcgatgtctaccaccaccaaagatattaacaccacaaaaaatagagtttgtaagaaaaaaatatatttttaaactcttatttataaaatgatattttttaaaattagtgaaaaaaagtatatagaagttgaatagtactttttttcttatgaataaccaaatttacatctaaataaaatttaattcaaatataacttattttatgagtattgtacccaaattatcctcacaccctcacataattaagatacaatttcaaacataatatattgtattttttggacatgaatgtgtaagtttgtgggaaaattagagcaaaattttagttagagaagaatggataatattgtgaaatagtaggagtaaaactagtaataatttcatatgacacaattttttctaaaaaaatttacaattttacatttaaagatttttttttttacatttttacattttccatagaaataactaaaaaactacataaaactaaaaagaaaataacatcaaaataacaacaaaaaataacatacagataaaaaaaatcaacaacaaattaataagagcacaacttaaaaaagaccgtattttcggtaaataaaatcataaaaattgtaaaaatatttaaaattccgtaaaagcgtatttttgtaatttttttttggttgttttaatgtatttgtgaaataatcctaaaattaaatgcaacaatttaaaatagatatctagtataatttttttcatattattttaaaaatagacattattttaagtaattttggaaaatatataccttggcatccttgtttgagataaggatttccctcgtatcctttcttgcaacggcattgatatccaccaccattctctgaatagtaacagtcggtattttctccacacacataggatgatgaatttgatttagcatcctcacacgtctggttatttcccacaacccaatccagaacaatactagtattcttcacttgttggtgcttaaaatcgagactcattttggatatgtcaaaactattctgatcggccaagaatccatagccgcacgggttgaacgaggatacattggtgtggttattggtgctttggattcgtatggacaggctcttgagatgcttgggaacagaggtcctgcaacagccgaaacccgaacacgatgtttgggccgacatgtttacatcttcactacaaagcgaaatgcaaccagtaccgaacctattctcttctttagaggcactgatgtatgccagtgtgtcgcaaccgaaagcaaatagcttgttctcagaatctgacagcgtgaacgacttactcaatactagccttcctcgtccgctgctatcgattaagttaccattcttatcataacaatcgtaggagtagcttttaacaaccttcatagttgcgttctccacattgatcttcagaacctccaaacctacatacgttagtttaggagaaccagtagtagtagtgctgcaattgagcaagaatctccaatcaatagttttactaatggcgcagctttcgtcgtggattccgaaggggtatgggacctccacatctccgcattttgtctggcaattgggtgagtttaccatagtaagagacgacgctgctaatgatgcccataacagcatcaaaaagaggcaccaccacgagtaattattcttcttcagtacttccattaataatgatatgtattatgtagcataagattttcttttttcttctcttatatacatataactttagttctatctttctttttctagaataaaaatttatgtaataaactaaaaaatttaaaaaaaaa

SEQ ID NO: 393566 - DNA, 783 bp, Cannabis indica
ttaaaagacggatgaaagttaaaaaagacatatcctgcttaatattgtttttagtttcttagtaaaaattctgtaagtttggtaggtgtatactatagttgtttgtgtttgttttttttttttatttttagttagattacatattaaatctatttatattacaaaaataatgaagtcaagtatgtaagaaagatttctagaaggttttgttatttttgtatgaacggtcattttatactatgttttggtaggagggatggagaagataggtgggaggagataataaattttgttaaatttctttgtttgggaagaactatttatttatttatttatttttttgaacatgtttggtaagagctattgaaggagagaaatgagatgtaagagaaatgggaatctactcaaatttccaatttggaatccctccaaaaatagaagaattaaaatttcccctcttcaattatagtaaattataaaaatactctcaacaaatattattaaaaaaataattataaacataaaatagtaattttataaattagtagttatttcttcttcaatattacaccatttttttacttaacaatataaaaagattattactttcttttctctcccttatattcttcatctgtcatactctttcactttcctaaacataacacaattagtgccagcctattattattattattattagggtaaatacaattttggaccctgtgttttacaaaagttacagattggaccctgtgttttgcaaaagttacagattggacc

SEQ ID NO: 393567 - DNA, 1212 bp, Cannabis indica
catccgacgtaacaaaaaacaaaaagaggtacaagacaattgattttactaaacttaatgtaggagaataaaataaaataatatagtatagtaattaaatttaaaaaaaaaataattaattaatatgcaactttcaaatatataattttaaacttgaaatgacattatttagtgttattaatacttataaatcattacactttatatttgtttggaaacttatttacatgaaaacttattgaatgttatagtgaaaaaaataaaacatgtcattatataagtgttgtgaaattgttctattataacaagatgcatgacacttatataatgttgttaaaagtatttaacttttaacactactcccattcggcaatattatgaaaaatattgttaaaagacttcaacaacaaaattttaattttatgaataatcatattctggtaattaatgaatatgataatgaactggatgtacagatgctccctgattacctctctggatgctatgattgtgctggagggttatatcatctgaacgagtcatctgttcaacatccgaaacatgactttgctaataaatttggtccattatcttagttgaggctactcttgggcttgcagtaaccgagttttaccacttttgaaattacacgtgtccccatctaaaaacacaaataacacttaccaatcaaagttaattaatggtcacattttcttgggatataaatgatcattaagaatgaaaaagtgcaacaaacaacgtgggcattaatgaatattgttgtggtgaattaattatgagaattggttcaaccatatatataaataggagaattttagtctcagaactacatcaacaatatggtaaacattcaggtagtatttggttgaagataatgaaataaagtggaatgaaaaaaaaattattttatgttttttttatttaattatattttaaagtattgaaatataatttagtgaatgaaaatattttttaattattttgatgaaataattattttatttttcaaatagaacaaataagcactccaatacaatatgagaaaaaaaaaaccaataattttttattttattactattcatatcatttacttctatatgttacgaaaaatagttacttttaaaaacaatcttttagtcacaacataaatttttgtgactaaatgtgacttttagttacaacaaaatgtta

SEQ ID NO: 393568 - DNA, 741 bp, Cannabis indica
accagtccatatatcggacctattgggccataacaaaaagcatatattcaatatggcaatcaggcccactatcaggccccatgttgggcctatcaaaccctcaccaaaaattatgaaagagaataaacatcgggccaaaacatcgtaccctacatcaggcaaatatcaggccataacaaaatatgaaaattcaaattcaccatagtgcccacaatcgggcccaatgtcgggcctatcggacccacacctaaaaattataaaaaagaaaatacatcgggcctaatatcgtaccctatcgggctcacatcggaccataactagaaaactaaaattcaaaataacaaacgaggctactattgtactctatatcaggcccatgggaccttgatctatcaaggagaatactaattgggcactatcgtaccctacatcagacccatcaggcaagtcaatatttttttgtaaaattgatatataatcggatagggtatcgggccctatatcgggcctttgtcttcaaccctagatccaatttttcttcacgaggcatccagccagcataggggatgcatcaggtgttgggaatattttaccatgatctagatttactaataagtatgttcaattaacattctaaatataaattctctaaaacaatgaaataaacacataagggtttaagaaaccttacattaattgcagcggaatataatcactccttccgttcaagatctctagccc

SEQ ID NO: 393569 - DNA, 2093 bp, Cannabis indica
tcaatatcgttgcccgatatagcaaatgataaggaagaaacctatctggtatttcaagaatagttactcataatggtaatcatcgtttccaatcctcaccattcgttccacaacctatgtatgtcactatcgttgcctgatacagtgaacgatacgtaagaaacctaaccacaattttagaagtaattactcataacggtaatgaccgtttctaacctttggtcataaccgaggcataacaaatacataaacaagatctccattataattgagattataacaatcacaattgttaattatttaaccataagttgtgcgtattactttttcttaccacaaaccaatattgggtgtgcgggccgacattggtggaaccatgctcgatgatcctgggtcctatgtcacaataacgaaacttaataaacaacttatctaaacgctaaaataaaccctaattccataaccgaacatctctaaactcccactggttcaaaataacttaaatatcactaaaattccctaacctaggctctaaaaaacaccctaaataaaattgattttgaggctagaaaccagagttttcccctgttggcaaaaccagttgaccggttttacagcacctgtgaaatcggttaatcagtttctttgttggcagaaacagaaaccctggtttttcacactaaaaatcaatcaaatctcctccaaacctgttcaaacttccagaacagttcaaaaccacaaatacaatgtatcacaagcacgaacttataacaattcatccattaactcaaaattacatgctcacatgaaattaaactcaataatcttcacctaaaccaattcaaatgaaacaaccactatctctaactaattcaaggttgaacaaattataaatcaagcctaaaaacacaatctaaacttaccttaacatgtcagccacaaaatcttagaactttaaccctaaactcaatctaaacttcaaaatcaagtgggaaaagataaataacttaccacacaacttagggaacttttattcttgatcaaatctataagaaacttggttgaaattaaagaaggaaggtgatgattgttgctgctcttagggcttcgaagggtagagggaaaaagagaaagaatttttgctatttttccaaatttcaaaaccttaattataaaacatatacgatttaaattagatattcagctagtagtttttaggatttccaaataatacaaaaataataataatactgtaattcaagcaaaaagaccgctccacccctcttaaacactatagcttaaaatacaatcctaagggtaatttagtcttttctaaccaatctcgtcaaaccaataacttaacattctaaactagtccgacattatttcaattaaatttattatttattatcgtgacatttctgaccactctgtcaagttccacggtccccaggcctaaaaatattttatctcaaaaatagtgtttactattcccacattatccaataaaatctccgtaattaataaattacgctttattaattcatttactcatatttccctaattaactcgtaattagtttaagtaagattataatcctacactaatgtccacttaatcacatatttaataaaatatgtccaattaaaatattattatatttttcgggatattacatatccccttaagcaaagttcctctatgcaagaagaagttcatagcaatagcaagttcactttttgtaatatcccgaaaaataaacaatatttaaatagacatattttattaaatatgtaattattttggtaacgaagtaagattatgatcttgcttagggtaattattgagaatttactcaatgaaataaatagcgtaatttattaattatggagattatattgggatatgtgagtaccgaggatatcaattttgaaataaaatattttttttgggcccaacaattgtggaaattttagcgatgtggtcagaaatgtcacgacattaatggaagaattatttgggaatatttcggactaggttagaaattttagaatatcggtttaatggaattagcaaaattataaaaatgccc

SEQ ID NO: 393570 - DNA, 708 bp, Cannabis indica
cttacttttaaaaataaaaaaaaaaaaaaaaaaaaaaatgctcaatcttcaatcttgaataatatttcccattactatttaccagtcgttttattataattttatattttttattagtttgttgtaacgaaaactctaaaaaatacataaaaattagaaaactttaaagttgctggattagattattttctcgcagtaatacattcataatatgagattaactttaatacattttttttaaatttatttttttaaaataaaaataataatttttcacataattgagaactatataatatatcatgagagatgagtgagtgtgtgtgtttttttcattgttgatcatcttaaagagttgatttgtttctcttttgtcttttctgcttatttgggattttgtgttcataattgacaaaatgaataatggaaagtccaaaagagaagataaataatagcaaaaaaggctgtaatgcacatggtgggtggggtaattaaggttgttttaattagtttacccactttatattagaggaaattacattctataccctttttatattgtcctctttcatttttatcctcctttataaaatctattatttttacctctttttttaaacattgtaccaattttacccctgtcacttcaagatactctccatgtgactcttttatgttaaggtattttgggtacaatacatataaaaa

SEQ ID NO: 393571 - DNA, 1214 bp, Cannabis indica
tttttttttttgtgcaccttttcaaggtctgacacaagggacgaacccttgattctttgagattcttttcgcaaacgtgccacgtaggattagtcctagacggtcgatgctccctgacaccttttcgactaccctttctagatgactcttgaaggcatccgtcttcctttatttgaatacttgttgactatgaacgagtgtcaaccttttggatctatacatctggcttatttatggaagagttgaggtcaaatctgaaccctctgtctgactctgttcgtgggtcatgccatcaattcgcttgggcttagtgaatgggctcgtaagctgattaggaacacttgaaattacatgtgtcactcgcttgtaaacacagataacaactttatatatcaaatacagatatgttattaaattattcattatttctatcatatcaatcaatgatcctctatagatagtttataattaataaggactaaattacaattttgccctttaattatattttatttttaagcacttagttgacttactgatatttcagtaatataattattgaaatgagcactttatcattaaatacttcaacatagctcaaagaaaattatcatttcacttataacatggaaagctatagatttctgtacctatgagtaatacttccactcatttttgttaccgagtcccgagatctgagtatgggctagtctgtaaggtaagctggtaacgattaactcaaagaactcgaataacacaatttgcttaagctcaatcatgtcaggattaagatcaaatttatctaaaataaactaagttatattggctaagaatagatataatggtaagatctattcttttatcaatatcggtgaagtccgatatatatattaataattaactatgtcataaataattttttactagttaacaatccgcgcttcgcggcggaagtgtaaaaaaatttaatattactaattttcatatgatttttatatgaataatatgagaaggtaagtgtacaaacgggtcagcttgacatgtaagtacaaaatcttttttataatgaaagcccgatatggttcatataacactcttcttaaaattgttctcaacattgtatatcaccagttgtcattaccgtatcttactaactcgctatcattttggcttaccaaaaaataaatcaagcaatgagttaacattattaactt

SEQ ID NO: 393572 - DNA, 948 bp, Cannabis indica
aatattactaaattatttactatacaatatatattttatttttatggaatgatataaatatatatatgtaattttctgtaattttttttttctttatttatagaatctttctgatcagttatatcaagcaaagcaataaaagtagtagtcactaaagctgcaatcagtattgaaatgagatagtctagccaagtggtgagcaatttgattagctgaacactttacaacataaaacaatattatataaaacagacaatctcttgacactcggtatataatacaaaaaccaaagcaaaagtcatacgaacagaactttgaacaataaccataatatttgtttcaactaccacatcacccctttgttatccttcagccaaccaaagttgggcttcgactaaggcgggctagacttacgcctaaggcccactcagtctagagcccaaaaaaaaagattttttcctttaaaatatacatatttttttgtatatttttcgaaaatactacacatttttaaaataaagggaccaataattttatttttcctgaggcccacccaatctaaaaaccgacattgtagccaactcaaagtttctttcactccaagagcttgtgcaagcaccagactaaccatgccaagcctctaccattcttagcctccaccagatggccatcattatttcgagcaacccaaccaaaactatattgtttttactctcaaatatttcatcaacattaatcttaatcattccttcaacatgtgtaattcagtgctcactccttctgcctaataaaaatgctcaataacataatcatattagaatattttaattatggaaataaaagaaatgattttttatttaagaaaataaataaataattaattttttgataaatgaatattttatattcattgaatctagacaaaatcaattatgtaatattctatat

SEQ ID NO: 393573 - DNA, 672 bp, Cannabis indica
tttttttttttgaaatataacatttattctatttttatttaagaaaataataatagaaatttattttttttaacaataatgattctttaataaacataactttttttttatatattttattgttaaaagtaaacaataataaaaaaatagtttttttaggatatgttgattggataatactttttagatgttgtaaacttgtattgtaatgttaaaacaaagaattatgttatagtcatatttaatataacacaaaagataaaagagatatgtacagcgaatttaatttgaattctaatattcaaaaaatgaaaataatacttacatagttacatttaacataatataaatatatgtatattgattatatgatatgtaatatgtatgagtagtttgttatcaataaagatatttcaataacttaattaagactaggggtgtccataaatcaatttaatctaatgacaatcgatcgatccaattacaatcgaccgccaaaaattagatatccaatggatcgggatgttatttataaatatccaattggatcggatcgaatgttagatggagtgtctaaaaattcaataaattcaacatctaatcaaacttcttaatatttttatttagtttggatgagtaattaatttatattgttatacataaaaaatatat

SEQ ID NO: 393574 - DNA, 1178 bp, Cannabis indica
taattacttgatcgggtaattacaagtcatacactacaattacattttttgaacaagtttctcttagcatttttgtgacttaatcccctaaacttaaatgggtgcaacaaaacacaatggaaaggagtttcgctattattattttttttagggaggtcatgagtaacaaattaaaatattaaaggaatttcacctcaaatatctcaattagcaatagaggttatcaaatcaaaatattaaaagaatttcgcctcaaatatctcaattagaaatagaggttattgtaatattcatcacaatcatataaatacatatatttaatgacaaataaataaagaaaatgtattttctaaactccctaaacaaagataatgacactacaaaatataggtgtgcaaattttatcaatgcacactgtattgtttccgcaatcaagaaatttttagtcttattttttatttatgatcgtaaatgttatagttttttaagatatgtaaaaatgtgtttaaacgatttgttgtattaatatcttttttattttatactgaacattattttatgttttgtatattttttaaaattttacaaggtattttaaataattatatcatacacgaatattaaaaaaattaaaaattaaacaaatttttatggatactaaaattgtagaggatacattagtacactcttttttggggagtgcaccatagaagctcaaaaaaacccaaccacccgctttgacttgaccctcaaaaaataaagaaaaaaaaagtcgttgcgtcggattggattcaaaccgagtagagatattgaatcgatcggttgaatgaaattaattagattggattagatgctaaaatctaacatctaatatataattggattagatctagatatacttaaaaacatttgagtggcctaataaacaaccctagaattaagtatgcatttccaatatataatatagtgtaagtctacagcgcacccctaaaggcgtgtttcggtatacatcctatctattttgacatacctttttttatgattgtacgttgtagttatttaggataacttacaaattttcagaaaaatcagagtatattacaataccaaaaataagatttacaaattttgttgcatgccctacttttttttatatgtgtggtaagtaattgtttaaa

SEQ ID NO: 393575 - DNA, 1364 bp, Cannabis indica
tttcctttttaattcagcttgagacaactcttcatcagcctgctcatcatcataaaggataatccctttattcttgccgcttgtttgggaaatatctgtggaaatccctctaaccgtgggatttgttgaattaccataattaactcctgcatcagtggagttcacaccaggggagttcacaccagccgaattgcccatggaagctttaccagaacgcaggtatggtgatgctgtgaaattctgatgacgtcgagggagggccttcatgcctataccatatggtttaacaatcaagtgtggaggagtatcaaaaagacggggacaagatcgctcagaatgtcccatcattccacaaataaagcagaaagttgggacattttcatatttaaaagctgcataaaaaatattcccatcccgctttcgaaacttcatgcgccgtttcaagggaagatcaagagaaacagtgacacgaattcgaagaaactctctccagaccccggtgaagttgttcggatctgattctaggaaagaaccaatgtaattgccagcatcttttgcaactttcattgtcataaaaccggactgcaaatcgtggatttgaatccacatatcaagtgtattaaggcttacagttctggggttatcgccatcatttagacgggaaataattagttgcttgcgatcgtaagtccatggactacccgagattacccgctgtatgtccaactcatgataaaattgaagcagaaaacgattttgatccaactgtttggcatacatccccttgccaggtttccagagatcagccataacattttggaagatacgaaaatcagaaatcttacctgtgagcagtcgaccaaccaggcaccatctggtatcaatggccagatcgtcttctgcatcaggttcctcataaaaggtttcgtctgcttcctcttcttccaattgtatatctttccatcgctcctcaatattccccatgtcagtactactggatgccatgaggggaacaaaacaaaataaacgaaaccaatgcaaaacaggacaaaacgaattgcacccaaaaaacagagcaggacaaaaaacagagcaggacaaaactcactcaaaaaagaaagactgactattcactcaaaaaagagagacagtattatggtggtgctttagcattaataattaagttctaagttacaattgttaattaacatatatattatcaatattctatgttttaagttttcacccatattattatatatgatcccattttaattaattttggtgattacacaacaggaaagtatatgcattgagtgttgttggtccaattccagaagagctatggactctgaccttccttt

SEQ ID NO: 393576 - DNA, 913 bp, Cannabis indica
gaatggcttgattgtcttcatataaagctagggtacacactagaaagtgaaactactcttttttgtctctcttcttctcatttcaatgtgcaggtctttggatccatctttgcataaattaagagaaatatgtagtggctaccaactaggggtgttcatctaatctaatccactctattttacttacagtgcactaagtgcgaattttatattttagattcaatctgcataataactcaaattcaatataatccaattcgtaaaaatggagatttgatcggttattttggattgattacttttaaaatatagaattatttaatatttattttgaattgagtattttaggaacacccctagccaacactacttagatgtgttatataatttttggtaaattttatatcaaattagagcatctctaaccatgctctctaaactcacatgttagctaaaatagggagtgagacttaaaaaaagtgaactctaactatacaaaaaatagttctctacaatggagaatggatagagagctctctacttttttgctaaattattttaatagtattttaaccaaaaacactattactttttaatttattttataaaattaattaatacttaaaaattttaaattataaaatattattaaaataatcaaatactagctataatatagagcatggttggagcaaaaaaaaataaaaatagctctttattattacttcttagctattttagctaaaaatatagagtacaagatgctcttaaagactacttcatgatggtgttaaacaccgctagtgtttaatatcaatacttacaaattaaatgaaggctaattaagaattttttcccctaaacttcgacatgtaccaaatcatgctccctgaactttttagtccgttaaaac

SEQ ID NO: 393577 - DNA, 918 bp, Cannabis indica
caaacttgccaaaacctatataatttagggacatgtggtacaaataaacatttttaaaatgaaaagtaaatttgaaacaaaatatacaatttagctacaaacttgtgacaataactaatattgaaatatacaaaattcctgcaaccactataactttaggttagttgacatgggatgacggtggaggtaggcttttgctgacggcttactgcatcggaaaatggtacttttttcaacgtacatgttgaatcgtcgacgaagataattttctcagaacatgttgaagcatcaacaagaataattttcttaaaaaaaattatatctcaaaaaaaattttgtcaacacatcaaaaactgtcatgaaaggatttttttgattttttttttaaattttagttataatcatacatttttttaatggaaaaagtaaatatgaaacaaaaattacaatataactgcaaacttgtgataataattaatattgaaatttaccaaattctttacaactactaaaactttgggttcgtcgtatgggatgacggggaaggtaggcttttaccgacggtttaatttgacgacaaatagtactttttttaacatacatgttgaaacgtcaatagatatctaattataattggattggattgagtgctaaaagttagattctaattaaattggatcggttattagatgtcaatcttaaaatcaaattaataaccaattcactccaattacatttatatatatatatatattaagaaataatttatatgtaaaatgaaaagacgaggacttcccaggaggtcacccatcctagtactactctcgcccaagcacgcttaactgcggagttttgatgggatccggtgcattagtgctggtatgatcgcacccgaaatgtattgtgcggaatagtcat

SEQ ID NO: 393578 - DNA, 1338 bp, Cannabis indica
caggcttggagattatttgaaaatccagactctctcctaggccggctattgaagcataggtatttctcaagaaattcattccttgaagcacatctaggacattctccttcattaacttggcaaggaattcattggggtagagaattgctactaaagggtatgagattcaaaattggaaatggttatcaagttaggagtggattagatccttggattccaggacatgatgaatttaaaccgattagctatactggaccaccatccttgccggtttctacttttattcttgacaccatggaatggaatttgcctcttcttcaggataattttgctcaaattgacgtcgatcgtatagtcacaattcccttaagtttttatcaatcacaagatcgacaaatttggcaccataacacatctggggtatatacagtaaagacgggtttccatctagcaaactctatctccgagcagaaccaggaatcatcttctgatgattttcacagctggtggaaatttttttgggctttacagttacccccgaaagtgaaaatttttgcttggaaagtcattcagcatgctttgccggtagcctcagctttgcataaaaggaaaattattgactctgcatcatgctcgagatgtaagaatgcttgggaatctattggacatgctttgttctcatgtaattttgccaaatcagtttggaagaagacccatttcacaattgattaccaacatgctcatcgaatgttaaatggggactacataattcacttggcaaaaacattgcaaaaggctgaagtggaactcttaatatgtgtgttatggtgcatctagagtgataggaataaagtcctacatggtggttcacaacgtgacccagcttctcttgtagcttttgctcataactacttaaaaatacaattctgccaaggtcaatagcagcaacaagaacacgaatgggcaacagagttcaactccacctgatctgtctcagaattacagcccctcccaacaaggaatcttgcaccagcagcaacaacattatggcaatgttaatcttccgaactcctgtcagatggatggccaccaatctgcaccaggtctgaatacacacacaagggctgagcaacttgtaagccgaactgataatcaatcttcgtggcaagctgcacaccagcatctgcaacctcccacatcagtgcaaaaccaatatcgcacttcttcgaccgctgttgctaacggtaatcgaagacaattggatgagatagtatggaagccaccagcaggtaattcccttaaaatgaatatcgatgctgcaacaaatgttcaagacaa

SEQ ID NO: 393579 - DNA, 649 bp, Cannabis indica
tagataatcaacttcccaaatggtcagttttcctgtaatatgtatatgatattacaggtattctgaagagtttggttttgtttagtggaagatttggttaacagtttccctaggcagggcccggggaatcggttcaccagttggggaatctggtttaccggtttttgggcagacccagaaccctaattttcatactcatattttaattttaggttcccaagaaggttatccgagttatttccctgtttatgtaaatgtgacataaaacctccgtttagctcatgaattttccattcaagtcggctggcacacttaaatctggaaacgagataagattagcataaaatatgtatatgtatgagtgtatgtatatgaatgcatgctaattatattattttacactaccaacaccgtaatagttgtgatacatagtgcattggtacaatgtatagtatttaagggtatgttaaggtgttaccaacattcggtgagtacatagggcatgtggtacaacacccagtagtacctgggagtacattttagccctaccaacactagtatgagagatgtacttcagtgcatgtggtatagaggtcgtacttccgttaagaatgttcttgactatttggtgagccttgtaagtaggcac

SEQ ID NO: 393580 - DNA, 853 bp, Cannabis indica
taatgcccttaggagtgagttgggtcgacctaatatggtagtaactggcgatctccttgaagtacagatgtaataacatcgtaccttgcttggtgtgaggacccaaccacgcagagtaaccctttccagggtactattgcaagctgccagggggcgggaaggaaacattcaacttgcccaaggaggccttcatcgaagagattggtcaaccttttaaaagttaggacagatggtggagaaacccatcgagctcccctcgagccacttttgtttatgggggaagcctccgtgtacacctcctctacgtagtcctgaccagcttccaagacttctcctatctcagagacaggttctcccttctcattgaagactctaaaggcagcccccgtacaactttctctccctcctttccttcttctcccttggctacggaggagtagaaggttggacctcaccctggtcctcaacttcccagatttcgacgtccctatcaacaatatcttcttcttagacttctggttgggcctattcccctctagctgcaacagccaaccgagcaatatggggatcaaaggatgaatgctttctagtagtctcctcagtttgcgccatcattttacgtctagatggaactcttttagaagtgtgcgtcacaacggtcacaacaaacttgataacagagtatcccttagtagtgggagttggataaccttcgggtaaggcatcgactataccagatcagaccctgtacgtccagttagtaggaagataatgcctccaacctttcttcagttcccaagatttaaatgcccatatccctcaccacatatttggtcgggataccagtgatgtt

SEQ ID NO: 393581 - DNA, 972 bp, Cannabis indica
ctcatttggttgaatgggctcaatttagttcctttatctatatatatgatatatatatgtattacatcatatacagatttggttttaaccacttgttggttccgagaaaataatgtaaaataagagtgaaaagtttggtttttattgatgggtttgtgttgaagtgtgttaaaatcaactcatgtggttgaatgagctcaattttagttcctttatctacatatagattatatatatcttacatcatatacagatttgatattctgagtaatttctcatttggttggattgagctcaatttagacttcaatatccactgagctatgcctatctgagtttgaatatgaagaaacaatctcttagtttgttcagctctaagatagtaagattctgtgttttttttacaatgaaattggtctctaaagttgaaaatgaaaatcaagtgaattcccattttcccttaaattggtctctgattaaacaaagttttctccttttttggtgtttatatgttgttttaagctttcctttgcctacacactatccaaatcttatgtctgtacttcattattgccttttttttttataacaagaaacaaaatgttagattcaactttgaagtggggttcctcaattgggattgttattcatatctactacttgcattatcaacaatgagtggtaatgcataaggattggggatctaagtttgttatgatatgatattaggtggcgtttggttcagtgtaattaaatggtaatagaaatagtaatgtgaatggtattatgatatttggtttattttcggaatggtaatgagaatgagtggcatattaacaaaaatatcattacttcaaattctttaggtaatagaaggttagaaaataagggtactgtaattcttaaggtgaatagcgacataagtatgtaaagttttgagttttttagtggtataaatccaatgtttatttt

SEQ ID NO: 393582 - DNA, 657 bp, Cannabis indica
cactattaatgttgtcaataaatactaacaccattacaaccacaccacgacaacccattttagatataaaatcaacacataatctatcccatattcagacacaaacaataaaatctaaaaatcaatttcaaatttaattcaatctcaaatctataacataaactcaagcctctcaaaccctaactcaaaatcaaatacattaataaattaaatttgtgactgaacacatatggaaaacacaaagattgacctctatttgcacaaaataatgaggtttcagatttgaaactagaagaaaaagctagagattttgaacagaaggtcgtactctctctttttcttgttcgccgactttaatggcagatcgagaacctctgcctcatcgtcgatatggaaaatgaacgtccaaccacatcaaagctatgtccttgtgttgtggggcttcggagccagcagaggaggaggaagccagaggaggttggagttcaacattggttgtggagaaagacgtcaggaacagaagaagaagaagaagagatgggtggtggtcggagagccgccgaggaggcctgtgctggtgatcgggactaagattgtaacaccctaactagcataggcatattacgtgatttttaaacatactatgcagctcgttgc

SEQ ID NO: 393583 - DNA, 1443 bp, Cannabis indica
ttgatgaaacaaagtgcaagatatggcttgcctttaaaaactaagtttaaaccatcaagagctgctacccctccaaaaattaaatccaaatgctagcttcaatctcttcaaccactatagaaaatactctagtataaatttttttggagggttttggtgcttttggtttgggttggccgaagagaacaaaggagaaaaagaaatactattctaagtgcttcttgtcaattctacaaaggttaatgaagtttatcttcattttatttaacagatcactaaaatacttttgttagaattataagatgcatgaggttcatctcaaaatcaattggcaatgggaggagcagctcatgtatcttatatatggtgttatatttctacaccttagcaatgtgggactctaacatctcccctcaagatgttggctagtttttgctcaccaatcttgcacgactcgatcacaaatgactcttttagttcacagtgacttttttttttggaccgatttttggatttagatcagttactcgttagagttttagtttagttctgataccatgttagaattataaaatgcatggagttatacctcaaaactaattgaaaatatgagtagcctatacatcttatatatggtgttatatttctacaccttagtaatgtggaactctaactgccccctcaagctaacatctccatgataaatatgttaagggcataattatcttttctaaattaacccacactaacaaatatttttaagttttcattaactaataatccacgataccactaaattgccaaaataataccgatgtgacttttattccaatccgttaaatttttactattatccataattatcacatttaataatctaactcatatacatatgatagacataaattgtacattttctaaattaaatatttatatcataattacctattttctataaatgggtatttatctataattgcagatattatttcatacttaattttaattctaattaattattaattttttatatttaatatgcggtcattatacaagtaatcttagtattgttagtatttatatttctttatatttttcttttggttttctcactggttcgatgcaattagcgatcttacagatctaactttgggacttatatataattcttttgtttgttttcacagtaatagagttttgacagtgtaaagtcattttttagcaagttagttgacaaaatattttttcatttgtagtaagattgtttcgcattcatacccgatttcttaccttgtttattcggttttagttgctcttttatttcttaggaaagttgcacttttcagctggactttcctttgtttggaaacttcttgtaagagaagcaattctcttatgaaaagttgtcttttttaaggaaactttgattattgccttttcctt

SEQ ID NO: 393584 - DNA, 1209 bp, Cannabis indica
gacatttcttaaggttgccagtcgatctccacaagctggtgaaatgacagtcaacattttcagctttttaaccatagaagtgctagatatgaaagtgtgcttaacagaattgccatgtgtataaaaacatgtgagcatgttcacaagttgaaattgagttttattttattagaatgcattacatatttttgcatcaagaagcaaaaggattcttactgtagtttcatcccctggtgttctggtttcttttgaagttgcttcaacacttctaccttaggactgaaaaccaaattcaaagtcagaaagaaatctctgacccggtacccaagccataggaacaagtccaagcaagcatacaggaaaagaaaattaattaggttctagcactgacccggtacccaagccaaatatcctttctggaggtattgttactccagctagttcccgcaataaagcatcagcaaagcgcccctggaagaggcaaaacagtgggaggagtcaagtgttcagcaaatgacaaagactcaaaatgttagaagaagatgcatcttattctcaaccgtttaaatgctaagttgagctcttaaaacttcatcaaattttccgtgttctctatagtataccatgtaagaaagactaatttaaatatcaatagggggcacacctgttttgttgtgacaataaaaatccttgagctagcaaattttagggcatcaggaacacctggatagaatctgtaattaacgcattaatatcatatgatcagtagcacatttaccccttctgaaaatttaagtatacttaaagcaatatgaatccacccatatcaagagactgaaaatcttaaagcaatatgaattcacccatatcaagagacaagaatgatgcatctttataatttagtttgtttcacaaaagaaacacatggaaaattgagatcactgaatcacctccaactatctaattcacttttccaaagggatgtagttagctgacaatctcaaatgaatctgcttgtggttctcaacagtttgactagatatatgcagtaaaaaagtctatcttaaacttgaaagcaagaagctccaagttcaaacagtactagtataataccatccgctttggctttaggctgtattgtgtttatctagaaggaaattagatggtggaaattcaaaaagtgtaaatgggatacctatttgcgccaat

SEQ ID NO: 393585 - DNA, 482 bp, Cannabis indica
aaatcttccatcctcttttccccaaatacctcccctgactctcaatccaggtttcagaattctttgcttttgaatggtgaaggtttcattagcaaatatcttggggttcctcactgtgttggcagagttaaaaatcctgtcttccactaccttatccagaaagtttcatctaaacttaatgtctggaacgaaaaaacttttctctcgggctggcaaagaaactctcatcaaatccgtcattcaggcaatcccctcttttgcaatgtcttgctttagactcctaaatccacttgtgctaccattcaaagtctgacctcaaaattctggtggggtactacttctgacaagaggaaaattcactggagaaattggtcagccctttctgcatccaaattcattggaggcctgggattttgttctctaatctctcataatcaagctcttctggctaagcaggcttggcggatcttgtctaatcctga

SEQ ID NO: 393586 - DNA, 942 bp, Cannabis indica
ttttatttttatataaataatttaatggtatttacattataaattttcaaaatcagacctaaattgtaatagtaattttactactattaagtttttagtgaaattgtgccacaaatgttattaatataattaaatatcaaattttatttattttaattaataattattgcacgaatacaaatatcacttaccaaatcattcgaaagtcgcctcatatcgtaatgtttcttttcttttcttttttttttgttaagaatcttgtattgtaatattaagagtattattatttgacactctgagatgtctaatgttatactgatgtgtcattctattattggttagtagttcctcatattatttattaaattaaaatatatgggacctgatattaaaatatactaataatagtatgtcacgtattgtgatgcttagtaccttaaggtgtcatttcacatttctctaatattaaataccaacgagtattgctatgaaacactaagatgcctaccaccagtatagaatgacaacatataattacttagtgattctctctaatttttattaaattaaaataagtgagatccgatattgaattacaccaataacaattcctcacaagcagggccagtcctaaaatttagtgagtcataagaaaaaattatttttgggcccttatttagaataaaatgtaatatttttcaaaattggtaaaataaaatgtgtaattttaaaaagaaatttttttggtctcatggccgatcttaatgtatatgggaaagtaaaatcaaatttcaggacccctatatatagtttaattattataaaaatgatagttttagagctttaatgtaataataaaatttttaaaaacttttaagagctttaaggttcaatcttttatagctacacaataaatattttttaaaaaattagaaaagtaaa

SEQ ID NO: 393587 - DNA, 503 bp, Cannabis indica
tcataaatggtattatctgaaggtcaattgactctgaagtctacaattgaagaaagctacaaatctatttttttagaaatctaaaattgctaaaaggtttggccggtttaacccgatcaaaccgaccaaaccgttagtcgatttgcaatgaacatgctatcagtttcaatctctacatttttttcacttcttgtgtttggcccaagtaagaccttttatacccatgcacgacttcaataactttcactagataaagacttccatgatactcgaccttgatgttcagaagtctatcagaactatttcgagctataatctcaaatccataggaagttttcttatcaaataaggcagcatcaatcttgatgttattactgttcgattttatccaaaactcaattttatcatcaatgttttcgagatataaagatgatagagtagtttatcctgaacttttctccaatgatcaagagttgcacttgctgatataagccatattttaa

SEQ ID NO: 393588 - DNA, 888 bp, Cannabis indica
aaccgcacacaccacatcctcatgagcttattaattacccgtaattaattcataagccaattccaactaattaaagtttgttacattaatattatatgatcgtacatatataaatcattaattcactactataaaaaattcatttcatctgtccattaacctcataagttttttactgtcaattttgtgttcagcatgatatacatattagggacatgaaagtagtacttttcatgtccaataatactgtacatgatttattattcatatcgagcaatgctgaacgtgaaagtataacctcaatttctggacgtacattactttttcttttatattttttaaacataaatattaaatatgtatagtaacataaattttcgtaagaaataatatattttcagatttaatataataattcattcaaattatatcaaatctaacactatcacactcgtaaaatgatttttttttaacattttacaatatacaaagatacaattgaacattatctaaaaaaaaatacacagatgaaaaacaaataataaatattaatattgcacgtacctaaatataaaccaaaaaaatataataataattaaaaaataaaaataaaactaagaataccagaggttctccaatggcggagagaggtggagcagccgtcgcccatgaatgtgccatcgaaccctgcacaaatcacagagagagtgagggagaagtcaagataacaaatcaaaatagaggtagctagagatagggaactgactcatttctcatgcactatcgctgtcgtacgtggcaaactccttccttggtcggagttggatcaagagacagtgagagcaaacgagccacgaaccacaaacacacacagagagagagagagag

SEQ ID NO: 393589 - DNA, 1167 bp, Cannabis indica
aagttcttatcgaacctataatgacatatggcagcggtgtggcctggtttatgacatacttgacataacaatcgaggaattgaaggagggccagatctgggatttcttggtggtggtctggggttgaaggaacctctattctgagagccataatatcgatttggaggtgctggaccatgtcttgaattgttaatgctaagattagcagacatcttgggagagaaatcaagaactgtatggtgcctttcaattctgctttcatgagttagtaacaatgattgaatggactcaaaagagaggttatcaacaagactagtgacatgtaccactacagggtcatattctggccctaaaccattgagtaaatgcatgattaaatcacttttctcaattggatgaccagctgtagagagagagtcagctaacaattttactttgtcataatagtcagatatggaaagattacccttctgaattgtcgaaagctgggatttgatctgaagaagacgagccttggactgactggaaaaacgttgagccagagcacgccaagcttcgaaggatgattcgtgatgagcaagagaaccaagaatcgtttcggacattgaggagcgtaaccaactgagcagtagctgatcttttcttttccaggccgtaaattcggggttgataacaccattgacaagacgctcaacaggagcaacgccggtgagaaggatgtcatcgagcccatgtccgatgactgtagggatcacctgcgatttccaagcaaggtattgttgcgatctaatcgaacagtgagagaggaatttagagattttgaaatggattccactggtgtggaagaggagcagtggtggaggagtgagcggaggtattctctgggtgcctaggatccattatcgacgcaagtcaagggcttcctgataccatgaaagagtggcttatcaatacaattcctatctggaacaattaaaactgaacacaaagaattgtaaaagctctgtagaattgagagctgaaccgtccattatataggcaaggaaagtacaagagtttgtacaagaacagaaaaaacaaactctgttaaagaaacagaggcaagtggatagaaataacaaactaactctaacagtaaaataactaactaaactgaaggagaaagtt

SEQ ID NO: 393590 - DNA, 960 bp, Cannabis indica
tgtttggctctattccttcacattatcacaatcaaaacataccataaaaacccttgaccaaaaaaagaacaaaagaacaaaatacaacacatcaagcacatatagacctatgtgtcttcgaaagtcagagaatactataattaccatgaaaaaattaaagaaaattacaacatcaaattgacgtcttcgttttgatatctcaaaagtcaaccgaatcaatgactcagattctaattctataatccaaaagtgtgtcccatcgcccaaactcaaactgatatttgactcatttaaaatagtgatgatggaacgtatcaatacaggtcctacgagtctaggagtgcccttattagtttattttgccatggaaactaattaagaaattataggatatatattagattatgtttaaacaagatgattcacggtcatcaatcgtcctgtttaaatgtaagcatatgtaattttctctactattatatactaaaaggtaaaatttagaaaaaataaaaataatagttgacaaaaaattatgaaaaaaagcaaaataataacaaaaaaagattaatcctatatgtatgctctacacgattatatattagaaaaatttcaaaaaataaataagagaaaaattgaagaaaaaataggagaaaaatagtaaaaaaaatgtacagaaaatcgacaaaagtattaataatttgtccaaatatgatataaaaaaatacacacactcacatagaaaatttttacctatgcgcaacaagtaaacaaaacttacgaagttatgtataattgaacaaaaagttaattctaatagatatgtacatattaataagaaaaatgctaaggaatgtgctaaatactataaatggtaacatatagttattagttcatttcaatatcaagtctcataaattattaagtgtcatgtgttagaaaaattaataataaacccaagat

SEQ ID NO: 393591 - DNA, 747 bp, Cannabis indica
cttatttctatctctagtactgtagttgaacagtggaatgaggagagagaatagggtttacaattaatatatatatagttttgtaatattagttgaaaagattcatcttcacatctctatatagaaaaatttgctttttatgtattcattgctactaatatttatacaatacacaaactatagctactatacttgttttatcttttatcataattatttgatacatatatatttgaaaaattctaccatttactttgtaagaggggtttattgatattactttttattctttttggtatttaaatgtaattttttaattcaatttttttataattgtctatattaatatagttgtttagaaattatataaaattttgaaaaattaaaaaaaaattaaaactccgaaaataggattcacacagcctgtttcatatgtgtataaaatataagagtcttgcgaataacaaattctttgagctctagttttgacgtgttaattttttaatttttttaaaatattacaaaatatcttaaatatttaaatataaatgactataaaaaaaattaaacaataaaaattctcttcaatgtcgaaacaatagtgcattggtaagggttcattgaatcacccaatatattgtgtctaatttaaaatgagtatgaacgtggttcatgtgtccttaattttacacatttttgtttttttaaaaataatctaagacaataagtatattggagggaaaaatt

SEQ ID NO: 393592 - DNA, 1339 bp, Cannabis indica
agtatttagttcatcaattgtaacaaagatacaaaaattttaagtatgaatttgagcccatataaaaaaataggttggtctatttaacaaaaatgggtcaacccgaataaatcactatacgaatctgagcacggtacgaaattaccagacttacgagacgtgtcgggtctaccctataaaataattatttttagtaaatatttatatgttaaatattgtatatcttaaatattaagatgaaaatataaattgagaatgagataggagaatattaaaataaaagtttagaaattaggttctaaaaaatttgttagtaagatataattgattatacataatgtatatggaactttttttttatgtaaatataagataagaaaaaaaaaataactcttttgtttatttttctatttgcatattaaatttaatttattttttcattcctattcatgtatttttagttttttactagctagtaactaatatttagttacaattagtagagcacttgcaacaattgagttataatagttaaaagctaaaaaaaatagctaagagcttaaaattgagctccaccaaatgctaacccttagctattatgcctcatcccaaacttcaagaatttttctcatgaatagtgaagtggtaaaatatattatatatatatatatatatatatttttctctctttcattccattaattacttttttaattacttttttactcattttcatatttctctttgttttaattaatataatatatataaagatgtaatatttaaatgatataaagaaaaatatagagaaactgatatatagtgtaatgtaaatgtgtgaagtaaattagaaaaaaataaaattttggcgagatattttaaaaaaataaagtagagaagctgttgggagtcctctaactagttattaatttttatttgtattcatatatttttattactatctaattactaactttactaactacttactcattagtaaaaagtactaatttaactagttactcataaatgatataactagtaagtaattaaataattaaaattttaattttatagtatttcttatattgtaggttgtaagatcaatttgcaaggatctgatttatttggtgttgatctgtttttagccaggatgtatgcattcactaacttttgtcattaattaattatcaatgcttagaagaatttaaatatcttaaatatttatccgtagtgaaatagtttctacgatatgttatattgcggtcgaatgggtagaataatatgcatgttggaagagtttgaatatcttaaatattcatccgtagtgaagtaggtt

SEQ ID NO: 393593 - DNA, 762 bp, Cannabis indica
aacacttacgttctagtctctctctaactcttctcatacttcttgtatagtatactaccgaatttctaaaacctctgcttgaatatgaaaatgagtcccccttttataggttttgaacatagggtagatgatgtcataataccccgagcaatgtgagactgaggggaattgatttagtgaacaaggatgatttcaattaacatcttaaattcattttttagaattcgtttggttgattgtgtatgaaattatatagttgcattttaattatttaagtaatatttaatcataatcacaaaaatatacattatttgctataatttttaaagtaacttgtaagcttctcacaacattttcttactcatggttttctcttatcactttcactctcatcatttctcacatcacatttttcatcattttttttagtttatctcttacattactttatctcattatttattacttatttttaacaatatcttctatttgtaaatgcatgtattgatatttttgaatagcaaattttctaaaaaaataattttcttttactaaatataaaattattttcataaaaatatttatattatactatttagcacattgtttttatgttactttcgtagggctccctataaaatatgagccctaaaaatataactaagaaaaacagctaatgtaatccatgaaaatattgaaaattttgtgtataaataaaaagagtttttacattacatattcttcttttcaataataccatat

SEQ ID NO: 393594 - DNA, 738 bp, Cannabis indica
agagagtaagagagaacagaggtgaaatgttgaatgttcatctagtctatcgagatgtaaagaaatgttgaatcttaagcagatagacctgaggctgggcttttgtttggattatttagtacaaaaaatattttgtgctgatcattgttgtcacatatgattggattttgttagaaaatttaggcttggacatgtaactaactattatgattattatttgttttattttcctttctgaaaccagaaactggattagtcctactcatgttcccaaaaatttaagtcactgagtgagagagggatttgaaaaagaaagagggcatggactcgaactcaatatagtttaagttattagttaattgtaataacactctagaaaaagaaaaatgtttggcttggagatgtgttttcatacaagttaaagaacagagatggtacatgtcaaatgcccaacttttgttcaatcttaagtgtttgaggaataatcatgtgtaatattgatttgaaatttgactccaaatatatacactagtgttatatatttagaatatttaacactagtgtacccgaaatttttgtggatgtatgtattttagaaagtgatatatagccaaataaaaaaaaagtgacattattgtaaatttatcttgaagcaagaggtaaccaagttacattatatagtagaaacttttactaaaagaggatattgatgtaaaatcaaaagagaagaaaaagttg

SEQ ID NO: 393595 - DNA, 1098 bp, Cannabis indica
taaaaagtgatgggtaccataatgctcagtagtaatactttaagttatataagatttgatatttaattataccaataacaatattatatgttgcatactgcatagtactaaacactactaatttacagcagttgtagccagaaaccatcttggaaaggtggtttgggttcaaacagctagagttgtttttctgatgtgctgcgcggggaagtggcggcctgctgtttggccatttttgcagcgttggatttagaagccaagtttgttattgtggagagcgactcgagggtagttatcagtatactcttaatgggaaggagactcattggactattgaaaactatgtctctttttataattagttactctcatttgtttactagtatatataaatataagaccctgatgtactcacgttgcgtgactggtcctcatctcagttatagccattagaatggctcagtttgatatcctagggcttttaataaatagaattaaataatattttattaatttttttattattttaaatttatctttcacgtgaaaccgagagtaaccggttaaattatttctatttttgtgctaagtctttgaataatataattgtttcttggataaaacaatagctattaaataataatttttgtttgacgtccctaataaaattaaaaaagtttctgtcttttcagatattctccctttctctctctctcatagagttttcttttgacagattataacttggttgaaattatccaacaaacaacaatgactacatcactcatttccctccatttcttgcctgagagactttgctgagagccagacaaacgaaggaggaggaaagaggaaaaagagaaaaaatctctctcattgagctttcattcaaaacacaaaacccactgaaattatctttcttgcttcactcaaaaaaattcccaaaagtttcactcgataaaaatctcaaaatccatcacttatttattcactcaaagatttcattacaataaaaaaaaatactgaaacaatcaaatcccaaaactttagtttaaagatgttggaactttgtatgaaatatgtaaaaatagaaaagtg

SEQ ID NO: 393596 - DNA, 536 bp, Cannabis indica
ttttgccaccatttacccttaaaattattattatcatcgtatctatctagcttataaatcattcaaatttgttgttattgtagcttactttcgacactacattcaaaacacttgttatcactagtattaaagactgatcaagggttatcaaaatgaatataagaagaaaaaattatttgaactaattatatataaaaatattataaatttttaactcgtactataattattctatcaaataaaagaatatataagaacaattagaattgttaattgaaatatatattattaatgttgaaaaaaaaaacatatatattttaatcttataaaaaaacatataaatgatttataaatgttcccaattgttaattctatttttgaaatatttaattgacaaaaatattttattatttcctattaatttcggctggtatgtgtttaatatggtttcctattttgtgtattcaaacttgtaagaaagttgtctagctttcttatttttggaaaaaggtaaaaatggtaagtttggttaccca

SEQ ID NO: 393597 - DNA, 698 bp, Cannabis indica
tttcaaattattttaaatgaaaaatatcataaggacaataatttatcgatacgttgtatttttaattagtaaacagatctgttaaaaaagaagattaacagacttacgaaaatagtgaatgtttgggggaaaaaatcaaatttggaaataaaaggcccacgttaaaaggcccatcaacataaatacatctaggcccaagattatatagggaggcccaactcggtataagcaagctattgatcctagttgccaatccataagggagcactacggacaaaaagaaggaaaacggtaaacaacaagaaacaagtaaagagagcgccgacggaaacagaaggaagaacgggagggaatacgtaatcgacggatcgaagatcaactataagtgaaataatagaccaaaacccgatgaggcacccagataccttgccgacggaggaagtacctgaaacacaacaaaagggggaccgaggtaacactaccgacggaataaaagcccccgacggaggagaactcggatcccctcagacgagaaccccgacaaaaatagggggcctagagcataaagtaagaaattgataatttcaagaatgtgatgccgatggacacgacaccgttggatttagggagaataatagcattaaaacccactaaaggcacagacacgtgtaacacgggagttatttattagaatacaa

SEQ ID NO: 393598 - DNA, 875 bp, Cannabis indica
gttttacagatgacttgctaaatgaaattctgattcgactcccagattccaaaaccatagccaggtgtggactcgtttgcaggcattggtgtgaattaattcactctcaacatttcaaacgcatagtaactcatcatcatatccaccaacgacatctactcctacattcacttctcataaaattatataaagataattctcttatacaaacaacaaaaaacacgtctcacaacattctctacaaaaatcttaaaattgagtccacttttgatgatctattactaatcaaaggagaaacagatgggttttatatatccaatcccctcacacaccaatcgttcaaactccccaaacctccacatcttttatgcttcgtactatctatacgagtggattagttttgtaccctttgttggatcgatttcgagtggtactgttaacaatagcatcagtcacagtatattgttctgagactggacaatggacgatgagagaggatattgctgaaacattaccagagttaaatcaaagagaaacgtttcaaaatatttcggtgagaagggtaatagatgaaccaccagtagctgtcaatggaagattgtattggacattgtttggaatggtgagaggagttagaggagttgttagttttgatcctttaaacataaaatttcgttttattaaattgccttatgtgattggaagtaataattacgatattgaccaattcttgcaattgagtgtttcaagtgctcgtattggggtggttaatgggaggttgcgtttggcaagatcttatccacttgccaatatgtccatctacactgttttgaaagtttgggaattagtgaatgatgatgatattaatgaggtag

SEQ ID NO: 393599 - DNA, 448 bp, Cannabis indica
ttttttttgtagggagttactttcatcataagaaaatattttgattgaggaagaaaaaaaaatcattatttacttaaaagcgtactggatctctagttacatagtcactagattattggaataggaacaaaaacattttctttgggtaaaatttgacaagttaaaagagactactattcgtcctccatgcatgactcgacttcatattcttcagggtcttcttccagatctttttttgggtgttcctccaagtctatttctatttctacatcagttggaattggtgctggcatgttctcagattcagagtctgactcatcaatttctacttcaaaatgataatcaggtattgttaaattgtgtgccctaaataaaacccattttaatataatcagatttactaataaagatcagaaattgcattttatgttgcatggtacacatgatt

SEQ ID NO: 393600 - DNA, 2015 bp, Cannabis indica
taaactcgttgattagcaacgagttgtacagttaatataaaatcatgataacatgcctaaactgtaaggtgttacaattgggtatcagagccgccaggttgtcttctgaagattgtcatgacaggtacaatcttcataagagagaagcttgactcatggttcactaagcctttattgctttagtagtttattttatcagtatgtcataagaaaagcctgataggaagcatattaatagtctgatagttgaataggcgaagattttaatttctaaaataagcgataattagtaacttattcttgaccgcaatctgacaaggctagttcttagtttcgtgggctgttctattagaatgaatgccaggcagaacgtgagtggctagggtaacttggtctggtccagtgacggtcagggagtcagttttcctcgaatagatgtggcagagatagaggcctaagaggcagagcacgcggtcggggagatgttaacccaccgtaggtttcccaggattgggaaaacaggtttgtagctatgcaagctagaattaataaataagataatgagatcagacacctgagacaggaagggtcggttgctgttaagaaccgaatggaaccattgtacagaatgttcggcaagcaggcatctttagtcttttttgggaggtcccgatgtgatgaaagtcgaacagtggctagcggttattacatggattctaaactttataggtgtcactggcagcaacagagtggcttatgccacattcaaattttaggaagacgttggttggacatggtggctctgagtcgggatgttactaccattacctaggaagagtttcaggaattgtttaatgcaaagtattacaacaaggtagtcaaaagtgcaaagagaaaagaatttacccaactcactcagaaggagaatatgaccattatcgaatatacaactttgttcgatagattggctaggttggcctcagaaattatgccaaccaactttaataagaaagagaagtatccggatggactgaaccctaagattaaacacaacctatgctgatatggtgggaaaagtactgcgagctgagggcgtagttgagtgcatctaggagtcccgagggactcaggttgttggtgcagccacaactcctcctacctctagttatggtaggggtgttagtgactcgaccgctgctcaaaaaagaaaggcaccatttgcacccgatggctcaaatcagaataagaggtttcgagggaaccaagatcgaggcaactgtcagggtggttcagaaacctagtatacttaactagaatgtcccaactgtaagaaacatcatctgggtgagtataaaggaaaagcatgtgttcggtgtgggtttccttgtcactataagagggattgcccgcagctcaagaaagaagaacagaagacagcaacaaagcccgctttagtaagggtgtttgctcttactcaggttgatacagaagctagcccctcagttattacaggtcagctctcgctcaacaaattttgtttctctgtattgtttgactctggggccactcattcctatgtggcagccataatttttgataaattgggtagaccgtacgataaagggtttggaaccctactacctagtgaataattagttatctccaataggtgggttaggtctatgccaatcaacattgaggatagagagttgagagctgatttagtgaaattggacttagcgtatttcgatattatacttggaatagatttcttgtccaagtattcaattagtattgattgtaagtggaagatggttatattccaacctgagggtgaggaaccgtttgtatttgtgggatcagttcagggatcccgaattccagtagtctcagtattgaaagctagagaattattactagatggatgtctagggttttgggcagtggtattggataccacacggcctgaacatagtcggccagccgatgttagagtggatcaggaatttttagat

SEQ ID NO: 393601 - DNA, 784 bp, Cannabis indica
ctttctctttctttttctttcttatcctttttctttcaagtcatctcctctctctctcgatctcctctctgcggctctcttagtcttgatctagtgttttcaaaacccttgggcaaccaccacatgccactttggcagttttccgaccaccccaaggctctcgtgatctcctctctctcttaatctcgatctcctctctctttccctcttagtcccgattcagggttttcaaaacccttgggcagccacaacaggccacctcacaagctctcgtgatctcctctctttctttcagtcccagtctagagttttcaaaaaattgggcagccaccataggccacctcgacagttttttgacaacccccaagccacctcgaggttctctccccctcagtgctctcgtaactcatcttctctcctcatttctcttatcatatattgcagtaaaatattgtttcattagatctaggtcgagagggaggcgatttacagattttcaccatcctattttggtttaagaaactgctttttaatgttttgtgattttgcattttgttttctgtttcaggtgagctttgattggatttctgtggtggtggttttggtgaggtgctggtggttttggttaggtgatagtggtttcttggggagagagaagagagagagttgtaaatggaaaaaaaaaattgaaaagaaaaagaaagaaagaaaaaaaaagaaattatttttaattacaatttttttaattttaataaattaattttattttgatttttaatttttt

SEQ ID NO: 393602 - DNA, 794 bp, Cannabis indica
aaaaaagtatttctttaatgagaaatgttagaaggcgctacgatgtttagcaccctctaaggtgtaatatcaatatttttgtaagtgttaggtcctttaatataataatttttatgaaatattgttaactaatcgtaaggtgtcacttttaggtggtgttggacatcactagtacctactaacaatacttttttgttaattcatatgacattttgactcttttgggagaagttaagatttgtaatttcttctaaaaaaaaaatatttttgagaaattatttctaaaattagaataatttatctactttctaatttactcataatagatttttttttttatgatatccaaatattttgaaaataacacttacataaaaaaaatacaataattatccaaacattaattaaaaggagttatattttcagaaaataaaacaaaatatataaaattatggattatgaattatgcttagttttgaaaaaaaaaattattgttctaggaaaattaatgttgttggccataatttaagtaaataccatttcggaccctgtgttttgtaaaagttactgattagactatttgttttgttaaatgataaaatagaccatgtattttctaaaatagtaaaaatacaaccttagcttaatttttgacaattttttaagcgatattggcggctaaaccacctgaactttacagtttgtaacacttaaccacaaaaactaaatttttggcggctaaactacctaaaccctagttccgttttgctctgcacacctccgtccaaaaatca

SEQ ID NO: 393603 - DNA, 1014 bp, Cannabis indica
ctaacatggatgaaagttcaacgagcgtgatttagtacgtatcaaagtttgaagggcatgatttagtagatatcaaagtctggtgagcatggtttagtacataaacaatcactgtaacagtaaaattaaatgaaattagacaaaagtccttaaatctaacaatctcaatagctcaggggaatttttaacgataaaaaaaaattggtataatttttacatgttaaaattgaggaaaattattaattaaccttaaaataataatagagagtttgtactatttatacagttatttatggaattatttacacaaaataatactatgttaatttttcaaaaatattacactaaattttttttaataccgaaataaattttttgatttgttcaaaaaaaaaaaagtgtgaagaaagataagcgtcggtgagagacggtgatgtaataattagtcagtgacaaaaacagatttttaccaaacgcgagcgtggcgcgtggaagtacgcttcgccagctctacagaagatctttgtagttgttattttgtcggcttggtcagcagtgggtctcacgctattttgagagagcgtggcgtatctttgaccacttggcatggggcccacataattttcttttgcggcgttgattgtacttcgagttttggactaggatattctccaccgttaattcattttatattgagatatttgtaccaaaataatacataaaaaaaaaattaggatttttgtccttaattatctattaataactttccattatgatttaaataaagtgttaacttcctcttataattttttaattaattttaatgtccgaaaatatatggcaaaatatttttttttcaattttttttacgggagtgttcgttatacttacaacatcattcttgtaaatttttgaaacatttcgaatagtttaccgtgccgaaaatacgtttgaagtttttttaacgcgcgtggtaaattgaaatatcaagaactctattttcggtactgtaaa

SEQ ID NO: 393604 - DNA, 580 bp, Cannabis indica
aaaaaaaaaaaaaaacaacatacactacaataagatttctcaataacagcagacgaaatctatcactaacataggcggcatagtactattgcccaccgctaatatcccattgctaataaatgggcggcaaattctcgcctcttaggttcaaaagtattagcggcgagaccattccattaataataattaaaaaaaataaaaataaaatattcgcaatagcagcaagcaaaatctatcaataatataagcagtaatatttgcggcagaatccaaattccaccgataatactatgtattatttttttaattttaaaagtattagcagcagagcactattacccgctgctaatatcctaccattaataaatgggcagcaaaattctcgcttcttgaattcaaaagtattagcggcaggatctttccgctaataataattaaaaaataaaaataaaatattattttttttattagcggcgggacaaaatcggtaagctatgccactaataataatttatagggtattttacaattttgtatacattattttatttaattacaaaatatgttcaaaaaaacttat

SEQ ID NO: 393605 - DNA, 545 bp, Cannabis indica
agatggaagatttttaattgcaatttagttaatttttttaaaattagtgtgttaattatttgacgcagagaacactcgtgcaatctatgcaatcgaatacattcccaacatgaagaaatcttgttttggtcctcaccctaagaatgtcattcctttagcctgtgatatattttctaaaggtacaagtcatgcattgtattgttgctgttttttcgttcatttttctactgtaggctgccatgttgagaatcaatttcttaattaataatgcttgaagagcatgtagaatgctaccatattgaaaaagattataaataagattatgttgggatttagttttctataagatttaagttttgcaatgactataaataagtctaggctaaatattaaattatcttggaatttatttatttcaaccagtatttgacatggtcagttatatatggctttatcaagagcaaagaaaacatttacggttaaaactttgattcgaccagtcaccattgcacaacaagataagaattccacacagaaataatata

SEQ ID NO: 393606 - DNA, 1871 bp, Cannabis indica
atgttaataataacttattaggattagaattaataaaaaaaaccctttttaaatatgataaaagataagttttatttattgcaggcaataataataatagagtgactgttatatttaatttcaaattatttgtttaattaggattgttatgttagactttttcatttggaaaaaaagataaatatatttagtatttttcataaaagtattagaaataaataaatatataaaaaaaatacttatatatgacataataagggctttctagctatgtgtcactaaaccgaacttgctaaggaatctcaaagaaaaaaataatatatttaaatgtagagaaaatccaagaggaatcccactttgttaatgcatactctttacacgcgctactccacgcgccgccacatggttttggatggtggtggggttggggtttgagagagatggttaagcttattgtattttttctttctttaaacaaaaactttattgtatttttttttagtaatttgttgtgtaaatagttaattttaactctcggttatagataaatactttagtttaacttttaacagtaataatatttaacttatatttctggaacttccgtagctacctaactgttaaatggtaagtcattatccacatatatatttaaataaagtaaaaatttaatgacttggactaatcaataattgacacgtggcaattcactttacacttagagcatattcaatggtaaaactttagaggatgcttagtgaggtggacatattatatgacaaaatattgagatgctataccattgaagagaaaaggatgtcattctagaaatttgcatggatgctatgttgtggtattgatgctattcattttttttataaaaaattgaagctaaaaaactattgtagctaaaaattaagatatatattaaataataatgtgtaagatcataattatagcacttttagagagtgatatacattggagtatttttagaagtaagagtgccaaaaatgatatggaagagaaataaaataaaatattatatttttagatgacgtgtaaatttttagcatccttaaagaatgatataccattagagagaaaatgatgtcattctaaaaatttacatggatgttatgttgtaacattgggaagtactgggcgtcagttacaggcgtcagtgacatatgataagtactgggcgaagtacgggctcgtctgattagacgatgtgatatattagtgccaagttgtggcacaagctcacctgattaagtgatacaattatatgatatatatatgggtgcagggttttgtcacaggctcacctgattacatgatgaagttatgtgatatacaggtcctaggctatggcacgggcttgcctgattaggcaatacaatacaagattatcatattaaagcatcgacttgcctgattaggcaatgtgatgtaatgaagatggttactttatgaggtaatatatataatttatattttttaaatgaatatgattcctactattggtataatgattttgtattaccagatatatgtatactaatgattattcatggtagatgccagtagtgatttgaatttcatcttatgaacaatgcgtgatagtttgttttgattgtgtataaatgatatattcgaataataaactatatgattattattattgcttttcttgttgaatccttatgactcacgggtgctatgtggtgtaggtaagggcaaggaaaagttagagctgccatgaggtgactaccttttccagcaatgtacatattgaccccaccggcctgtgtgccgagttgccaggagttgttttgggctatatctattgtgtattttagttttat

SEQ ID NO: 393607 - DNA, 574 bp, Cannabis indica
aaagcattccaaccaactacaccacacactcagtggtacaattaatcagtctttcaaaaaataaaaaataattagtacttttgtataaaagaaaacctataatccttaaagatgtttaaaaatagaataaattaaatttttgcctcctaaagaaactggtaattagaaaagttagaacaatgttggggcaaaactaaaaaaaaaattacacagaaacctacggactctcatcaacttgattcttccctttcttaactttggggaggaaaatgttttaacaaaattaacctttgatttcttcttaacaagctgacgatcactttttgtggtaggcggaacaaagtctaaatatcattctcaatttgccttaaggtttgttagcaagagatttaacgtccatttttgaaagttacttcaacaatagtgaaaaggaagatgaagaccaagtaatgactatttaatagaacaaaaaacaaaatttgaaataacgtagtcaaatgatggagaaagacagttgaaaaagatgaatgaaattaatttttttttttttatcaaaaataattttgatcgtggg

SEQ ID NO: 393608 - DNA, 1187 bp, Cannabis indica
ccttgatttgtttattgaagtacttgacaactttttactggcagacatgctgctttaagttggcttggtcccttttttcttctatttcgtcaagggattttgctagcaagatgtggtttacttcttggtcatagtagaccaaaagtatgagagcagactgttggtggatcaagtcggccaagatacagaccagatggctggccaggctgagggagcattgtttggctagtttgatgaggctatggctggccagcctgtggaggtagtggttggccagattattgagcccatggtcggccagcctgctcaggccatggtccgccagccttttggagaccaggtctatggtgtagtccaagacagttcgatcccacctacactcagttggctttgcccccgacatgattgtcgtagagccttcatgcactcttgtcaatagctgttcaacttctttcttggtaacacattttagaggtggtattgggataccacgtctgtgcattaccccttctaggattggacacatattagctttccccatcatccttgctttttggcaggttttgtttggaggtatgctgctataggtgtcatccatgttggactgtcattcaacatgtctattttttttttccaaaatagagatgcttagttcttttaagaactaaatgggtaccaagtttgccttgtctatcaaggcgctgctgcctagtcgagcgagtgcatcggctatggcatcttttttggggacttgccttttagtatagcctttgggctgacttaatgtaatatcccgaaaaataaaatgatatttaaatagacatgttttattaaatatgtaattattttggtaacgaagtaagattatgatcttacttagggtaactactgagaatttattgaatgatatatatagcgtaatttattaattacggaggttatattgagattatgggtattgaggatactatttttgaaataaaaatattttatctggcccgatgaccgtgaaaatttagcattgtggttagaaatttcacgacattaatggatggattattttgagagtattcggactaggttagaattttttagaatgtcggtttaatggattagtgaaattaccaaaatgcccctagactatttttaaaatttaagtttctttgggggtaatttagtcattcttt

SEQ ID NO: 393609 - DNA, 607 bp, Cannabis indica
gaaatatttatttattaataaaaaacacaattttaattttccaccatgggcatatgcaaataacatttatgaaagaataatcttctagatttgattgacaaatggctatgatcttatattctccccaagctttaatatttgttgatgggtccattctctgaaaacaaattgtatataagttgagaatctgaatcatttgaaaattggcccttctaatatataagactatatataacactaattaatctttgaagagcttctagtttggtcctctctttttccccccactcataagattaacataagcacctatttccttttcaaaattaaatataaaacacaaatcgatttgacatttcattctagtatatcatttcatgcattaataatatttatagggtaatttgtggcataaccttcttaaatggtcatatttttgcaactaactttcaattctaaaattttggtggtaaaacctcctaaacctaagttctgttagcagttagccatttccatccattttttactgttaattgccatggtggaatgtctacgtagacacaatgtacgcgtggcacaatttaattggtccacgtaaataaatatt

SEQ ID NO: 393610 - DNA, 1614 bp, Cannabis indica
tataagttgtaattttattggtttattaaatttcttttcatggatttatattttcctaacaattcaaatgttgttacgggacactaagatgtctaacacttctataatatattattttaagatttgttagcaattctctatagtcttcattaaaataaaatatatgagacctaatattaaattatactaatatcaatattacatctcataagaatgttagacaccattagtatttttttgtaagttatcatgtgaattcctaaaatataccactggtacctagcacattcattagtgtcatactactattaattcagtagcgagtctaatataactttaaaaaataatttttaaagaatatctttaaatcaattgtgaggtgtcatctataaaaaaatgctaagcactattattgtccaataacaatactcgattatcatatacttagtactattgtacctaacttttaattataataattataatcttaccttgatagtagtgaatgtaaataaaccttttgaatattctgtcacatatctgcatacacattaatgttagtgtttgattaaggactaattacatacaaatataattatatatatttatatatatatgagtcttaagtttagatgattttacccagcaacttgattatcaaccaaccaaggactccatctatcaacaatagaaagattcatagatttgatccatgcgagggttccaaggtaggggaccaccatgtcatgatctccactgcatatcatattaacatataatataatattaacccacattttctatattcaaaataaaaatttataatgtcactattttatataaatgtctaattagttagatcattaattattagagtacctgtatattagagctctataacctcttgagttgagttgcttatgataactaacaacactatccacatcttttgcgtaaggtaatgaccgattgcatcttatccatatctgtatcgtttcctatccattttcacaatcaaaaccaaagaaattaaccactatatatatattaatctaaaccgacagcatatattttaatggcattttattctctcattatctataataagaataatttcttactttctgaatatggagtgcctcttgaacagtcttgtcatttgcccaataatacactagtagatttttataagtctgaaaccatctttgttaattagaaacgactatatacacatatatatgtatctaacaagaatttttttaattagaaaaatggattgaaaggtagcataagagagtttacccaacatccaaatttggaagcttcaggtggtggaggtagattcttgatattaaggtctagttgaatcaaatttggtttgagtgacttttctaagagtgatctttggctatgcaacttatcattattaagaaaagttgagcaattggactccaagatatgtggaagatttatattttcaatgcactacaaaataatcaaaaaatggttattctctgaaagatatatgaactataactaaataaagatatatagaaatatttttatattttaaaaaatatatatatatttcttttgcatttttacaaaaattca

SEQ ID NO: 393611 - DNA, 924 bp, Cannabis indica
ctacacacacatatacatatataatactcacacttaagcacacacatatacaattatctatggtaatcaaaattaaaataaaatatatgtgtgtaaagatatatgtacacatttatacatacatatatatttaaaaaatctaattacacaatctaaaaatctatatatgcatttatacacaaaaatatatatacctaaaaaaaattatatttttaaaaaattaaaatttagaacattaagagcactcccaatatatgaggtataataggtaaaaagttaaattatgcctcaaaactctaaaagtagccttttcaataaatcagctataatacctcaaaattttatctcataaatagtgcatctccatatttagttaaggcttacctattagctatttttttttgttgttttttttctttttgtttcacatcatctatattctataaatacattaaataaattaaattaataaaatatattaacaaatataatatttaaattgtataaagagaaaatagaataattgatgtatgatattatgtaaaagtaaaaggtaaaatagataaagtagagtttttgtattctatttgaaatgatagagtagagaagctattgggagtgctctaaaatctatctaatattaataacaaaattagtggctggaagtgcgcacgtaggtggccgaaggtgaaaacaaaggtgagcaagtgggtgcccggagtaatttttttttttgtaatatacatatggactgagagagagagagagatagagacagtggtggggatggggtggggaaggtggcgaggatgacttttagggtggtggggtggtggaaggtggtggaggatgctaaatgagagagagagagagagagagagagagagagagagagagagagagagagagagagagagagagaga

SEQ ID NO: 393612 - DNA, 1357 bp, Cannabis indica
tatattttttatgatttttactctgtaacagtggaaaatacgccagataaccggtagagttacatgggtaagtttagaaccttttatttagtaaggtattcatatgttgatatttggagtatcaaggttaggctgggttatagttttggaccactttacccttatacctatatgttgcttaagtttaaagcaagaggtaaaattagaatttgcccttttattaagattttgtcttgcagtggagttagtggaaactcccaagttttattttatgctggtggtatgatctagtttattaagaaaatagaaaaagagaaagtaggagaaaaaccaaaaagttatctcattctctctcgctctctttcactttcattgatccctagaagaaccaagaaaaatcaaggttaggcttccatattcaagtcattttcaataaggatttgaggagaaaccttaagctaagattaaaggtaacctttagatactttaatattccttgttatttttgaagttttaagcttggttctcttttgtaattttaagaatttgggggtttagtttatttgaggttgtattgtgttagagacgattttaaagcttgattttcgttgtttatatatagcttatttttgctcaaccatggtgaatttcattgcatattgttttagatgcttttgagttgtgggttatgtttagattactccgaattgctattctggaaagtttgatagcatttgattagattgggaggtagtttttgaggattaaaagttgagaatttttgaacccttactgtccaggaaaaagcttccacaattggaggagcttccatgatcgaaaagcttccaagattgggcacgattggaaagtttccaagattcgagagcttcacgattagagagcttctaggattggagagcttcttggattggagagcttccatgatcggaggagcttccatgagcggagagcttccatgatcagaggagcttccatgagcagagaccttccatgatcggaggagcttccatgataggaggagcttccatgatcaaaggagcttccataagcggagagattccatgatcaaaggagcttccatgatcaaaggtgttgaccaaaagtcattcactcatttattttgatgataaacaaatatttgattattatttgttactaatcttttcttgatcattttgcaagcaagttcacagagtatctatatttgctcggtaaagtcaaacataatcaaagaagtagattcaacaagtatataaactacttcatacttcataagagcaaaagattcatcaagggatcaacaactcaagaccctattcaaaagaggtcttcaaaa

SEQ ID NO: 393613 - DNA, 595 bp, Cannabis indica
aaaaacttgactaaaataaatcattaaaaattgacatcataagggcagtaaaaggtgtttcttgggattcctatcataaaatttttacaaaggaactatataagatgacaccttaaaaacataaaactaaaacacatgatagatacagcccaaaacaactcatagcaacctggaacgcagggcggtgaggtcaatatgtacattattggaggagattgtcttctcatggatgctctaactttcccttgtccttacctacaccactaagcacccgtgagttacataaactcaataagaaaagtaataaagatgggtacattaaataattaattatacctttcattatcataaaatgattaaaccataacattcaacaatagataatataaccagccatatgcatagaaaaagatatgctcatatattttcattgcctaatcaggcaatctcgtgtcataatgtagtatcatatataatagcattgccataaaatttgatagtagataatataaccagtcataagcatagaaatagatatgctcatatattttcattacctaatcaggcaagcccgtgtcataatgcagtatcatat

SEQ ID NO: 393614 - DNA, 586 bp, Cannabis indica
ggctaagagcaatattctttctccagctatttaaatctccttcctagacagaaaaagctaccatatatagcaaagcatatgcctatgtcttttttctgggttaggacatttgtctttgtctctacacactttaacctatgtacaaaacatgtactcgtgtgtgttcaatatttaatagttatatatgtatttcttagagtaatgtatacatatttctttttcagatagcagaaagatatacttataattagtagtatactgtatacatatgttttaatattttccaccatcgaaatttcatttttagcataaacatgtgtacgtttgtttatgaaggcatttataggtaaatttgactgaaaatttaactgtttcttgacttatattatcattctatctaatatgaaagaatcctatgtagaattatatttggcgagtaattaaaaaagagatataatataaataattaataatgataattgaaagggcaaacatacccccactcttccatacagcctgattaatacaataatatgtatactactatagaaagcaaaataaagagttttttaatgaagtgacaaac

SEQ ID NO: 393615 - DNA, 612 bp, Cannabis indica
ttaaaatagaatcggttctacaattaaatgactaaaataaataacatacaataactcagaaaccaattataattaaaaaaagaatcaattcctaaaatactgatacataaattaaaatagaactaaatctacaataaaatgagtaaaatcaaataatacataataatttaaaaaattatttttaattaaaaaataagaaagaatcagttccaacaaaacttagataaaattaaatagttacggttccacaactaacaataatccattttccactattatatttcacttcatcaacatattatttgtctaccacatgaaaatttaatattttaataaaggcatctatctatacaaattaaacagtcataggttactcaaatttagttaacaccttagatatactgtcattttagaaaccatataatatttgtgcatttatatttaccgaaaatctacatgaaatagaacaataatattagaaaagaatttctattgggctagtaacattagagacacttatgacacgtttactaaactgtaattggaattagaataatcaatggaaaaaataaatcgggttaaaatataaaataatcgaaaacaatattttat

SEQ ID NO: 393616 - DNA, 659 bp, Cannabis indica
tacatattagttctgttttcctaggattttgtcaaatattggaaataagtttcaataaatgtgatacaaattttctttcgatattttctttagttagttgttccttcaagaaattagagaccaaatattaccagctgtgatccagaatttaccactatactgttatctacactctcggacatcagcagtacaatatttattttattatctttatgttaaacaaaacaaacgataaatattcctctccaaaaacgtaaaggcaaataaaagcaaaggagacacatattattaattctcatgtgttataattaatatttgattagagataaacgtgtggtccattgaaaccacaaatttatttattaagtgacttttcatgaaaggaatctgtcaaaatccaacaagagtattgagatttagccaattcttttcctcattatctgccattttagccatctctaactcaaaccaattcaaaaaattttctttttatgaatatcttttcccctcagataatgtatataaaaatgtttgaagagcgaaaaaaaaaagagaatgacttattggctttgcttgttacttgatcactaggatgaaaattctgttgaaagtgattcattgtgtcggtgcccatataaatatatttataaaagaaatat

SEQ ID NO: 393617 - DNA, 876 bp, Cannabis indica
gattatactcctccctagcttcatgttcagctctaataatgagctcttgatttaaagggtctttatgaagggaagcttgactttcttgtagcttgatttttgctgagctaataaaagcttgcgttattattttttaaaaaaaaaaaaaaatataatttaaaatattttgatattttataataagtattataattgcctttaaatattaattaatatttgattaaaacataactaaataaaaaagcaggattgacacatataataaaatagtatcccgatcgaatttttataaaaggatgttcgaatcgtaatgttagtaactaacactacaacatttatcgttattagaagcaaagagctccaccaataataatccctcagtccatcaggaaagagtaatagcggcgagaccctttgctattaacccctaggtaatacttgctactagcggcgaactgatatcccgccactataatagtgtgagattcataactagctagtcactattattagtggcaggtcagtctgcctataatcgttttgtttttattttcttaatataaattaatatctattttttcttgtgaataacaatagaaattaatattaaatatattaaaaatatctatatataatataaaggaaagtacaagaagagtttatgtgtcattttataaaattttcttcttatttttcctaatttctaacacattttcttattttgttcgaaaactaaaccacacaaacaaactaaaagtcccacattgtttaaaaactgtttaggttttatctatgtaggttataaataatattcttattacaatactttcctttgtctaaaaaatattattttttttatgggtgattgattaattt

SEQ ID NO: 393618 - DNA, 519 bp, Cannabis indica
ttattttattgtactcataaaaaaaacatacttgatttacttttcaaattaaaattcataattatttcaaacaaattttttaaaggtgaaaatgtatatttactaaagaaatagatatatatatcttgagagagatactaaaggtattagtagctagcttcatttaaaaatatcatatcattattaatgtaattcagtattgaattttattttatttaatttaatttaataattattttaaaatatcattaattattttatcattaatatcattaatgtaattatttattttattgtatttaaaataaaaaccagtccacccataaaaatgatgtgttacaagaaaagaagaaaataaatatagtgtgctcatgctaacttcttttaaaattggctacttctttcaaattggctaagatatatattgttgctgtgtataatatctcattcaaggaaaacttacaaaaatattaaaatttggattaacttttataaaaatactgtcacacggaaatcttt

SEQ ID NO: 393619 - DNA, 898 bp, Cannabis indica
taacaattcaaaactgcaaactgtaaatcgcaccgtgcagtttagaaaaaattcaaactgcacgaataatttaagcagtttgatgaatacctctaactagttgattagatttttgtctgaactagcatacttttcattaacaattaaacggatgtatttttgtgataaagaattttaattatacatttatgttacattattatcttaacgaatgaagctacggttaagaaattttagatttttgttaaatttttcttaaaagaattaaatcttaaataatgttaatatcattatataattgaatgaagttacggttaagaaactttagataatgttacattattatcttattgaataaagacagaaaacaatctgaggattaatgaagataatttagattagtatgaaataattttggatatgcaaataaaaaaaaaaaagtattagctagcttcactcactttgtagtatgtaattgtggccaatggccaatggccatggccctggccccatcgttatcgatcaaatatctaatctagttgtaatctagtatagaagagacctcatatagaatgatgcttatctatgctaaagttggcaaggaatatactttgaagacataaaatcaacatttttgctacctttgcaataaaatatactttcttttgcgggggtttaataaacacaattacccatgcttttctgcatataaagatacaaagtcagtggctcatgaggcaatcacatgattctcttgggccctatgggcctgctataactaaaggttcgaagttgaagaaatagctaattaataaagaatttgcaagaggaaattaagtagaatatggtattttttccttaaattttcatagatatggaaaaattagagatttactta

SEQ ID NO: 393620 - DNA, 1446 bp, Cannabis indica
ttttttttttttgcttgaaagttgaatgtttcaattttttgttaatactagtaaaattattaagacaaaaaaaagaaaagaaagaagcttacaattctatgatcagtatttaattttctttcaacaagaatggaattcatgccattgtgtaagaatcaatagggattgtatttcattcgaaaaaaaggaaaaatatgggtggtaacattctaaaataacaaaaattatcgatctcaaattgtatattttttttttctttttgtcgctgtaatgaaaagataaaaaatattatgtagtagtctaagaaataagaaacattttaaattaacaaagaatagtttaatttacaaactaattaaattgaattcaaaatataacatgattagattattagttgaagagtattattattaagcatcacaactactttaaaaatagattttataaaaattattatattattttataagaacaataataacaccttaagtaatgttggacataattggtagcttttaacatttctttatttaaacagcctacaatgtaccgaacaatttgataataacattgacatgtagtctattaggattgatgattagccacattattatctaattaatcattaatgtaaagtttattttaattattatatacacatgctctccatccattattatcatttattattatttcaataagtatggaatggacacgtttatgtacatattaattgtttaagtaactagcgatcaattattttatattttaaattttctacacttgattctctctttttttttttggcaatatttctttaattttatttttatttataaatttgatgcgttagttaaattttaccgttaaatgccaattaaattgtcaccatgtataaatgtgtatacgtgatatgtttttattgaatttaaagttttagtgtcacctgtatacaagtataaacagtggcaatcacaattgacaatttacaaataaaaataaaattaaggggcattgtccaaaaaaaaaatagagaaaaataagaatataggactcgtttggtacgccgtatcggattatattgtgttggattgtattgtattgtattagtattatttaatacaatactatgtttggcattgacttgtattaatagattgtgtaaaactataatatatgttcaatacactcgaccccaaaaccgattacgagtcgagtccgagtccaagtcccaatccgggtccgaatccaagtctcgagtctaggtttgggtttggggtttgagtctgggtttgtgtaacgtccccgcttcaagcctccattggatccttacacccacggaatgaatggctcttatacacgagtacgtcactctggctgcttcatggactgatgactgaccctacagaccaacacgagtgttttcagcgtgctttgtcctcactc

SEQ ID NO: 393621 - DNA, 1124 bp, Cannabis indica
ataagtaaaaaggagacatacttgaagatttagtggaaaagataattctattcacataggcatggattgcaattcgtaaattttttaggtttcccttattgagcaattccacagcgccatgtcttcgccccatgtcatcaaaaatagagccagattgttttgttccaatcttatgttttgtagtgactttgttgtcaggaccaataccaacttctaacaaagcttgtttcaccacagattgccaaattgacaaattggaatatgacactatcttgtttttcacccacttgtaagccttctcaacctcattcatgtcccattccacaccggacttggcaaagaaatcatcatcagcttctgagaaaaaaccaccattaaccatgctactccctcctaaaaccctacctcttatattatcgacaccatcctctgaagtgaacctttgcgccggtgtatcaccattatcttcttcaatgaaatttttgagaaatccagacaatgacaagacattggggtgagctttaggggtgtttcctctttcgaggacaaggatcgagtacttttctgataaagttgccgctaaagggcatccggctgtgccacctccgatcacgatgtagtcatattcttccactaatggtaggtcaattgcgttgtaaaccgatttcatgtaactaaaatctgcttatgtttgacatttgatgagttgatgagatataagttaattaggatcatatataaaaggcatatagaatgataattgaaaaaaataaataatagaatactacacgtaccataatcaactgcgtgaacaagtaattttccatgaaaacaagtttttaataatattagcaaagtaagaagaagtaaggacatttttgttgatatctttgaactttgaagccacaaaaaaatgaagataatgttggatagaatgaatgatcaaattaaaatgttcaacatttcaagtcacgtattttataggcttcgcaaattggtttatgtagagtgaatactaagtttaaaaaccggctacttttgactaagtttcttaattaattaatatgaacataaataataataataataataataataataataataataataataataacttc

SEQ ID NO: 393622 - DNA, 1430 bp, Cannabis indica
atactttcaattaaggttattagtggagattggttgacactttattttagtttaatgtgtttcaattcttctataattgtctttgtgtatcaatttcatttgtacttaattcctttttaatttcttggccaccaattaactttttatattttcattacaaaatctaagaagagagtattgattatactatagtgaaatagatataggtttcgatataggacaagagtacctatatggtttgtgtagcagttaggatttttatgcttaatgcctcttatgtgtttaaatttatcatgagagaaattttgcatatagcttcaaattatatgtcctagcccgaatataagtttctttagtaagttcgctatcacatgaaaattagaatttgagaattaacttatgttaaaccatataaagtaaattcaatcaaaattaattttcccaagctttaatcattgttttttgtattttaatttatttgttttatttttagtagaatttggaaatcctttcttaaattaattgtcatcaaatagaatttaggaatttaattgtttggtaattgactacagttcacgtgagaacgatactctatttacaatcatattacttgatttggctacgtatacttgcatcctataattttcataacaagtttttagtttcattttcggggactgttttagttaatattaaatcaattaaattttattctaatttggttttctctttctactatttgtttacttgtttgtgtcaattttcatctttttttcataaataggtagtttatatgacgttaaggacaaattggatgagggcctttgatcctaaaattgagaagacctgtaggaaaaatagaagaaacaagaggttaaaaagagatgcaataaggattgaattcggagaagtcatggctcataatgggaataataggggtgtagaggacaaggataatgtccataatccacctggaagaagcttaagggattatgtgcaacccaccacgattggggtccagtcctgtataagaccacctcccactgaagcaaataattttgaaattaagtgagccattcttcaaatggttcaatccacagtccaatttggggggactcttgttagaagacccaaacatgcatttagctaattttatggagctttgtcaaacattcaagatgaatagagttagtgatgatgctattcgcttgaggttatttctattctcactaagggagcgagtgaagagttggttggtgtcattgagacctaactcgatcaatacatagggtgaattggcactaaagtttctctctaaattctttcctccatcaaaacctaccatgctgagaggggagattaacaatttctaccaactcgacaatgagtatctctatgatgcttgggagagatttaaagacttgatcaga

SEQ ID NO: 393623 - DNA, 678 bp, Cannabis indica
ttaacataataatgatatgtacgtacgtatctcataaatttaactatcaatatcaaatatgtatgtaagtatatatgaatgtatatctcattctaagtagatatatttaggagatttaaggcagatcatatataccaccagcaaaagtgcacctaaaaccagctctctccaccaatatggcactgatagcatcgaaacaagcagggattgagtggatccccggcgagttcaggattcgtcgaagctccttggccggagactcggccacgtagttataatctccgctgactgatgagttagctgttgctgggacgattaatgggtgatctgagttggagtatgaaatagaagtagttgatttatcaagtgttgaggagcgaaaggtgagatttgatgttgatgagatattggaagctggtgatgttggttttcgaaaatggtttccatggaagcaaacacaaggattctggattttgcttgttatggccagttgcatttgcgtatgaagctgaacactcctcattctctaactcaacgatgtaatagtgtttcagttttaatcaattgctggattaattaccagtcctatatatatatatgcagagtcttcaaataaatatatacatattatttgttataaataatataatatatagattaaatatattgtacaaaatt

SEQ ID NO: 393624 - DNA, 883 bp, Cannabis indica
gaaaggactccagatgaatctcttgcagcccaaccaaaggcctccttggcatgctcttcttcgtaggactttgtcattgtttggatccaaagtttatgtttgatttttttttctctcagttgtgaaaaacaatgtgagtaaatatatagaggaggaactagcgttacaaaatggggagataattaaaggatgaataaattaggaaaaaagaggtttaaattatttcccttagcaattacttggttatatatatttataggaaaaggtaaatgtaacagcacagcaggattatctagccttttcctgtattgtaaaaaatgttagaataaatggttaggaattgagttatatataaaaatataggctattctactcattgttaatgtaacttacgattcttaacaccctgtgactagtgctgacgtatgcgcttaggctagtgctgacgtatgcgcttatcaattcttctgtttttttttttttcttttgtaaggtatgggcttacaaaattatgtgagctagaagaagtgaatctatttcttgggaacacaagaactttttcaaatgaaaataaagacactatactagaaattagaaaaacatagaatgtcagccacctatacttctgacacgtctcattttaatttccatatttgtgtggaggattccagaagaattatgtggatgcttctcatcaagaaaataggtttgtggcattttttttatgaaaaggattgttgcattcttattgttattgattttgacttcagtcgtgtgcttgtggtcctgttctttttcttctttcctagtttctaagccacataaaattagagatacattataaacattattgaagatcaattttgaatttgttataaaaaca

SEQ ID NO: 393625 - DNA, 1293 bp, Cannabis indica
ctcgggattgataacccctgttaccagtctttctgcaggagcgattccggtgaacagaaggtcatcaaggccgtgtccgatgactgtaggtacaacttgtgatttccatgccaaaaaatttgatcgatcgagtcgaactgtaagagaggaattgagggagttctggaaaggattccagttttgagggggagggacataggtggagctttgtccttgagtttgagtggtagagcgaggtgggttttcgaagatgtgaggatccatacaagacgtttgtcaatggcttctgataccatgtaagaacctatcaatacaaacactatctgagaaagaatactctaaggcttgtaaaggttaagccaaagagaagaaccaacctttatttatatagacaagatacagaagaggacatcagctcaagaagagagatgtaccaagagaataacagaatacagttggttacaagaactgaataacagaatgttacaaggaaaacagaaataactgtcaagtaacaaacaaaacagagttaacagttttattgtagtgtaacatatacaatattgataactaggtgactatatatggtgctattttgcaaggaggctggacatcaaaagtttcaacaaaccgaactctaaataatgtgcataatcaattgtgaattaacatatgtattatatctatttgtttacaagtatatagttgatttatttgatgagtgattttttataaaagtagtatttaattatataaatatatatttatataactatgtttccaaaaagtaaataaatttagttcaaaatcatttcaattattgatatttttaatttttctaaactttttagtttcttatattaatttctttttgtatttatgtcaaaattaagggtttcaattagaagataatagagcacagtaatcccattttgtttgaattatttagaattcagttttattttttttatttcttttgaaaatcatgaatcacaatcttaaataataataatgtatgattattttcctataattttttttggtatacatgtattatttattgttagtttatcattgttatagattattattatatatattattagtaaattatagtaaatatagcgattacaaatggtttaggatgattattgagagacataaaaaatacctgaatatatcactaaatctaatgagaataaaggcgagtgatttacacttaaaaactagctatttacattaggctaattaacaattttccccccgaactttgacatataccaaatcatgacc

SEQ ID NO: 393626 - DNA, 2289 bp, Cannabis indica
agtgattgggagtaggaagaaagcactcaagtccgcccaaatacctagccttctccaaattttttaggtggtcctcagttatgatggacagaggacacacccatctagccctcatggcaacattgcctcttatgagggaccgcctcggcatactcttgggtgacatagtcttccccctcagactccggctaccaggacgtcaccaagttcagactccggctccccagactcattgtatcgtaaaggccaagccactccctcctccttagcctcgaatgggctatcaagatggtcaccatcctggtcctctatctcctggacctcaacatccccctcatagtcctcctcctctgcagcggacaagtcctgttcgatgcacagcagcgtggcatgcggggccacgtgagggtcagttacattaattctctgcatcgtctatttcgtgcgggccatcatcctcctcctagacgggtattggtgtgtgtgccatgcaacggtcacggtaggagcagcaattggaataccaaaggcatcagaacttggatggcctataagaatagtgtcagcgaaaccggccggacgatgtatgtccagttggatgggagataacgtctccaccccttcctaagctcctaaacaaatcgtccgtagccttcttctgcgatctgctcggagtaaaagttatgttgcacctcaggttctggagtaggtgaactttcactactcacctcccaatcttcaaaacttgagttagaaagtctgccactcggcgaagacgaggttggtcctcgtattaaagtaaaagaagatcctcgtcgatatagtgttcgcctccccaaaactcaccagggttcatctaaaagactatacacgagatgagtatttggttgggatatcgaacagaaacaagagaatatactgaccaggtctactcgacggattaaaaagatgaaaaatgttgtaaaggttaagtttgtaacccaatgttcgaaaattttgaattaagggttaatcttcactaaacctcgaatgggcaaagtgaagatcgaacattgtgaggttaaagtcagaatgtcacaaacaacgaagtcatatgatctattacaattaaaattacaaagtctcgagcctagattttctatatttcctaaaataagtcaagaacgattgaattttctacaatggaaacacagaaaattgaagatacgaaattaaaggagagaaagatgagaaagttactcactattcgaagctttgatgttgttcgaatgaacctgatcagatctttctactagaattcaacgacagagtcgagagaaaaagctacttttgctctgaaattacttagcaagaaaaatagtaatagtggtttatgaggattttctaccctatttataagcaaattagtaaaatggtgtaatcaattaaaaactcaaatgcttcgatttccccccaaaaagtaaatattgagaaattaaaaaacaatcaagtactagagaagagtaaccgtcaaaagcgtgtgagtgaaagatgcgtctcgaggtacaaattgatcaaagcattaattagccaaaaactgaagggactcttagtgaaagtcacatcgaatcccgaacagacgcatccaactcgtgccacccattcagatgtaaggtcggctcgagtgaagtctacacgtaacttcagaagtcccgtacagacttggggcgcaaatgttatcccattttttgcattatgatgtggtagcacatgctggtgacacgtggacctgattccccatacctggctgaaagaaatgttctgaacacggcacagcatacacttgcacggataatgtctccctaaccgagtagttgacaatccgagcagcgcatcaacacttagcaatttcagaacttgcatcgtgaagcataaaagcaattcttataaatctgggatcgtatcacagagatatgacaagctatccaaatcccacaatctgtgtattctaaatatgtaatatatgttcttaccaactatagacattgtaagcagaatggaaatctttcctcaagcatttagccctataaatagtgatccattctcaatggtaaggggatcgaaagaattatattagagaaatctaagagagcatactcagagatttcattgtgagagcttcaagagaggaaacactatgttctttattcttgagttaatacaaatcaatgggagtaggctattaccgaactgaacggagccgaacctctttaaaaaccttgtgttctttattatttattcgcttatact

SEQ ID NO: 393627 - DNA, 1357 bp, Cannabis indica
ggccttttgcatataggccgcttctgcaggtattctctttaattacatggttttgattagaaaagtagaagaaatatctttgaataattcgattcagtttgtagattggtgctaattaaatttcttttactaattttctaaatttagttttataatgctgacaagaaaaattcagttcataatattcaatagactaagtgaagctattatttttctttcgcttatatggataggctgtattatacggctgagcttacttcctcttttatacctgtaatctttggaagtttacgggggcctttctatctgtgatggaatatgaagcatttattatgggatgcatatggttcacatatttaccttgttttcacactgaaacagtctcatttatcatgtaagttttttttttttgaagaacatttatcatgaagttagtaattagccaaagtttgttatttgggttttgtaatttcgacatggtgagtctaagtaagtaagaaaaagattctttgttgttgtctgctttgggttgtgcagaagttatatgccattatcttaaatgcattgtagacgttatatgcagttttctttaatgcgtagtaaacgttatatgacaatttttttttttttatgtatgcataatagacagatatcttgatcgacttatatttgaagttcgccaaaactagacaaaacatttgcttggtatattgatttctttgaattttaaattacgggtttgcaaatttagtatgttcaccttaaatgtagtacatctggaatttgaaaccatactccaccttactgatattttgaatacttgttttatttcgggaaataaaaaaggccaggttgctcaaagtttagtggttttgtgaggaggaaaaaaaaacacctatttttgtatcatggtggcttaaactgaagagttgttttattgttattcctatcctttgcaacaacaggctatgctggacgagactagacaaacccctatttcctttgtggcgtagtaaacattatatgccatttctttattgtgtatcagacaacttgagcgatcgacttatagttttagtagtagttagccaaaactagacaaatcctttgcttgagatattgacttccttgcattttatagtgtagtcttttaaggcgtgtcactttagtgtgtccaccttaaatatagtggatagggagttcaaaaatatactcaaccatgctgatattttgaattctggattatttcggggaataaaatggccaggctgctcaatgattagtaattttgtgagaaaagaaagaaaatgaaccctatttttgtctcatggtggcttaaagttaagagtgttttatc

SEQ ID NO: 393628 - DNA, 603 bp, Cannabis indica
  modified_base (11)..(11): a, c, t, g, unknown or other
gaacaaaaaanaaaaaaaaaaaaaaaacgtaagagtgactactaattaagaataatggttagtggcatattgatctatgaattaaattttttagggcatatatgatgatgttattatgaatattattttgtttgaaattttataaatctttactgaataatcatgatatttgaaaaatgaaattattctgtaagagtaagacccagagatattttttagtacagtactgtacgctagcttaatgacacgcttaattattctactaattaatgctttataatttaatgacatctattggtatattatgtacaaagaacttattaatcttgtaaaccaagactaaataagctattatttataataactgaatataaatattaattatatatatatggaacaatttttaatgggtattacccatgaatggttactaaacaaatttaactataaatattaattttaaaattatcaaaccatcgaatttcgatctaataacgaataatgaaatcagaaatttgaatttctatgcttaatttaactacttaattaaaaaaaatatctctttttacactatatcaaaaatatgttcatacaaaaatattt

SEQ ID NO: 393629 - DNA, 1418 bp, Cannabis indica
tttttttttttttgaaattaatggtgtcggtaattattgcaacattagtatatatatagtatttattttatttattttgtaattaataaggttaataatatatctacgtacgtacgatgcacaaacaatggtgactgactgacaacacatgatgtagtgttttacattggaaataaaacaaaaaataaataaataaaataaaagagagaaattaagtttaattaattaatattatcagtactaaattaattaattatgtgttagaaaatattccattcagatgagttaattgtcgtatttggtgacaagtcagagccaatacaatgctgtattttagtactatgtcttctgttcttgttcaaggtgtaataaatgcacaacttataaaaaaaaatatatattaccactttatttcatttattttattttcatttttatatttttaagatatatttacttttatagataatattttcattatatctttaagctagttaatgtaaagaggctttgagttagattgctcgacatgattggcagcaaattattatcgaaactaatctgtttggtgtgtgttcaagctatttaaagtaacatctgtgtgtctaagctattcaaagtaacatctctgtgacgtctcaatttgatttacttgttcttgatgttcgtggtttattatcgtcttttaaatatgttgaattgtgttttgttaaacgatctgcaaacaaaacaactcactgtcttgctaggagctcttgtttctcttcaagtcatgtacttcagttggatgattgttcttttgaagtgcgtttcattatcttgaatgattgttatttttaataagaaaatacatgatttatttccaaaaaaaaaaagaggtattcctcaatttattctaaaaaaaaaaaggtagaaaataaaaataaaagtgttagatatatcaatgagttatatatcaactagattattattatattaatttggaagttttattatcacatatacacagttgagatttaaatttataaaaaaaataaatttaagagagttttactataaaaaaaaaagtaaaaattaaaacatatagaaataattttgtggctaaaataaaaataaaattcaagatattcattcttcaagagatcattcaatttggtgtgacaattctttagcttgatacctaccaagctataaagatatgttgtgtacttgtgtatatataattaaatcttgagaagtacttcatatcttattggagattctattcctgtagaaagctttcgttcaattaatttaaattaacattaattaatttgttcataatcatcaaatgagaatatttgacatatataaaggacaattataatagtaaaatttatatttatgctaaatcaacacttttggtgtactattttata

SEQ ID NO: 393630 - DNA, 981 bp, Cannabis indica
aaaatatcgaaggagtggcttgacaacaaaaaattgagcaacatagccagcatagttttagtacctgagaatatttacaatataccacaacataaaaggaacattagctctttaattcttgaatggataactaaaataattgaaattccaaaaccttgtggtgaatcatgtaaaggaaagtgagtagcttagagctaggagtgtattagctaggacaacatgaggaagagaaatggatttgaattcttcaaattctccagattcaaaactctttgctaagccatcttaaacaagacaacaatttgaaattgagatgcatatacaaggcttaaaatcactttgtatacatgactcatgatgatatgataataaattatcataaagttcagctgcacaaaattaacccagttcaacatgaagtgcaataaggagagtggtaaaatattaatacttttacattctaaactaaaatacaaattcaaatttcgtttcaatatttgattattgcctggattgaatatttatatataaacatttaaaagtaaaaagagtcagcatcaaaggtgtcgtggtgtagttggttatcacgtcagtctaacacactgaaggtctccggttcgaacccgggcgacgccattttagtctttttaatctttctttcttttcattcaattttaagaccattgcttttcctctgtactcacatgttctattatatatacataaaattgtaagttatataattacatattatttcttatttataattatcaaggtttatattttttttttatatgtttatatgttttgattttttttttcaaaaaaaaaatacttgtaataatttaagcattttagctgctaatatttctgttatattatgactatataccttccattaatgttagggaaatttgaattttcatacttacaataccttaaaattatttccctaaatgcatagttattaaaattggtcat

SEQ ID NO: 393631 - DNA, 750 bp, Cannabis indica
ctactaataattagtagtaactttttccttttaaaaaaacaaaaaaaaaaaaaaaactaaaaaaaaaaaaaaaaaaaaaacaaaactaccaacaaactccaacaaatgacaagtggtagggttaaagaatgatagtctattttacttgacatattattttttttttgcaagtatggacatatgcaatcaaacatgttacccacaaatgcatcattaatccactactgattggaaataaaaattgtgccgagtaaatttaattaataatcttcaaagttttcttcacaattttgtttggagtaaatatatatatatatatatatatatttatatatatatataatattattctaacatattaggaaaccccacacacgcacacaatgaagatgagttaattattatggcattaaaattctatcatacttacctactctagattatttgataaacttttacatttaaataagagttgtgcttacaaaaaaatggggtcgaagaacaacgtaaaattatagaactctcaaattaattacatttattctacttcattttttgaaaacttaattttttaatgtttagaatagtataaataaatatacaattattagtttattaaatttttttttggctaattaggattttcgcctcttaaactttaacatgtaccaaattatgcccactgaactcttaaggtcgttaaaaatgtccctgaactattatgattgttggatataaggaatttttccc

SEQ ID NO: 393632 - DNA, 1076 bp, Cannabis indica
  modified_base (23)..(23): a, c, t, g, unknown or other
ttttttttatttatttcacttcncttccaaatgtctcttctgctttactctcgcatgcatctctttcatctttcgtggcgttaacatagggggtctccaaaaatatcgagatgctaatgccgagcttcacaaaatccaaggaacatcgtgaagtttttagctaagcaatggactgattcgagtcgaagatctcaagaatcaagaaagagccgagagcaacaaaagactctcaaaacatacgcaaggctgcccagaaaaagatcaaggaacttgaagaggcaaaccagaaagcctaggttgaactcataaaaagcttcaagaggccaaagctgatgccagatctaaggttaatacgatcgctaggcgatctatttattgagctcggtttgccaaccctaggatggatttgattttttgggagacaaggctgaagagatgcgagcattctgctagctaaccaagaaggatgagacaagaaatggtgaggaagagcttgaggaagaagaataagaagaagaagaagaaccaactaagtctccaaccatgtagatttagtcatctttatattgattttcaaacaatggcctttaggccaagacaatggtttgcctcttgtggcattttttgtaaaacttttgctttgttggatggccaacattactaatttatatatctacttttatgccttttatcttttttttttttgagttatttatgtttgtctatggcaatttaattcacaaccaaacatttttctttctcgatatagcttacgatattttaagggttacacgcatctccatttcattatttagtaggtgagtagttaatattctgctacatcttttgcaagcagttagtaatctactatactttttgcaagcagtttgtaatttgctattgttttaaagcacacttcaaatattttaaataagttcttttaaaaaatattttgtaatatatttttgattgcttatatgaatagttaatccttcatttcatatttttagcttgttgtattatttctctaagacacatttgtatctcgtttataatacatgttataattatgcaag

SEQ ID NO: 393633 - DNA, 714 bp, Cannabis indica
aaacaagtaatacccttctttctttcagcaaaaatagcacaagtgagtgtgttcatgtattttaataaaccaaaatagcttttctccttttccttttaattaatattttaaataacataattaaacttaaaattaatgaatccaataatcaagcctacctcaaaaattaactaagtaatcaacaataaactccaaaaaaaaaaaaaaaaaaaaagaaatgaacctaactaaaacttgcaagcaattacaactcatatataatttatatagaaattaaaaaaaaaaaaacaacacattttttatgaatatataagatgaacttaacgtggaaagtgatggagtaaaagcaataaaaaggcaacaacgtcatttgcttagcgtgcttattataacattacatatatgcatatgttccttcgtctctaacgttaacgttttttttttcctttctttctttctttcttaatgttttcctcaaaagcattcccatacgttaataattaatagcatttctaacacttatcaaaaattaggccacatatacatacatatatatatcatgtttaaaatcaacacaaaaaatgtgaaatactagaatatcacatataatttgtgataaatatatatttttggaaaatgggttctgggaattattacaaattaagaagaattattcttgaattttttcatggtagtagtagtagtagtgtttgg

SEQ ID NO: 393634 - DNA, 513 bp, Cannabis indica
ttgaacactactattatttaatatgaatattctttaaaatacaatgtgtgtttaaatataatttcatagtttaataatattaatgacttaaaaattattggctacttgaaaattggaattacacaccattttcattaggagctaccagaagaaaagtgtaaataaaatccctcaattatatccatttacatggttgttgtgtaattatttggttaaataattacgctaaactttataattattttaaattacactcaattttaattatataatgactttttaaatatgctcctaattaatttcttactaaatttgggcaagaaaattacataaagagaaaaaaaaaatacttttagggaaaatgttattttataaaaacattattaattttacgcaatttttttataaatttattttaaagaataaataggatttttttatttaaaaaaatatgacttttgtaaaattttgccttttatgatttatttatttatttatttttcacaaaattct

SEQ ID NO: 393635 - DNA, 603 bp, Cannabis indica
taaaaagagtgttggtaatcataacataaatattcattggatcatctcttttatcattagcccattatggtattgataaatcatggcccaggtcggactccacacttctccatattcttattatgataagattggttttttttaaagaataattagtttttctttagcatttgtattaggcaccagtggtgcctaacacttttgcgacatgttgcgttgcgattggttaacgatactctctaaaagctattattttaaattatatgagacctgatacttagttaaaccaatatcaatattgagtattgacacataagaaagtgctaggcaccactggtgccctttagcatttctcttttttttttttcagtccttgtgacaccgtactatttagctaattaaaaatatcccagtgtacaatttcatatgattacatctaatccttagagcactcacaataataactaaaagctaaaaaaaaaaatacctaaaagcttaaaattgagctccaacaaatgttttaaatcctttgttattaggggcttactcatttttacacttaaaaatagttttttcttgtatttttacggaatcctacataga

SEQ ID NO: 393636 - DNA, 1172 bp, Cannabis indica
taaaataatttaccatatagaaaggagtgttcaaataaactatttcacacatataaaataataatagaaaaaacatatttgtaacaaattatttaaaaccatattttcaatatattaaattttttttgagtttctaaaacaaaacgaactaatttttttttttttcaaaaatattgaaacaaataaagtatattgatgtactttttttcaagtgtggaattttctaaaaaaaattaatagattttttattattattgtcattatctaatttgctgtgcaaatatgttaaggtcatcattattgccacaaatggtaaattcactaccaaaattagagaaaaaaaggtagtcacctattttgagttctttgccgttttagaagtgaagaaaaaatatgagtttatatttgggtgtgtggccccctcactttacctatttttataaatttcataatttataaatataaatatttatttttttgctacattaagaagttttctctttatttatttttttggttacattgagtctttacaatttagtaaataccctctcatatttagagaaccaaattgtctagtttgtctttatataattttttttggaaggatttagtaccatcttgttacttgtaatgtttccttagtttcaaaaaaatcccaaaatatcaattttaaaaaagaaaggggagtttaaactttaaagttgtgaaaattagttacattttttaaaaaaagaaaaatatttttttaaaataataatttgtgagagagaagaagaggttgctatttttggagggaatccaatatactttattgattattgtattctttatttgtggagatatataagggatttttttgactctatattaggcctaattaataagattacaccaactacttttttgactaggtgtgtagtgtagtgtagataattaattgtgtgaataagttatgaagttattattggtgagtgatatatgtataagataaaattatacagcatggccactatttttattcatatataattgtgtattatagctattacatataggctaattaggatttttgtcctgaactttgacatgtaccaaatcatgccctctgaacttttaaggtcattgaaaatatcccctgaactatttagattgttggatttaaggacttt

SEQ ID NO: 393637 - DNA, 719 bp, Cannabis indica
accaaacgagccctaaaagaagtgttcatttataattaaatacgtatgtaatgaagaaatattaaaatattttaaattaaaattaaaatttctttatttatgttctattactgtaaatttgtgttcgacagcaacaaattttcattatgttactgtagatcgtaaaagttttatttttaattctggaatttaaaaaatatattgccatttgcaaaaatacaaattttcatatcttgtcctccttttggcataataaaaaagattagtcaagaagcttctatatattttgtgcaacaccagaatacagtatgtgtatttgaatcaatatcataaccatataaatgacagttactatttgtcgacaccttccttcgaagtaatccctttgatgtaggtagaatctcataaaagtctggttaggattttatgtcctaaataaacttcatttcaatataatcagatttactaattaataaaagatcagaaattattttatgttgcatggttcatgattgagactcaaatttgtatattttaagcttttaattgtgtgtacaaaattaatttaattaaatatttttatgattttaattgtaaaattattttaattaaaaatatttaattaattttaattttgtgttatctatcagatttgagtaaagtggtataaataaaaagatttaattatcaaagaagcaaaaagaggtcaagaagtatag

SEQ ID NO: 393638 - DNA, 842 bp, Cannabis indica
aagctctcaaggcagagagcatcatcctactagaaaatgttttgactagactattagttgaaaggcaacctaaattgtggaaagaatataagagtcacgtaaagcacaagcataagcaggtgtcccttgcagatctgattactcacatcattattgaatatgctaactgcaaggaactctaagctaccaaagcgagagaaatggcagcaaaggcaaattcgatacaaactcaaaataaaaataaaaggtatgccaacaaatctaatcattcaaataactctgtttacaagcctaaagctaatgtcaccactacctttaagaaaaaagggatttgttttatctgtggaaagtcaggtcatcattcacctcagtgtagaaaaagggtgagaaatggcaattttcctaaagtaaatgcaaatttggtagaaggagatgatattattgttgcagtcatttctcaagcttatcttatggccaatgtgaaagaatgggtggtaaactctggtgctacaagacatatttgtgctagaacatgtgtatcttagtgattctcgaaatgctcaagttcttggtaaaggaaaagttgttcgtaaactcacatctggcaagactttggctctaaatgatgtacttcatgttcctaatgtaagagcaaatttaatttttgtggctctattataaaagattggagttaaggtgtcatttgaatctaacaagattgtaatgacaaaaaataatatatttttgggggaaggcttttgtaatcaatgtcttttgtatagaatgtttctgatgttattaatgagaatgcatcttcttctgcttacttggttgattctatt

SEQ ID NO: 393639 - DNA, 834 bp, Cannabis indica
tttgtaagtttccctttatttttgacaatggatgtttattgtttgaatgaaaaagaatgccaagaaataatgttgtcaatttttgtatcttcaccttcttatttttttttttttattattttgtgataaaataagaaaatttaattttttttttttttagaaagtttcactattattaaaaaccacagtcttttacaacagagaaaataggataaggaatttctcccatccaacaagtgtctacatccaaccccagagcatgttttgctaacccatgagcagcttggttagcagatctcttaacgtgagagataacaatcctagagaaagaagatagaagacaacgaacatcaaagattatgtctgaaaaacaagataaatcccaagtttcatgatttaaaaaattagagacacgaagagcatcagtttccacaagagtaaccgacaatggtagttgagatatccaattaagtgcatggaaaagagcttttgcctccatttcatcagatctgaaacaaccttggacaagtttcgacatagccgccatgacttcacccttataattcctgacaatggcaccaactcctaaaaccttagatgtaggatttaccgcagcatcgacattaagttttaaaccatacatatctagtggcttccaaggaattccctccgttggtagagttgaaatttgtgctggagtaaccggttcagtaacagcagtgggacggttgttggctttgtgataattctccatgtagtttgtagcataatttgctagagccataccatcacgccttgattcaccatgattaatttgtttcggtcagtccaaat

SEQ ID NO: 393640 - DNA, 1230 bp, Cannabis indica
aaagagaaccaagcttaaaacttttaaaacaacaatgaataaattatgtagggcttacctttgatcttggcttaaggtttctcctcaatccttgctgaaaatggcttggatatgatagcctaaccttggttttttcttggttcaaagagggtcacgagagagaaagagaaggatagggtctcggtccccgagctcactactcattctgtgaaacacaataaatccatctaaagagagtagagagagcttggaagcccgattacccacatcaatcggtttcttttgatgatcaaaacttgtgtgggactaaagctcaaagaatcaatgactgaaggtattttaatccttagttatagtgcatatatattttattaattccccacttcatacaataattatatatgcttcattttatatatataaatttctaacatttggtatcagaacgaattatatatctctaccttaatttattttgagattcgtttattcatatatatatacgtatttgttctttatttatgatataaattatatatatttttatatatatactttcatattatataatcccaaatataaatatacatttatacttaatttatttttatatatacatatatatagttatattcatcacgttgatatttatataatatatatatttatatgtatgtatatatacatataatttcgtctatatatatttatatataattttctttaatgatatgatttaattatttaacattaattagagtaatctaacttatatatttctcatattttcatacggtaaaattatattgtaggcgtgtatatatatgtaagaattatcattgtcggaaccgtggaaaaaaaattctagtttcaaaatttgatataaattttcataaatagcttcatcaggttcatgtagtgctatataataaattcaagcatgataacatattttcactgaattttttttgaagtccacgttcggacccgaattttttattgaaattaaagtctacattttacgtgttttcgatgcttgaaattaatacgaatctcatttagattattttggaatcggtttcataaattttggacgtcagaaaatagtttgatggccgagtttgggtcgggtccgaagggtccacgtgtagaaaaacgggtcttcttgagccggctggaggtaggagacgactccaaactgttggatattattttacgaggatcttagat

SEQ ID NO: 393641 - DNA, 1488 bp, Cannabis indica
catagattcaaaaagtaaagtgtgcaattaaaagaatataacaaatgaataaatagaattgattaagtatggtagctaacccaataagcagcagtgaaaccagcaacaccagaagataaatgaataacataaccaccagcataatcaataataacatcatgaagaaacccatcttcacaccaaacactaaaagctccaacactataactcaaactaacccaaagtggaacaaacatcatccaagcataaaaattcatcctcccaagcaaagaccctgcaaccaaaataactgtaatcgccgcgaaaacaaactcataatacacaaaatccgccattgggacaaatccaaacttggaaaattgtcccaacaaaaacttctcactcaatgccaaccctggctttccaacaaaaggtgtccatttcgaaccaaatgacatatgatgaccccacaaaacccaacatattaacactgtcgcgaaaccatagagcgccatgaaagccgagttcaccgcccattttcgcttcaccatgcttccgtagagtatcactagccccggaacactctgcatccccaccatagtggttgctgtgagctgccatgaattgtctcctttgtttaaccattctggtgatgactctgttgcccataatccctttggtaataatactaatgttatgttattattatcattaataataatgtcactgtaattattactcattacaacaataatataagttaaacacaaataaaatttggttcaaattttgtgacattttggatgagattatattatatagtgacataaatatttggagtttattattagctggtgtattctccaagattatatatattttattatatgccggctatatatagtgaaaatatagattcattttacagagaatccatgaattttgattggtgctttttttttttcatagtatatgtcacatattaataatagattcttaattttatcacaatcacaagaacagaagaatccatcttttgatttagttgattttgttatttaaattattgtttcttagttagtatcgatttcttaatttgacttattatgtagagcaagattacgagtattataaatagaataatgattatgattgagacacacttaaattacagggctacttaattttgaattatacaattaaattatgtgtaataagtatgtacaatttaagtgtatatattttagttagaaagtgagtgtcacatttacataaaaattgaaccatatttctagtcattacaaaagagttcagaagggggagagacttagagcatgtttggtattattttctgttttttgtttttaaaaaattgtttttagaaatgagaacaaaaaatagtttttaaagtttttaaaaataagtcatgtttggttagtgttttttaaaacaatattgactaaaagtgaattggttttcaaaacagaaaacaacattttgttgttttca

SEQ ID NO: 393642 - DNA, 1279 bp, Cannabis indica
aatatatttatcatatcactaaattaaaataaattcagatttttcatatcttttgttgctctctagggttggaccctaagcacagccctatctcgcctacacctagaaccgactctgtgagtaagagtaaggttaacgtttatatatctaatatctttacaagttattggtgtttgtctctcaacataatgtgttgctattcatgtacccctatttatcgttaaaagttccacactaattattttctctacaggtgctcgtgtgttattgagattatatataattaagctcatcagcatatgtgtggagtatactgtataattcccttgtaagattttatgagcctagctattgggaacccgtaccaagcactctttcataggtggcgtctataattggttaggaatattatctaaaaacaatttttttaaattatatgagatctgataattaattatattaatagcgatatgaccctaaggagagtactagacactagtaataccttttagcaatagatttttttttcagttttaaccaaaaaaagtaacaacattacaaaaatacatccagctagccaacaaatataccgtccaaatataaaaaaaaattacacaaataccacttacacacaccttcaactcaggatccatgcttcctggaacaccatcgcgcaaccacacagtaacctaacgcaactaaaacgaaaattcaaccagaaagagaaccaccattaattcctgcgacttcacctaagaagacgatcagaatcaatcaaaacaggggttgtttcaaattcaagaaaaaaaaaagtgtagaaaaactaccacgaaactaaaattcaactagaaatctaatttaatttgcataaaactaatgtcctaacttcaattttcagattcatgaaatgtagatctcaaaaagttgaattggagttcccaaacagtctaactcaagtataatccaaaaaaaattatatcaatactatagtaaaatgtttgtccttgtgtattttcgttgttttccaaatttttaattgtgattttgttcatattaaattataaagagacatgtagatagagttaagtacgtgaaaacactgttctgatttttaatgtttcataatagttgcataaacattttgctaacagttatttcgtcttatgcgcaaccttcgaccaaccaccctgcaaccttcgtcttattaaaaccttcatcgatctgaagcaaccttcaaccaaccaccctgcaacttttgtctgattgaaaccttcatctg

SEQ ID NO: 393643 - DNA, 709 bp, Cannabis indica
tattcaccaagagtgtaacaagagaaaagtttaggcaaaacctaaacttgttgaacattaaagagcactaaaagtttgggaataacagaacaccctgggaataactgcaaccgaatcagtttactgatgagttctgtataaaaaaatatttccatatgtagcatgaaattatttcttctcttttcttcaatattctttaagaagaatatcagggttcattattgtgtctgatgctcccatgtcggaaaatgttgaaaattttatcggcttggcatattttgttggaagaacttgcacagtaatgatagggggtgattacatcgtatgaatagtagaaatgtgataacattctgcattttctaaaccactccattgttcgaatgcacagagagattctgaattaaattcatcatctgtggagaagattgactctatgtcattttcctcaagagacatcctagtcatttgttggatatgtgagataagcttgacaattttccctttaaggtattcttttgcacaatgaccatttttttccacatacataacatcaatcagatttttttttgaaagttccgtttccttcacaaaatttttttatgcttcctttatgctttgagaacttgaacgttttaaacttgtttttgttctttggtttttggcaagaacacgaagattcagaagggcatttgatgagtaaatctcgtat

SEQ ID NO: 393644 - DNA, 1391 bp, Cannabis indica
cttacaactcaagaaaagtctaattgagctttagcaatatcagaggaagtaattttcaatttacaaggaaggtgttttagaattttagaggtcttgaaaaaaaaaaatcaaagggtttttgggagtttgtgaatccttatagcaagctcaacaaaagaggagaagaataaaacttttcaaaaaatatatatattttctaccttgagggatgaagagtgcttgaagaactgatgaaaaaaattccaaaggcttaggctcgaaaagcttaaatgggaagtgtgagaaattttattgaaagctctattatttatagatgaactcaatctcctaatcctaaagcaattgagagtcttttaaatttaaaacctagattaaaggaaaagataaatgataagaaaaagataaaaatatatgttttctcttctcctctagctatcaaattcgaaattcctatagatataggaataggatttgtgaatttaaaaggtaacatcaactcttaatgctactaagattaagggaaatttagagctttaaaagaaaaaagataaatgattaacaaaagatcaaagatcttttctctttttctttttctctctaatttttgaatggcacatatgaataggattaggattcaaatctaattaattataatgccacaagaaaagaaaaatagaacaagggaacaagggaactcatgatcctaattctaattgggaatgcttgaaaaatagaaataattgcctaagattatcaaaattgatgcccatatggtagtttgagaaaaacgggctcagttcacgtcatcaagtaaactccacacaagtgtaaagttgaagtcatagcagtcgacctgggatgggtctctaaccttgcgcccaggttgacttcgggaactctgggatggaagtttggacatcgatcactcatttccaactcactattttttagtattctataccatggagacatggagtaataaaatccaggtctcgggagctgaaagtacacgaactaacacctcggaagtcaacttgggcacctaggatttcacccaacgtccaagttggcattgtgaactagggtttcagttttggggaccgtcttagtgcaaattggtcaaattttgtattgggacatcaactaggcatatctcatacatatttgaggcatcaaaatcaaattcggagaaaattcatttttgagcacctaaagcatccggtgcctgggcaacaagtgctcatgttgacaatttattaatctaggtgactttcaaatattagattgacgatcctacttttgcatcatatttttcttcataaataacgaggaaataagtactttcaggaaagaaacaacactttttgggtgccagaagcaaggcccaatgc

SEQ ID NO: 393645 - DNA, 867 bp, Cannabis indica
ttgttgttcttgggttcggccacaataggttaattaagttggaaaaaggaatttaaggatatatataggctaatttgaggagagttcttatatatggccagtgtttttcattttattttgttatgattctttagttctttccaattacaaaagctaataacataaaaaatatgatattaaagtttacgtctcagtcatcatctaaaatgtcaatgaatgttttaatagaccactgtgttgactaatgacccacacctcccaacttgccttctaattttaatggcaattcaagtcgcaatactagtaggaattattactggttaagcttttaattatttggggtggaacccaatagaataattatttgggttgggttatgtgataaaatttaaggcatttcagattcattaaatttattaattcatgattaaattattatttatattttttataaaaattaaaagaaaaaaaaattacttacaaaaatataatataaaataatgttagtttacatttaatgtcggatatgtggggttggaagtttaattaggggacaataatattttttctttggtataattaagacaaagtgaaataaaaagaaatatgttttagccggccaaaatgcaaaggctctttaggaaaaaaaaatgcaaaggctaagactagacgatgatttggtgttttgtggtatttcgattaatttatattaacaaaaattaattttagttgcatggaaatttcaagtgtaatacttttttttattttttaaataatccattcatacttgtaataattaataaaaaaaatatggaaacccaaatttttacttccagctattttttctggtgtttttttgcagtcttc

SEQ ID NO: 393646 - DNA, 1295 bp, Cannabis indica
gaaatgacaaaacaaagaaccaatgaaaaaatctattttctttattttatctaactctgtattcagttttataggcagccccgttttcatgcacttcaattcaaattagcttctttgacactatagtatagattcaaagtcaaaaatggaatataaacatgcaagtaaaatgcccttggctacttgcctaatgggttcttcgaatatgtcatgaattcatttcagtgatgcagtgtcattataaaatatctcacagtaattttccattcaaaaagaagaacaacttcttcgaaatcgagaacgacatcgaaaatcttttagctttatgtgagcatacttgtgcttagataaacagaacaatgactatctggttcaaagttacccaatagtactatttccacttccacatttaaactctaaaaataacaaccataaaatcaaacatacccgtactatctcttcataagtttcatcatcaatttctacagtggtcactacttcttcaacatcaccaagaatcatatttaaatgttgatcataagcctgcacatacaaagcccacaaaaagaagaaaatctatcatgacaactaatacaatggtagaaatatccagcaacagaatagggttctcttcactagtatcgccccaaaacaaacaatttagtatcgaaaggaacaattatcagtaaatgagcaatttaggtttcaagtttgaaccaagaaaaaagaaaaccctcaaaagtgctcatctttatctaatcaacaatacaatactaaccctctctacaaatttcgaccaattgcaaaggtttaaccacagaataacaacacagttaaaaccctaaaccctaaacattgttccgggtaccaatcgaatcgaataaaagctggaaaactaaacctagacgatagtagtattgaaaagaagagcaatggaatggtacggaaaccctaaaatgtacatagagagagaaagagagagaggggggtacgtggagcttgccacggagctcgcggtcggagcgaagcttgacgtagatgcgctcgtcgaggctgagcctgatgagatccaaaggctccttcactgcgctttcttcttcggtggccattttcttttcaacaactctgctttttcctataacaacacgcacaaatctttcagctatgataaagggagtgtattgcaattgctactattttatttatttattattattattttaaaatgaaaaagggagtttattgaaaaggccaaataagccaaaaactttccaaataggtttagaaaatacctc

SEQ ID NO: 393647 - DNA, 731 bp, Cannabis indica
ataatttacatttatttatttcattttttgaatttttttttttttgaatagtttacttagttgaaaatatgattttaaatagtcatttgtacgcgtgtactaattaggatttttgatactcgagttttgataagtactaaattatacattttgaactttttaggtcgttaataatttctcctgaactattgaaattgttgcacttacttttatctaattttactaattatactttttgagattttcaggtcgttaaaaatttctcttgaactattgaaattgttgcatttaaagattcttgtctaattttactaacggaagtctgatgtggatgaaagtttatgagaaaaaatttggtacacatcaaattttggtgggtacgattttgtagatttcaaagttcgagagacatgatttggtataagaacaatcaccacgttagtaaaatactgaataggattggacataagttcttcaatccaacaatctcagtagtttggggagaatttttaaaagttcaagaaacataatttatgttaaagttcaaaaaataaaaacttaattatacacgtgtaattaactattttggactttatttttaaaattataaattattcaaaaaaaaaattacaaaaacaaataaaatatttgttataactctaatatacatcatctgaaaagaaaaattaaagatataatagagcaaaaattatgcctatacttaagaattt

SEQ ID NO: 393648 - DNA, 629 bp, Cannabis indica
gctaaaaattaccttgatcaatgaaataatgttcacaattctgtcatagttaggcttattatgatctgatattcagacaaataatggtgcagagcattggtctccacactcgctaacaatataaaggttaatgtagatgcggctttgttcgatgggggttgttcatttggtacgggataagaagggtatactcactgaaggtcgaaccatataggcacgattgaacctattttggctaaagcgataagtgttaaggaagctataacttggacaaagagcaaccaatatggcaacatataactgtggagagtgactgtcttgggattgtgcaagcattacgtagctctatgtgcataatatctttgcatatagtggctcgttgttttgctagaatctctaatttatatatattctgtttggagtctattcctactgagttgttaccatgtttggtgactgattttgttggttaataaagttaatatttttcattcaaaaaaaataatagtatcaagacaagaagaataataaaactaaaagtattatgtgactgagttaaaactccttaaaatatataatatttgttataaatattaataattatgtggatgtccaaatcttttatttat

SEQ ID NO: 393649 - DNA, 1110 bp, Cannabis indica
aaaattaaaaaaaaaaagtaacattgtataacatggtagacaatacactaacaggttcatctatgtaattgcttatgtggctcaaaaataaaaagtaattaaattttaaaaaaaatgaaaagtaaaatgaaactaatttataaaaaccctcattttaacgtaaaatttatatttgtaaactaaactttaaaaaaaaaacttgaaactaatttcattttaaagaaaaaaattaaaacatagaatatattaaagattgaattaaaataaaattttgtgtaagagaatttaagagtaaaaattttctttatctctattcagttgaatttgatttactaacaaattgtaactgaataaagagaatagggctgaacatttgaactcggaaacccgccaacccaccccaacccgctgccaaaaaagttgaaaaaaacaaaacacgtatgatcgggtcgggtttcacctgaaaatggtatatacgggtatcaggttcggatttttaaaatgcatattttggaaatcgggtgtccacctgaaacccgaatcaataaacagtttttttttttaaaaaatatttttcttccttaaatagtaaataatcctaaataagtaaaatatattagtaaattgattcgtccccaaatgatacgacagagaagaagaccgaccgactcatccctgaatcgaatcgatcagtcatcatctcatctcctccggcaacggtaagttctcatccttacaggctgcaaccagatcaattcgattcttccaagcaagatgtccactgctacttagtacttatgtatcttcttactctcttcttaagtaatttaagtttaaagttaaattatatatgttatattgtatatgatttagaaagtgcatacttgttaattttgagttcgttacttatttttctatgtatttctttgtatctgtaatatcaatgattcaatatattatacatttgtttctcaatgaaataatatgttaattgtctttttttttctattcgtcattagaagaccaagacccttaccgatttttattcatcatcgattcattgacacaagaaaagtcaagtgaaaacacccttactgttaattgttaaaa

SEQ ID NO: 393650 - DNA, 1385 bp, Cannabis indica
gagagagagagagggaggggagggggttgggaggggatagaaaaagaagaagaaagaagaaagaagaagaaaaaaaacggaatgggacggagggtttgtgcgacgtcgaccaactccgcctccacctttaatttgggtgcttcggctccggtggtgagacaagagagagaaagagagggttgtgaggggttctgtagaaaaagaagaagaaagaagaaagaagaaagaaaaaaagtaaaaaaaaaatatatatttaattttttttaatttttaatttttttaaatatttataatatttttttaaaaattaatattacgtggaccactgaaaatttgccacgtgtacaagtgtgtacatgtggacagtacattgtggcacttaactgcgatttttggacggaggtatacagtgcaaaacagaatagaagttcagtaggttttgccgccaaaattttaacttttgtgttacaaaacgtaaagttcagatattttagccgtcaatatcccattaatgtattattgtctttttgaacgttttattttgttaaaattgatccttgaactattcacagtattgtaaattagttcttctatcacgttgcaaacaaacttatttttatgcttaatttaacaacataaacaatcatagtagtaatatttttttttgaataacagtattagttatattagttattagtattggtgaaacctattgtatgtcattttgattatattcttccatattccctaaaatgtaatgggaaattctccaaacaccggatcggagcgccatgtgttacaatttttcttcctttataaattataattgcaaagaataatatttaaatactatagtaatagaatattactaaatttactatcttaaataatagcaaattaattcatatgtaattatatcatgatactggaacattgtttgtatgtaataatgtaagcatcaattattatagcaggacaaggaaaatgtcactatttatccaatatttacaatgaaaaaagatttaaaagaatagaagaaacaaaggacaataataagaagtaaaaaaagaaaacaaattaataaataaataattggcatacaatgtatgtgtttctatatatttatgatcttttctttagtttattatggtcgactaaagtgggtggcactggtgggacttgccaatgtctccttcctccaatgggatcgtgccacgtttcttcatcttctgcactctcttcttctacccaatcatctatcaccatagtctgctgatagtatcgaaaggccacaaacaacatgaacactgaaaagcaaagatcaaaaaggtcaaactaactaaacatttttttttctttttcggtttatatattataatgcataa

SEQ ID NO: 393651 - DNA, 565 bp, Cannabis indica
tgtgttggaggatagagtggatctatattaaggtgatgacatatgatattcgggtcaatcctgaccatatctgaatggctccaggaaaactgatcatggtcttcttgtaaaaagaaaattaattctactttaattatttccccaactatttaccaatttttacaattttagtagggtcgctgggatctagtaccacctcgtccaactcctccactggccaaagctgggacttttcctcaataattcttgggtccatatcttccacttctttgtttttgatatccttgattgtcactactattgtttgatgagcctttgcccttcccttcaattcaacgatgtaacattgtctcgcccttaacgagtcctctttaacagtccctattccatattgagttgggagtttaagggatatgtaacgccctaaatcattaggcacgctacccaacatacttataaaaccctaatcccctaattgggattactagtaaaattagcgcagaaattaaactttaattacaaacagagtgaaaataaacttgtaatactttttcactttataaaa

SEQ ID NO: 393652 - DNA, 1657 bp, Cannabis indica
agtgagaaagaataataatttagtctttgactttgtgtgactttaggtatattatatacgaacgattaattattcttttttattatttttttttaaaaaaaatattatttaatttgattataaatacacggaaatttcccgatatcttatatttgaatttaggaaactaaaatataaaccatacaataatatttcctaacgacccgattaatattctttatattaatcctaatcctattagaactaatgtttattatgtatatatataaataatattaaatcatacgtgagattttagtattattgaaataatggtgagacttaataatagaatgagttttttgatgccacatgagttactaaataatgaaaggagaagtactgtgattcacaggccttcgccaccatcttcgccaccgtcaccattgtctttgccaccgtcaccattgcctttgctgccgtcgatagagattccgcctttgccggaatttctaccacatcaacaaatagtgccacctcaaaaaagtattgaaaatgtacttgaaaattcggaaaatagtgaggtgtgtagtgtgtgtttagatgaacttttggaagaagaagaaattgtcaagacaccttgctcccactcatttcatgtcttttgtattaacaaatggttatcacttcaaaaatcatcttgtccaaattgtaggaaccaattattttaattatttgtgaatttataaattacttttattattgtattctaataaatattattttatatttcttttttttatacaccacttattaataaaattttacaaatttacaatggcacgacttttttttttttaattatactgtctagttctttcttattgagtgtgtaagtcctcagtcttagttataccatctttaatagatggtgtaaattttaaactaaatttgactcaaaaatgagttaatgttatatttaatccaaattatataattatactctaatgaattaggggtaaattaatttattttttataaaaagtaaaaaagaaaatcagcaaatacattgaaagtatataaaaattcaattaaaaatataaataaaatgtacaaagtcattaaaggtactaacgagtgacaaaaaagtaaataaaaaaaataatatttattatagtataaaatttaactcattttatattttgtgtcaaatttaacctaacttttaatatgtttcaaatttagaccagtaccactattagaatttaattttatgaacctgaattaaaaaatacatgtattgttatactataaaaatagtgtaagggcttattagtatttgtaaatggtgtgatagcctataaatatgtaagggaaatttgattttttatgcttacatttggttaaaaaaaaatttctaaacaaataataactaatatttgtaggatatgacaatttttatgatatccctaaaatacccacatttacatcactcccatttacaccatcggaccacccatcggaccacccttcgggccacccatcagaccacctatcgggccacccatcagaccacctatcggggcacccatcggaaccatcggtccacccatcagaccaccatcggaccagatatgctacaattttttttttttttatgtttttgtacatataaaag

SEQ ID NO: 393653 - DNA, 1267 bp, Cannabis indica
gagatttttttatgttgtattcttgttattttgttgtttgattttttattatctgtttgtttattttttgttgttgttttgatgctatttaaatgatattttcatattatttttatgtactttttttattgtttttatggaaaatcgtaaaaatagtaaaaaaaaaaaaaaacttaaaaaatgtaattttttttacaaaaaataatatcttatgtaattatctcaattagataagtatatagggttcgtttgacacgtaaaaataaaattgggctgcattatgttgaatgtaattcttagacgatttattttttagtataaagaaataaatcaagagcaaaaaaataaataagagagatgcaatactaaattaccataattgagtgaaccagtgcagtatatggaacatgattattgaattgaagtgctaatatcatgtgaaaattatgagaattggttttttttttttaaataagtagcatttaatttctgatattaagaatattaagatttaaaataaaaaataaataaatgcaatgaatctgaactctccacgtgtctgtatttatgagttaatagaagtggtagtaacggatgtaaaagaattgtaacattgagtatttttgcctctaaaagtaagataaggtatttaagtgtataaaatttgaaacattaaatatttatgccgcaattttaccaaagttaaatcactaaaattttaaaaagtaaataaaaaatatataaaaaattgaaataaaagataaataagaatgaaactaaatgaagatgtcacattaccgccctatgttttttctctagataaatatatagatagattaatatatatgggtgtactcttaatatgtattatccatgaatgggtaaattttagtttttaagcttaattttctatctaattagtttaatctctcatttttatattatatgggttgggattgttcaatcggtcgaaaaaaaattaagaaaaaatatttttcggcaaaaaaaataaaataaaattttgtatctaaatatttttgacataatgtaaaaagaaatattttttgacattttattaattaagtagctaaactaagcatagatattaaaatttctcttttattattcgtcgttggatcaaaatttaataatttaataatttaatattttttaaaataacaccaattaaaaagtatttcacatatatatagactaacttatttattttagtaatggatatatatattttagtgtaaatttaaatata

SEQ ID NO: 393654 - DNA, 1159 bp, Cannabis indica
actgctgagattgcatcataattaacggtgagttttgcccgccaagagtgtctaaaataacgaaggaccgggaccaccgaaataaattcaccaccaatattcttatcattgaaatttatggtgggccaaacccgccgaaattgatcaataacggggacgagcccgccgatataaacctattttttttgtggtgttaatgcgcctgtgtattttttatatatatatatatatatgtatatgtaaaataattctagtttggtaaattatttagaagtattttaaaattaatggactattaatactttaagtactatgtacaatgttatgtaaaaaattgaattataattttttatatgctataaaaacatagatgaccttataacttattagtatggttgaatatccaattcaattcatatatttttcttctaatctaatttaatctaattggtaattagatttgaaaattcattatccgatccaatctaattaggcctcaaaattcaatctcattcaatccaattattaatttcaattgggctagttttctaattagatatctaatacttacatacctattttttatattaacctaaaatcatgaagaaaaataaaagtaaataaatattattcttcagttaagtttaatactccataaagatatcatttttataagtttaatgcaactaaaaatttaaaataactaaaataacaatactcccaaatagtgaaaaagaataaaaattataaaaataaatatacaaaacaattaagtattacaaattaaacaacaacagtaaaattgtaaaaattaaaataaaatataattggattgatcaatttttaataattagattttaaaactgacacttaataatcgatttaatctaattaaaattcaacttttaatatcaaatctaatccaattataattggattaaaatcaatttagtttaattgaattgattggatcctctccattaaaaatagagtgacccccgactgataaaacactcctaatatatattcgtgttggttgtaaaatgttttgtctcttttctaattagtttatatgtttaatgatcattgtacaatacattattcaataatatttttaacttcaaatcgtatcttattaattaatcaaatcgttaaaaac

SEQ ID NO: 393655 - DNA, 984 bp, Cannabis indica
aattgtgtaacatctcttttattacacaattatgatcaaccaaaagaagttacaaaagcaattaactttgtaactcttctccatgttataaagtgtaggttacaattttaggttaaataaattatatgttacacaatttatttaccaaacacttaatacatattattcacataataatatatattactacattttaatctacacttattatattataaaataatataacagagtaagtataattaaactgtataattattaaaaaaaattaatttgaaatattaactacttaaaaatatatacggttttttgtgttattatattattactgattattttgtcaaacaaaatattataacttcatatataattaattaacatctaatatctaatattttagtaccccttatattttaaaatatagtgtgattagtaattacacaattactttcaaaattagtaatcaaatattagaaggtatcactcaaaaaaaaaagaaaatagtataaaataaaaatataaagggacttattagcaacagttacctgatgtttattacttaaaaatatcaatcattaatgtttattacacatttgtctgtaattttggtgtgtataatagcatttaacattaataaaaaaaataagtgttattattgaagttttgatatttattttgcaagcatttaatgtatggatttaatggtcctataattttattagagaataacagggtgaatacggtgccattgtatgtgtccacctttaaattatttttttatattatctcttcttgggcagaacctgaataaaaccattcatctttttgaaattatttctacatcacagtcttgctttatgtacgaggaagtgacatttagcaacgttcttttgtataattgattagtatagtatatatagtactacgaccaaaattaattaattgcttcagaaactaatccaacaaactttaaaacaaaattaa

SEQ ID NO: 393656 - DNA, 1373 bp, Cannabis indica
ttgttgggtactatttgatctttattcatcaattttggggtcatattctctctctctatatctctttctcctttggcatgcacatataaagttttggcttttagaccaaccaatatgaaaagaaatggttaaaataattacatattaaatcaatttttattgggtttctttttttactattatattgagtgctttttcttcataataataatagaaagaaaaaaagggaaattagagtagaggaaagagagagagtgagtgagtagtcatggatagaatgtgaggcaactaagcttaggaagctgtggaaatgcattgatgaaagccatgtgattgtgatctttctttctttctttctctacgcgtttatatatatattttatgtatatattttgggtttaatttagagatgcttttaaagcttaaaagcccttacaaaacgtgttaattacgttccttttcttttctcttttcacttttacacccacttctcttctcccaacataatcaactattaattaaccttattcttccataaaaattagttaaaagaaaaactttaccttataattagagcattggtataaaccactatttaaagatgatactttaggattggttaacgatatttcatgaagaaaaatgttataaggatatgagaaatgctacagggcaccagtggtgcctaacaccctcttacgtgtcaatattattattggtccaactaagtatcaggtcccatataatttaatataatagcttttagggaatatcgttaaccaattgcaacgcgacatgtcgagaaggtgctaggcaccactggtgcctaatagaatgctctaagggtattcatagtgcctagcatttttgtgatgtgtaatattgttattgatgcaatttagtattgagtctcatatatttttgttatataaatattataaagaactgttaattaattataaggatcatagtagtgttaggcaaatttgtgtcccatatcaatactctttcataaaagctactactttaaattatagggtatcaaagtacgtagtactactatgagacgacgttctataattagttagtgattctctataatttttattgaattaaaataagtattactattagacaccactggttcacaataccttctataagtggtaccttacgattggttaacaatatattttctaaaaattattctcttaagttatatgaaacttgagacttaattacactattataatactgaataaggtagtactagtaacaccttttactagcatttgtcactgttataaccacttgagctagggctagctcaagtggccatagaaaggtgtgcgtgtgttggaggtcttgggttc

SEQ ID NO: 393657 - DNA, 799 bp, Cannabis indica
tttaaagttttttatagcatttctcatgacttttttctatatttataatttttttttttaaaaaaaaaaaaaagttatatttagtataattaagtatttatgtcatctatcaaaacttgttttcattttctcatatttttgtaaatataagtttgttttgtgtgagttggatattaataatgacataattttgtataattaaaaaactttgttttactttttatttgttttactaatttaaaatggtatttttgcatcacttacctaattgattggtttagaattggctactaagaaggaagttgcgttaattactaatcttgcgcaaaacataaagctcattagcgttggtttcaaactgatacactaataggataactaagaaaaagcccatttgatacaaactctaatgtatatgtagaataaatttttggagaattttcataaaatttatgggtattttgagtatagtttacttttttatggcataaataaataatattataaatttgtaagtttttttattttttttttacatttatatggatttttttatgctatatttttattaataaaagtggaaaccctatatttgtaaaacaataataagatttgccgtaaaaattattgtcaccgaaaaaatcgcgggaaaaattaccgtccctgaaaaagtcactgtcgcatgagaaatactaggtaagtcatcaaaagtagatgtctcaaatataactaaaaatagaaccggtttcatgaataaaaactaataactcaaaccgacaattgaaatataaccagttct

SEQ ID NO: 393658 - DNA, 3185 bp, Cannabis indica
tagcttgtaattgagagggattatgcttgaccgttttggaggctaacttgatgtggcggtaccattctcaatgggatgagaacttttgaagtgcaaaatgatgatcaaattagattggatgaagttttagacctttgtaattgacacgtggtctccataattattaaaactgaagaaatggagaagaaactttttattgagcaaaagattttttttttggagatgaattcctctaattaaaagtgatttgttatataagtattcacatatcaattttgtgtataatttgtgtggacatatcatattattctttttttaataaacgatatataatatatagttggcaatttacatgtattattcaagtgcaacgatgatgatgatggaaattgtgactagctagacaatattggatgaccctaatcatcatcaagttttcaaaactaattaatggacaacaagagtgctactaaacattgcttattggttaattaaattagaatttttggcggctaatctcatccgattaaccgctaccgtaactgtttatgttacacgtatcacatttatattagtactatatctaatattattattttaaaattcattttaaaattaaataaatatttaagaaaataaaaatatcaaaaaaattttaaaataatttttttataatcttaaataataacattaggtgtatcaatatataaacgtgccacgtgtataaaaagtgtacccataaaccgtctatgttgacaattaactgtgaaaaatagatgatactttaaatttgttaacagttcactaatttagaggattttaccactaaaatttaagtttagaaagttaagtagaaatagaatgatatttgagaaggtttaagaaaaaaaaaaactcattaaattaaccctacttattactagtaatgataggaaccctatcatgctatgttggcgtttgaactactactactttactttattatcttcttctttatatatagtcaaatcatagagagtaaagataacaaattgtacacaatgatataactctagcaaatattaccatacaattatatataaagtggtcccatatttaattatatattttagaatgtacttatttttgagtgtgtattatgcaaattaaaagtgtgtccatcattatttggtaaacacactcatattattacatacgcacactttttatttacaataataatgtgtatttaattttagttatagataattttaagtatgtcataatcattactcataatatatatgcacctttttagtgtttttatataaaagttaaacaaaaatatagttgtacttctgctaaaaaagaaatatacatataattgtacttttatcaagttaataatatattattttggccaaatctatcactttttcctttactaattttaaaatatgttttttatactaattatataactacaaaaaatgtcacttttatcagcgttcacaactgcgctaataaaagtaactttaccagtacatctcgcaaattgcgttggcaaaaagattaaagtttaccagcgcacatttgtactggcaaaaatctaacttttactagtccatttacgtactgggaaaagtcatttttgccagcgcgtttcattttgcgctggcaaaagttctaatactaatattaatttaccaaccccttttgccaacataccaaatttttgccagcgcaaaagtgtgctagcaaaagtgacatttgttgtagtgtatacacaagtacgaacatatatagcaataataattacacaataggtaagtttacattacacattttaaacaaatgttttggtagattttttatctattatggtagcacttatgagaattttttaatctaattttttcataatcgtatatgttatagttatttaagatcacctgtaaatttttcaaaaaaaatcaaatagtttacaataatgaaaataagatttacatattttgttgtacgcgagactactatttttatacacatggtaagtaattatttaaatcatattttcggtattgtaaactgttgaccgagatttttgacatcaattaatttagatcgtgtggaacaattaatgtgaattaaagaggagaatttttacgtagttgggacattaatgaaccttagtccatgagtcacttttatttctaagtattttcttataaacaatccctaaaaaaagtcacattccatacatcattggagtatttataggttcataatagtggtaaaaagaccactattttcgtgcttgtatgaaccatattttgcacaatttcccagacttgattatagagcatgattgcctatttttcatgatgtacctgggcttaatgtatgtgtggtgagactagacttgtctcttgccaatgacttgatagctcataatgtagtcgtcattaatgcataaatgatgtataaggcatcgtgaaatcggaaaattatgggtttaaacccattgagcacgtcttttcagcataaggagtaacttaaataccgcattaaatgtgtgtatagtaacttagcctcaagcggtgtgtcatgctctttacatccctctatcttctcttcgggttgagtttcgcttgcggagaagaagagacaaaactactatcctcctggtgggtctttctagaggtgactaatctcctgaagctcctgccaattactaagctccaaaggcggtttaatataatacgtcttgtatcgagagtcctattaccacatggcttattcttgaagtgccacgcatttaggaaatcctaagcaacataacatattcaaatttttttaaataaaaatttataagcgattttaataaatagttacaacatacgttatcatgaaaaataataaattaaaaaagttttttaaatgccaaaatagataaatgatctaccaaaacaactttttagaagtctactacataaattttgtgtaataattaatagaattagtgaggatatatagttttagaaatttttggactagatcctaaaaagtcgttatgatagatttcttacctgtttctgcatacaaaataactattaagtttatttttttatgatcgcgtatgttttagcaatttaatattatttgtaaatttttagaaaattccgaatagtttacagtgtcgaaaatta

SEQ ID NO: 393659 - DNA, 1179 bp, Cannabis indica
aatagtttttcaaaaatacacaaactttaaaaaaaattaaaacaactttataacaaatattttaaatttatttatactatttattgttctaaaaatatttaattaattgttttagattttaataattatttttatatagaaacatatgtgtatacactacaaaaattactatttttagtgacaatcttttagttacaatataattttttttttagtaaatgtaacttttaatcataataaattaaaaattacttgtaactaaaacatagtatttagatacaacttgtcactaatttagttttgttaataacaaatatattttgactaaaaattaatttagaaacaacaaattaattgctacttttgtgactaattaataattttagccatgaatgaaccttttagtcacaacataaaaaatgttgatttataattagttacaaatttttttacttttagtcataatttgttgtgactaaaaataaaacaaaatgtaatgatatattaatattatatatttaaaaatgaataataatataataaaatttttaaaaataaggtttttattttaaaaaaatttaatgtatgatgtgatgtaaaattgaattgtaaaatagagaaagtagaattttttataatgtattttaaaagataaaggtaaataagttattgagagtgctaaatagtaaattttaaacaagctttaaaatagagagatttagagcatgtttatttttattttagttctttaaatattttaaaataactcaataatgtgagtgctcttagtaatttataatatttattaataaaaattaataaaattttgatatatttttaacactttttgatatttaattatattattaataatatttatattaaaaatcaaaatatatatatatgcactatcatattattagtatgggtaaatattattttctaacctgcgttttgcaaaaattattaattggacctctatcttgttaaatgataaaatggaccctgtattttccaaaatgataaaataggacactgagctcaattttctaacaatttgtcataacatctctagatcatattattattaaattttattttgacaaaaaattagttcagtgtcctatttgtacaattttaaaaaatatatggtccattttattattaaacaaaacagag

SEQ ID NO: 393660 - DNA, 1174 bp, Cannabis indica
actcataatcattgaaaatatctaataattttaaaaacataaaaaaataaagtaaaagaaagaactcatcaaaaaaataatgttgaaagtctacagagtcatcttctgcctctaattgttgtctccctaagtttgctctcttatagtgttgaaaaatggcctttatatagctacaaaagataaaaaaaaaatgcctaattttttgcagtttagaatatgtagtgtcgcggcgcttgaagctcgacttttagcagcgagcttcttagtacaatgattgatatttttttggtcataactcttttaatattgctcgattgaagatgttttgaaaagctaaaagagagatctagaacttctattcacactattttttttcaaagtgaaaccatcatagtcataaattcacttgaagttttagacttgattttcaaccacaaacggagcatgttgagaatccaaaacttaaaatttttaaccacttatgtcttagaactctaaattccatgatagctcatcatattcatctcatttaacatgttttttctcattttcaattcagattatgaattttaacatttaaacttgaaacaaatagaaaattagcctaattctacccaaaatgaacacaatcaattgaaatacacatttaaaacactttataaaatacacttaaaactagtctatcacttcagaatgcaaattagatttgtcagaatcgaggcaaaaaagtatgcagacctacaagccatccaccaagtaacatgtaatatacatgtgcaaacaattttatttctcctagctatgacgtggtgattaaaaccttactggaggaaaacaaaagggcgtcatgtaagaagtcccaacttacaaaaaagcaagttagaacttggagggtaaatcttgccactagtttttactaatatgcaatgcctactagaacaaatccacgttgcttgtgggaccccgattgatgggaagcaagaatttaccattggacctcaattagacattactctagaaggagtaaaagcattaggagggtgacatggtccttaagtgttgagaatcatggggttccatctcaaaaccaattggcaatgagtggagtagcccatgttcttatatatggctcaattctctaccatttattccatgtgggacattgtccacaata

SEQ ID NO: 393661 - DNA, 1746 bp, Cannabis indica
taacaactcttgaagtaaggaatgattgcgggaagggtcataagtatctcgtcgatgaggggggaccatggtttccaccaagatcactattttgcaaccataagccattgtgtattttgtgtgtcttgttgaagttctctctatcatctgataggcccagagaactcaaggaagttcttttagctagtgagctttacaagctttgattttttttttcttcaatgtagtttttaggattttattaacggcttcctcctgcccattggcttgcggtcgggctacagccaaaaagcttttcactattccattctgaacacagaagtcggtgaagtgatcactgtcaaactatttttcgttatctgagatgattttgtatgtaagttcgtacagacacacaatgtttttaataacaaaatccacaaccattttagaggtgacagtatcaattattttgggctcaacccatatggtgaagtagtcaactgcgacaatcgcgtacttgactcctcttttgctagtggggagggatcctacaaggtcaattccccaaacgttgaaaggccacgagctatgcatgagcatgatctcaatgggtggtgctctgcctaccgttggcattggtcacacttccttacgtactccacataatccttcttcattatgggccaaaagtatccttgtcaaaggattttcttggaaagactgggcccgaaagtttgatatccacaaaaacctccatgtacatcatttattacagcgctaacttccattctggcaatgcacctcaaaaatggcatcgatattcctcgacagtataacattcatctaccttatccgcagatagctccccagtactcaagaacttgtaattaggcaccatccaggagtgtgagttatccactatagcatttacctcttgatttcaatgctgagtctctccaaatggccaaccagaactaccccttgctcgatgatctcaaaatccgttgccaacttaggcaacatatcaaggaatgaattttgttctctcaaaacttggcggatgttgcaacttttaaacccttgcaacaactcccaagacatcaagatgtatgcagccattcgttccccctttgtttggtatttaccagagattttgattcaccaccagatgtgaatcgctataaatatcaacctgctgggcccccactttcttagccaacttcaagcctaccaacatggcttcatgctctgcttaattgtttgaggcatgaaatccaaagtgtaaggcactttgaagctggtgcccctatggggaaattaagatcacctcggctctggccccattttcattagaggctccgtccatgtagaccttccaagtgggtaactcaaggactggatcttctaggaggtcgttgaagctagtacactctaccacaaagttagcaagagcctgtccttttattgacacccgcagctggtaatggatatcaaattggctaagttccatagcccactttaacaatctacaagaggactctggctttgaaagcacatggcgtaggggatgatttgtaagtactcttaaggcatgggcttagaagtatggtctcaattttggcgatgtagtcagtaagcaaaaggtcaatctctctatcataggttatttagattttgtacccagtagtcttttgctcacataatacaccagatactggactttgtcttcctctctcacaagtctggcgctaatagcatgatcag

SEQ ID NO: 393662 - DNA, 558 bp, Cannabis indica
atgtaaaatttcaattgaataatattttatgaattactttgatttgaaaataatggtaaataagtaattttaatttattatttttataaatatatatataaataattgtggattaacttgaattgaattatgcaaattaaaatgaattgagtatttatattaattaaattttaactcaattaaaatggaaccctaatttaaaaaatatatttttgtaagaaagtgaatataatattttcatactatatatatctaacttaaccatatatttataaatatcatcttttattataaatatatatcgtaattaactaaaatatatatccaattttttttcaaagagagaattccccgcttcgattgtatgtgagtttgcccctgcccgatcagaggcaaactcacataaaggtgaggtagaacagtcgcctcccttaaaaaaaaaaacaatagaaatttaattagttacgaaatatatttataattaaaaataatatttataaacataatattagttaagttagattacatatgagttttttttttttttttgtagttatt

SEQ ID NO: 393663 - DNA, 1156 bp, Cannabis indica
aatttccatggatcaataccatcaactctatgtcatcttcagcctatacaaatattagatatgtcccataataatatacatgaactatggtcgaattatctgtaatttctcatttcgtcaatgcagtaatctatcataatgaccttctctcttcacttcgatatttaattaatgcattggtaacttggaaaggaaaggaatatacattccaagaatatttgggattattgagaatcattgacctttcgagtaatagattgattggagatattcccatggagcttacaaatcttgtggaattagttcaattgaacttgtcaaggaataatttgagtggatgcataccagagaatattggcaacttaagtaaactagaagcacttgatttctcccacaacagttttactggcaaaattcctattggcttgggggaagtatctttcttgcaatacttggacctttcgtataatcatttgtcaggaagtatccccacaggtactcaattacaaagtttcgatgcttcttcatatgttggaaacgataaattatgtggacttcctcttttggctgaatgcgaactagttcgtccagttttcaagggtgatgaccctcatgatttagattttgatgatcaaagatggtttgacatgtcatggttttacgttggaatcgaagttggaattgctctcggttttattggagtttgtggagctttgtatagaaactcattcttattggatgcttgcttgtgtttgggggtgttttaaatcaatttggagattggctttatgtggtgattaacattagaatttctaaattgaagacataccttcaaagctagatggttagtaaattttgtcttcttttttattacaaaatataagtataattattattaaaatattgatccttaatgtgtttaatcttcttatgtatttgcagattcattttttggagatctcatcttggagaactggcaataattttttttttgtataaaacataaatttgtttcaaagggtggtttctagcaaaatgtctgcacattttgttggtgatgatctttaattatggccatctgattttgattttattattgtgtgagagattacaggtgcattaattatgaaaagtaagatgaagacaagtgtttgac

SEQ ID NO: 393664 - DNA, 755 bp, Cannabis indica
aacattattaaacacatgaaaaaacatgtcgataaatgttgtaaaaataaatcgtaacatatcggaaactaagtcgtcatatatcgatagtaatcgcgaaaaaaaatacacataatctgtagaaaatattccctaagctgtcatgaaatgtcaacaaacaagtcgtcacatgtcgtgaactatagcagcctataccaaacacccaataaaaaatacctaacaaaaaaataccaaacacaacaaatttttttgcgatatctcgtgacaatatttatgatgttagacagcatcaagactaaacatgtcacagattgacatcacaaaaaacaaacaactactacattttgttgtatctggaaaaagaaatcaataaacgtcacgaacatagtcgccaaatgttgataacaagcaaacttgcagattttaaatcgtaaacatgcaaactcaacccaaaacaaaaaaacatgatctaattcattcctaacaatctagcatttaagatcaaaaacccattttaaatcaagtaaaggtttagaaatatactttcttcttggtaatttcattgtgggtttctcgattttgttgggtttcgtgatttcgttgtgcgactctttagttttcatggttgagatttcatcattggaggtcgtgggactcgttagggtggctaggtttcaagtgggttatgtctagtggggatggtggagtcggtggtggtggatattcttagtgagatttagagagagagagagaga

SEQ ID NO: 393665 - DNA, 1147 bp, Cannabis indica
actagtggtgcttaatatctttctacgtgtttatattactattgataaaattcaatgatacatctctcaaaaatagatgcatcaatacactctctttgttatttcgataattttaatctaaatatatgattatacaataataatgtatattgtaattattaaagacatattccaatactaatattatggttagaacgtgtaacactttttaattaagggcctaaacaatgacttgagcatcagataataagagcaagtaattctccttcagctgcaaaaaaagagtggcagaccacagtattgctttcccaaatgtcattattagcttggtttatcactacaggaagaaaataattttattaatcaaccaatctatatacccaacaaaccaatcagttattataactgttgggattaaaactcatttaactatgtcaagtcagtagatgtatcttaacattcattagatgaatctgaagaaaattattgttagttataacagttggcattgacaccaatttaaaatacacatgtgcctctactctctcaacacaacttgaaggctcatacttcatatttcagactcaagtttgagagagagagagagagagagagagtccaaagatcacgaagtctgtgtgtggagggatgtaatgggagtatgactcttgaagtaatttctctcaatgtgagacatttctttgtaagtgttcactgtattgagttgtaatcttggacatatcccatgtgtactactatctattctatcaataaagattcataattcattcattctcgagctaagttttattctcttctagtcagattttgattttgtgattgattctagttttagttgtgttttcttgaacatcacttctgttgtaacagtagtgttttgagtgttttgagggtgatctttcaccacaataacttatttattattgtaattttttagaatcgctatgagagaacttcctatgctttacgttttgtaatcaatacaaaagtatcattttatctctttgactatgtatgtatcagaataggaaaaaatcattatgaacacactcatttttatttctccacaagtaatagacaatagctgctaggaaagtagagactaggtgccgtttggtaactactt

SEQ ID NO: 393666 - DNA, 1041 bp, Cannabis indica
tgttaagagggattaaaaataatatgtttggagagagaccctctccttccatctctcctctcccttcttctctctcttgccaaacaaaagaattctccaacccctctatccctctccctccacccttctccctccatccttctctttcctctaccaaacatagtgtaaagtaaaaaaattatcttcccttctatgtggggatcaaattcaccaattgtctcagaatcgtagaagtattttgctcatccaggtcatccgtcctcaccatatcctccataccacactacataagccagaggacatcgccaaaagtgatgatcaacgctttcttctgattcagtgcacaacaagcaatccttataagagagaaaataagtttatcacgagtaggtaaagcaccactagacgctttttagagcatcaagttgttctttggatgcaaatttagagaccctatatacttctacaacaactgatataacgcattaattacttaggaataagagatgtcatgagtgtgattttgtaaactagcttataataagttcaattttagactataatataacgcattaactatttagaaatgtcatgtgtgtaattttgtaaactagcttataataataaactcgattttagactataatataatgcattaactacctaagaatgtcatgtatatgatttggtaaattaggttatcttaataagttcaattttagactatgatataaaacagtaactacttaggaatgtcatgtgtgtgattttgtaaactagcttattatcaattttagctataaaattgtgaataattaaacatactaattaaaataatggaggaggtaatctaggacgaagaggaattagatccacgagtgagccaaggtgaaaagaattatcgaaccaatggaagaggtagaaaaagtgtgcatcaacgatgaagatcctacaaaattatcaaaatagggaagaatttgcctcttgttgtaagagagaaaatcttatcaattgtgaagaagaacagtgatgtgttggcat

SEQ ID NO: 393667 - DNA, 1132 bp, Cannabis indica
ttagtcataacaaattataatttctatgactaatacatttagctgcggacctgaagttaaaacaaatgaataataatttataattagcaacaattttttcacttttagtcacaagctttgttgtgactaaaagtaagatttttgtagtgtaaaattgaatgaaattagaaaaaaaaaattaattctaacaatcttaatagttcagataacatttttaacaagagcataatttggtacatatcaatgaattaatatcttgaatgatgtactataattgcatttaaaatattacccaaaaaaattaaaatataaatttataattattatatgtcatgccgtttatgatgataaaaaatcataataaattttcatgatatacacttagttggcaaaatattttttaattaatttgtatttttattgtgataaattcgtgtcctaattgctttatttcttatatggaaatatctattcccaactggttgtatttatttaggaagcttctcttcgaagagaagaaattttctatatggaaaagttacctattttggggatctttgtctctttcttattcttaaatgattttagttttgctttgataagatcagatcaaacaaactatatttggtaggattgaaattcaaattcatgatcatggttcaaattagaaagtttcctttctgatcctaatctactgctgccgagtccaattttgatgctccaaattaagaaattttttaagaaagtttcatacagttgagaaatcatttttgtggctgtctctagggttgttatattctataaatagaagctagagagcagccaaatattttacctcttctagcttttcatttttgcataatttttaatttgtgaggagagagatctttttgtgagaacctagttgttcaactaggttttagtgtttatgttattgttcttatactactcttagggtcggttgaacaacttgattgaacaagagaaaggtcttcaggaggagactagttcaatccttactttgggaggaagtaagcactcacacatcaaagacgaatggagttcgttgtttggtgttgtttcaaaattgaattacaaagaattacggtaaagatttagagggagtctaaac

SEQ ID NO: 393668 - DNA, 805 bp, Cannabis indica
gtacatattagctaaaacaataccattcaatacttctccctcagacttttcgagggccaagacaacaagtttctgatattgcttggccaactgaagttgccacaccaggacatgacttcctggatgattttctgagtgaagtagcagctagtgaataggtgaatgtgtgtttccatcacagtgcagcaaacaggacaaacatctgtaggaatcgacattattctgcttatattatcccttgttggcagttgttcattcactatttgccaaccaataaatttatgttttggcaaaatcattctattccataggttctttgcatagccagcaatctgatcttgcacaaaagagacataaaacagtttagactgaaatttacctttcctctccgctgacttgacatcatcttcaccaattaccgagcggagacgaagaagtttcttgtagtaccaactagcgtcttgtttaaaatcagcaacccaaatactttgacccttcaagtatatggcttcaatccacgtaacccattggttgtcttgtttgctcgagatggaccaaagatacttggccataagagcaacatttcatttcttcccttccctaaaaccaataccaccaaatttcttggggaggcaaactttctcccaagaaggatgtgcattttgctacagtttccatttgagccccaaagaaagtgcctacaacatttatcaatagccggagtgactttttggggaagcatgaaaagattcatccagtagttccgaactcccaggaggacagaatggatcaactgagctctacc

SEQ ID NO: 393669 - DNA, 1712 bp, Cannabis indica
attacaaaacaaattttaaaaccaaaataatatagcaaaaaaaaatgatattataacaaaaactttacctttgcaatggctggaatgggcggtacaatcctcggaaaaaactgagcagtagccggagatggaggaggagaagggggatgggcgccggagatggaggaggagaaaggggaattttttgaaggagcagtgggaattttgtttgaaagaaaatggaaaatatttttagacttgggggcggtattttctacaatttcattcccgccagtaataatatgggttccgccggtaataataaaacggtcagactccccctgactattactggcggaacccgcctctactaatccgccggtaaaagttgttttaaattttaggcggtcaaattcccacccaagaaattagaggtggaatttccaccggtaatagtgtaatctgtcggtattactattttttttaaaatattaagtttttttttaattttaaaaaattaataccggcgtattaccaattctgccggtaataaccaattaataccggtagtttggctccgtcggtactaattctgtcggtattacatgaaattgttgtagtattttcgtgtgaatatttttatttaaaatataagataattattttatataggtaattttttaattttttttttatatttacagttactttagtagttgttctgatagttttatgtgagttgctattttagttacgatttaggttgctctactgattgttttgtaggtttctatgaggatttaccttaaaaatatatataaataaaaaaaatgctttaatttaaagtagtaaaaatttaaaaaaaaaaaacaatctaatataatatttcaaaaaaaaattatttttatattttttttttacagtaaagttactaattatacaaatatattgtacttaatttttatgaatgttatatgcaaaaaaaaaaaaaattatttcaaacatatatttatctttatatataaaatgtgattacataatagaattacaatttaatgtcttgattaaacgttgttagttttataaaaaaaaaaaaaaactttttcattgaaaagattttatggttttttttttttgtgaaattaacgtcattagcgttttgaaatatggcatgataaacaataaatgaagtagtttcttgagagggaataaaagtcaaaaagaaattcgataaatggttcagtagcaacagtactcacgaaggagttgttaacaaaaattatattataatggattttttattgtcgtaaaaagtgatttaattttgaacaggattccttcactcgtctccatacatctgatgccttcttgtgactctgactgaccacaattggcctttacagcttcgatccttaaaaccctaaagcttacactgtttcattttttctcttttcattcaaacttagtaacaacaatgatgattcttttaggatcattggattgtgcaaagtataacaaatacatgtcttgttggctccccctagagatgggtttgagggcacttgacttcaatagggctgaacggggcttgaaatgtaaggaagaatactttaactaatatgtaaaataattagtccatcaaacgagaaaaataaataacaaaatgacccaactacaaactagttggttataaattttttataactaatatttattgtgattgatatctttat

SEQ ID NO: 393670 - DNA, 772 bp, Cannabis indica
aaaacatggcggacataccatccgaaccggggcttttatctggccccattgcacgcagagcaacttcaacctctgaacccgtgaaaggtgcaagcagcaggtcattcaaatcaggtgtaaccaaatttgggattgcaagcaaggttgaatcaagagcttcatcatccattggtgacatctgaaaaataccagcaaaataagattcaatgacagcagccatgccatcattagatgaaatccgagaacctgcagagtccaatagaaacttaattctgttattagcctttcgagaagaagctttggcatgaaaaaacttggtattacggtctccgagtccaagccaatccacacgagaacgttgttgccaataggcttcctcttgtgccaataactcatcaagaatagattcggaatgtttgatttcagctacatggtcccaggaggtggctgtaacattattaagagcagtaactctttgttgtgcttttttaattgaagtcttcatattaccatacttccgaatatgccactgctgtaggtgattagcacaagtatccaggttgtttttgaaggcagcaattaagtcaatagatgaattcgaaacagaccaagcattggagataatagtcttactgtcagggtcggatagccatattttttcaaagcaaaatcgacttcgctggtgtgttggttgagtagcggatgtgggaaggctgaaagtaaccgagagagctctatgatctgaattgaaaaaatccagatgctgtaagtg

SEQ ID NO: 393671 - DNA, 843 bp, Cannabis indica
  modified_base (47)..(47): a, c, t, g, unknown or other
atcccttgaaaatagggaagatgatgatattttctccctatttttgngggttgtcaaggtccaatttgctacttaacttgctgtccacggataaaggctgcgcacgaaaggcctgctaggtaaaagttggtcgaccatgcacctgccaagtgtaggttggccagccacacaatgcctgtaggttggggtctggtcggctatgctcctaccagggtctagctggtcatgttcttgctagggcctggcaggtcatgttcctgccagctttgcaaatgttggccagcctttgcatgtgttggccaacctttgtacaacttttccttgtagaggtcaggttttcttagtcgaacggccccctccttggtcgaaaagtcacctttggctagccagcttgtgctcaaacccttgccggccatataagctcatcctagccggcctatatactccttttggttggctagacattgttgtgcaacttcttggcggcttgcttaactcctcttgcttgttgcttgatgattctaccatgccttgtaaggagactttgtcctgctatgggcaaggatgtaatcgacatgtactctgtcttaccttgtgtggacatgctacgtcaggtggacaaactttgagataacggattggttcgggtcagttagattggatttaagattttccccctagtaacaacactaatgctcatattgcaagttcacatttattctaactagtgctgtaaatataggtcgggctttttgacacaacacgaaattagcacgagcccgaaaggcacgagcacaactaggcacgaaaaaatacaggcttggacacgacacgacacgaaaa

SEQ ID NO: 393672 - DNA, 1942 bp, Cannabis indica
ggtaacctcctttaggtatttctaagctcatactgtagtcatactacttcacggatcttgctcgtagtactcttctcatatccttgttgtggtttttgttgtgatcatacctttagctcatctttgtgaccttcctagtcatcctcgtcgatgggatatcggggacgagctctttgtagtgatggtattcttagtgaagatggttgcccacctccaacgcttcctcgtcccccacgacacccacctgagcattttttttatggagccagttctcgccgtcgttggcggcattgtcgctaccatctcgagtaggtggtttgatcatttcatttcgagttgcaaccattattgttgatgacaactatggtaaatctttctttagctctcaataaaaataccgaaatgtttgtcaagatctttgaaaactgattataaaagaagaagaaaaatagatttttacgttgttaggcattaatgagccttagtccacgagtcaatattattgagctataaaagcttcaaagtactcttacacaagtgtttttgccctagcttaagaaccttaattcttagctcttgatagtagaaatgatttttcaaccctttgcatgaacggataatgttctatttataggctagaaccgggtatggatgaacctggactcggtaggatttaaaggtgtcaactaggcccacttatggggtaaaatacaatatatattgactttgagccaattgagtgaggcccaattcacaagataacggtcacccatatgagtggggaccatttagtgatgtcaggtgtcatgtgtgttgtgttggtactgagaatgttcgagaatatggcgttggacaaaaagatagtttccttttagtggtgcgcacactccctgggcctgacattggggacgaacccctaacatagtagggccctatgtctggaggatgccgcgtaggataatatttagaggctcttgaatgtctcttcaattacccttattcggattatcacatgagagtatcaatattaatcctaatggaccatttcgccttctgggccaaacactatttctcgaaccaaagtggtccgaccttgttgtgtctgtaagctggacttacatccagattcagagacgtagtttgactccacatgtgattgacttattaacttgattgggccaagaaatgggactactttgattgatttcgggctttgaaatgaatatgtcactaattcgaaaacgtggataacatctaccatagacatattccataattgtatagcagaaaataaatatcattgaaaatatgataaccaaatttatatttcaatacagcttagatatcaaatgaatatttctcttaataaaaaaattataaaagaagcacttttaaaaaggaaaatttatacagaaagtcaatttttagagatattgtaaattgatttcctcagctcaatttactgctgagattttgatttctttatatagaaagaaagggccaaaggccaattacaaacgtgagcaattagcttaaatacagctggcagaaattaggtaaaagagaatctttttcaaatacaatgattggtaacaaatcataaattctaacggtaaatatcctccttaatttcagcaatagaagagtgtgacacgtgtccaatcattggaccacatctataacagaaaagattcagggatcttcttctcgattcctttgtgaagagaatagcttctctgcaatgcagagtagtgtaaatcaagtgcattcctctgtttcattttctttaacatcccctctcaaatgcagggggaattcatgactccaagtttgtcgatgaggaaatgaaaccgtgagcttgtcaagcctttgtcaaacaatctgccacttgatctaaggatggtatgcatctcacttctagttcttttctaagcactttatc

SEQ ID NO: 393673 - DNA, 1120 bp, Cannabis indica
  modified_base (8)..(8): a, c, t, g, unknown or other
attgtttntttgttttttgttttttttttttttgcgatttcagagagggaaagagagtggggctggggggtgcgaagtttgggtggtccgagagaggggggctgggtcgagggtgttggtgcgggtggtcggaggtggtggtgagggtcggaggtcggaggtcggaggtggtggtgagggtgggcggttgtgggatgcgagatagagagagagatgatgcagagagagtttgagggaaagagagagaatgggtttgaattgtgagggggtatttttggggttttgaaaaaaatgtcatagtttttttattttgaaaagttttggtttaataataaatttttttaattttttaagtatataaaatcaaattttcctttcaatatccataaataatatttcatatcatcattaatttttttccggagttgagagctaattaattaacgtttgaaaatacagccagctaataacatcagccttaattgttatgaagcaacaaacatatggtgcccatgcaaaacctgacattttataaggccaactttaatggacatgacctatatacaataacaatatgttaggtggactgaggcaactatttttgttgaccccattaaaaatgcctttaagtatctgtttttcgaatcattgttaaaataaagttaatcccatgtacgtatttgcatatgggaaacaaagttcagcgccggctgggctagccaaaaacataaaaataaagtttagttgaagggttcttaattaaaggcttgttttgttccttctttaagaggcggccggtgttataagtacacacaatttaatgagaatgttttgaaataaaaaactgctagtttttatcaaaataaataaataaataaataaataaatactattttggatcttatattttacaaaagttactaatttgactttttattttattaaatgaaaaaataaatcctgtattttataaaatagtactattttttattaaaataaaatttaattataatccgatttaaaaatactatgactaaactgcttacattttttatggtgacgtttggtaacacttttttaatcagttttctgtttttaaaagtagaaaagtaaaaatatt

SEQ ID NO: 393674 - DNA, 900 bp, Cannabis indica
acctattctacctagtattcatgatactcgtataggcaacagttttatagactctcgggaattttttacccgacggtgtacaactatcaagaattctagatttttcagtagtgtaactaattgcagcttttttcaaattcatttgatggtgttaagatggaactactaacttgggagagattaaatgagtgtaatcctaacatatagttatgaagttgttccatcttttttttaaacaaaaacaaaaactacattaataaaaataagacgagttacaattggagaaaattgtcatttgagtctaagctattaggataagagaaatgttaaagtgtactcatagtgcctaacatttttgtgaagtgtaatatcactatttgtacaattcaatatcgtatcctacttattttactttaataaaaattagcattttggtgacccataacaatgttgttagtataagtgtttttgcttaatgatcaccctttcaccaatcaacatgaggtgaaattcttgtactcaaaaagcaactaattagtgtaacaccctctaaaatgtgaataaataattttcaatgaattctattatttgcattaatttccattaacgtatattactttaaatctcgtagaatcgtagttaacgaaaaatctacatatatttatgttgactcaaaaatttaccctaaatttctaagccacacgcacttattagattggtgataatgaaatagttgttaaataattataaaagagacaaataaatttatagtagttcactccctatatcgtgatagtaatagagctacatctaatttgactttttatatctcacgagatggtattacaaaagaggctaagtgtcagaagttccaacttctaaagagagtaactagagaga

SEQ ID NO: 393675 - DNA, 1024 bp, Cannabis indica
tggttgattgataggggtcatagaccactgacgtgtagagatgcatgtaatgagtgtgcatgtaggtaaaattgtaatacaataaaatgaagaataaaaagttgatttaaccgtgtgtatgtatatatatatataataaaatatgtattttgtatttttttgtataaaaagttctaagttttattatttttaataaataaaatatttaaatactaattatttagaattgttataatagaagagtaaatcaagcaatgcaattttaaattaaataatctaaaagtcaggtatatttataaatagtatatataaatatggtatattatgttttatatgagattcttataattattttatgttaaatctgctaaaaaaaataagaatacaagtgttatgatatttatataattaagatatataatacttattaaaacgaagtttttccaatatcatatttacacacaaagggttccatgaaatttcctagacatcaaagaagactataaagtaacccgacagacagtacgggggttatgctttgttaaagtacaggcaactttataattaactgttcaagagagactcaacacaaactttaacaattagtatatgttttaattatagtatctttaaactgactaactagaatagaaaaaagatgaaaaaaaacagtagcattaggagatagatatgctcgacagcaacagcactccaaatgttaaaatttgagaagtcattttttttttaacagtgggttctgacagccacattcaatagcaattcattggagttgcactaggcgtttggttaggaggaatgaaaatataggaatggaaatggtaatgggaatgagaataggaatggaatggaataaaatttaaaatgcataaaaaattgataaaaaaatcattaaattttttttcttgttacattggaatggtcattcctttctttttaaaatggaatagtcattccaccaaaatggtggaaagagcattccattggaatgctattccaatacttt

SEQ ID NO: 393676 - DNA, 779 bp, Cannabis indica
tgaatttttttaggttgttaaaaatactctccatactattaatattgttggatttaaggacttttgttcaattttactaatagatgtctaacgttgatgaaagtccagggagtatgatttggtacatatcaaatttcaggagatataatttggtagatgtcgaaatttgggggtacagtttgatacatggacaatcgcattttagtaaaattgaacagagttagatgaaacttcatgactcccacaatttcaatagtttgaggaggatttttaatggatttaaatgttcaaataaaagaaagaagattttttttaaaaaaaaaactaagtatacagttaaaaatatatatttttttaaaatgaatataaaataaaaaatatcaaaataattgctttcataaattttagagttacaaataaaactccctaagtaaatataatgcaaaaaaaaaactcaagacaaaaatatccttttcaatgctcatacaatgcacttttagaaggagtctatcaatgcactcctatttgtttgagcatcccaaataattttttaattaatttttttcaaaagttgtaatcatttaaaatatcttgtaaaattttgaaaaatttgtataaaattaacatgctaaaaatagaattcaaacagacctaaatttatttaaatttgataaaatatcaatcaatatatatatatatataaagaagaagtatgagacagtgacatgtcattttaaaatcacttcaaaattatttttctcttctctccttaattctct

SEQ ID NO: 393677 - DNA, 1509 bp, Cannabis indica
taatttttattttacataatatacatttattttatataaaatgtcgatatgtaaaagaattattaatttaaagatattttttggatttctagcgttaatagaatatcttattacttaacatgctgaagggatggatgagggtgaagaattgataagggaaattgatgacttcaggagtagtaatgtgatgtgcatcaattatcttttcctacattattagatttaatggcccactgggccttattttcggcccattttcctctagggctagttcccttcttttactataaatacatcttttgtatttatcattttattcttttggcacttcagccgtgtaaaacaaaagcttcagcaataaagagttttccattttatcatggtatcagatgtaacaaaaccctagcctccatttttctttctccttcctttcctccatcttcttcatggctccaagaacaagaaatagctccatagccgcaccatgagtgaacagtcaccacctcccgccgccacatccactccggatttatcctccgtcaatgttgctgcaaccgacgttgccgctccgccggcgtcgcttccgcctgaaactgctccatccttgtcggacacgatcggagctcctctttttatgtccgatcctcccacttctcgtgtgttcgactccggtcacgttgccgatctccccatttgtggaacgatcggacaatcttcaaccgctccgatcggttccagctcggcgccgacgtcctccttcacggctgctcatcatcacattctgcttccgccatgctccgctcaaaccttcatcccgacgactccacaaaccacttcaattttttacggcaccaccactatccccgccaccaccttcggccaaccgactgtcccgaacccctcttttcttggtggtaatatttctaatcttggacatcaaggccatgcgcctcttaatgataactctttgtttactgctaatcacggtttttctcgtgctgttcttgatcgaccttcccatgatgaacgtactttgtatcatctaggaactagagatcacccaaataacctcatcgcttcatttctcttaactggtcaagaaaatttccagtcatggaagcgtgcaacctctattaatattgctgccaaaaacaaaactcccttcattgaaggcaccataccccgtcctcctccaaatgatctatctcgctctgcgtgggacatttgcaacaatatgatcatgtcatggattcttcagtctgtatctcgtgagatcgctgctagtatcatgttcaaaaccaccgctcgtgagatgtggactaacctccatgaccgctttaatcaaagcaatggtccccgcatcttacaactcaaaacctccgttggcaatgtcaaacagggtgataattccgtcaccacttacttcactcaattgcaagctctttaggacgagctcaacgaataccaacctaatatcccctgcacatgtggctgtacttgcggcgcgat

SEQ ID NO: 393678 - DNA, 924 bp, Cannabis indica
gtaaaaaaaaaataaaaaagcccctaaaatttaattatgtgaaattaggtgacctttgtgggaggaaatgagatagaatggaatggaaagaaataacttttattctatttctttgtttagttttattttaaagtattagaatgtatttttattctagctatgtttttctttattctagacaaacgctatctaatgggatatttattatatgagttagagttggaaagagtagagttgaagggagtagactttgagggaatatgaaactcatgcgtttgataggattaacattaacaccattttaatttaaaaaatgagacctactttgaaattttacattctcattctcaccaaatttaaacccgccgtttaataatataaaacaactaatatgtcactattaatatcatgttatttgattttatttacactaataatgatgtacgtgatagcttattaattaccaaaactaagattattttgtcaaacaccattcattaattctatatgatctatataacaaaaaaagcaaattaaaggtgggagatatagagaaaaagatgtgttctttcacaattcacttttatcaagtcaataatagtcatataagttttgggtagccaaaaagcaatatgaatacccaaatttaggggcatgccaaatcaatttcattaacgcatgaagatgatgcctttgtgcctatttctctttcctttggaattttgtatgaagagaaaaacataaacatgtgagaaacacacttcatttttatagttttttatggtaaactacaaatatgtgatttttgtttaaattaatgtataggaaaaataaaaaaaaatgtgagaaaaataatttaactaacccgttatcttatacaatttatatatatatttttaaatttttttcataaaatatttcttt

SEQ ID NO: 393679 - DNA, 1080 bp, Cannabis indica
tattacaccattgtaagcaaaaagagaaaggaaagaaaacaaaagtgaaattttcatataaatttgtattgaagattttaatttattgttaatgtaacaaacaaaaaataacaaaaacttattataattattaaaatacaaatttcaaatgcaaaatttcaaatgaatctgattgagtttgatacataatatgatttttataatgaaaatgagttcatattcattgtattctaatccaacaagattacattaaaaaaaacaaagaaaaactccaaatctagtaaagtggagggaactataaaactaaattctaaaaatgaaaatacaaccgataagaaaaaaaaatattattagacattattattttttacgagtaattaataataattattaaattaaatgatattaaataaaattataacaataattatgatattttaaactataataaaattacgataagatacaagtaatttctaacattatttataggttagtaattagcgatattctttaaaagttattacaatgatataatatgttagatggtgctaaataccactgatactttttagcacttctttaagattaatgttcaaaggcgccagtagtacttaacaccctcctaggtgttatattaataaattaattaaaaggtaaatagcgacacgaatacttaaagttttaagtttgtaagtgacataaacttaatatttatttttaacggcataagtattcgatatttgtaaaactataattttactaattttatcattatggactttgttattgtcttaaacaggacacatataagactcaaattttaataaaaacatgtagtattaattacttctaaagttctattaataaattcaaaacagaagaatttatattaataaaactgaagaaaaattatatttttacaaacactgagcaaaacattaagtttattctactaataaacttaaaattttgaatacttatactattactaggtgaatgtacgtgccgagccacgtattgatagttttatttaagattttagtctttttaagattttgaatatattttatttttaaa

SEQ ID NO: 393680 - DNA, 1478 bp, Cannabis indica
gacgataataaataattaaatttaactactagttacaaataaatatctagtttaatttttggcagtataataataactaacttatatttctgaaactctgactgttaaatttcaagtcgttatcacggtatatttaaattaattttttttttaaaaaaaataaaaattcatgacctgaaccaatcagggattgtcacgtggcaatttacttaccacttaacaaccaggtacttaaagagttctaaaaatataacttacgtattattgccgcaaaacattaaacttatgtatttatttacaactagaagttaaatttaaatatttatgccacgagttactctaggaaaaactaaagcaatacaatttaatatacatgtaaagaatggatagtacattctctaaacttattttaataatatataaataatgttttacttgtgtatattgtatataggttcaaaatttattattctaatagggtggaaaataaaaataatattcatttaatgatgtagctagaaaaaaatatattataatttgttacacatttctacataatttggtctagaaatttttatatacttgaagaaaaaattatctaagaacttaagagatttttagattagattaagtttagaatatattagttatgttaaactctagaaacatttagatttgtttggatataattccttctagtaaaagaaggatctatagaagaaataattctaaccataaagtgtaaggggtgaacaactataaataacccatcaagggttctaacatccaaactatcaataaagtttactactttctcaaacaactccatcttcaaagctaaagcattctcatattctaaatcaacgactactcatcaacatcattacttcaattaacataacaaccattaaacacttattcctcatatccacctattcaaatccaaaaccaatacaaatttattcttaaaccatcaaaatataaagagaataatatatagtgtaatgtaaaagtgtgctataaaatagataaattagagttttggtgatgtactttaaaggatagagtagaaaaactgttgggagtgctcttagaccgtgcaaaatgacatttatttaattacataaatgatcaaggggctgtgataggattccaaccctttacctatgcaaagaaatgcccataaaacttccctaccactataccacataacacatggtatgaattaaaaattcttagttttttgaatttaaagtttgaacaattaataatttacaacacaacctcctcgtttcactaactataacaactaacccattgttttagtggctaaaagattttgcatgaaaaatttgcataaaatcaatttttggtaagtaagttgcttaaaatgacattctatgaccaaaacgagtaaaacttgccaaaatctctcatttttgaagctttttctatttttccagcttgtacacttcata

SEQ ID NO: 393681 - DNA, 503 bp, Cannabis indica
tatatatatataattactcggtgtccaaggcagtttcattttatatgagtacagagtactaacgtgcaaatctaataaccatacgaaaacgaatgggtcgacgtatatgaacaagacaagaacttggaccctccagtttaaaagcatcttatttttttttattatttattgtaatatttataactagtcaatcagctacacactatttttgtttttaatgaattgaatgaagaatagggtagcaatggaataatttttttttttccttcacgagttaaatctagaatttgtttttaatgcgttttttttaaggttgtttataatgagttaaatctactgtagtataaaaaaattgaaaaatataattgcataattttataaatatttataatttaataattttataaatatttacaaataaattagatgaaaattacttataatttattttttaaaaaaatagtgtatctttatatattaaaagtgcctatctaacggcattt

SEQ ID NO: 393682 - DNA, 596 bp, Cannabis indica
atataatggtatgattaattaaaaaaattgagattttgatcatatatgggtgaccagagtaatgttgtaagctttacagcttaacactaatctgttctaaccaacattcacgttctcaacagtactgagcatgttcttggatccaaccccgacatacaatcagatttatatttctttgacaaatgttaaagggcaccaatggtgctagcgccctcttatgtgtcaatattttatgtgtcaatacgctatcggtccaactaagtatcggttcccatataatttaatataatattatagcttttaaagagtatcgctagccaatcgcaacgcgacatgtcgagaaggtggtaggcacagtgcctaatagcaatgctctattcctttatatccatttcattatcttatctgtaaactttcctataaatacaaccttacttaatttgctacagcagaacttttcaactcagtaatctgcaacaactatcgcaactctaatcagggctggccctaggcataggcgggctaggcccgcgcctagggcccacactttccgggggcccgaaataaaaaaaattatttaggcttttatttaagta

SEQ ID NO: 393683 - DNA, 925 bp, Cannabis indica
ttctgatgcgagccgaatcaagaccaagaagacacgtcgccgcctcaccaatcaacgggtctctgaagttgagtctggaaataatggcccaaaccaccgacccggtgtgatctctcgccagggccgccatacacatggagtctccaccaactttgcattgatctacaatatccatagtagtcttttcatatctacggtgtttacgtgaatgctgccttatgattattttaagataaaattatataatacactgaatttttttaaaaaaattacaaaaatacatcaacatacaaattttttatttgtatgctttaaactttttatattaacaaaaatagtttttcagtaaaaataataaaccatatttttagttattttatagttgccttataattgttatgatgttatttttccagtttattttttgttattttatattatatttatagttgatataaaattgatttctcgttgtttttagttatattttttactgtttgctaaaaaaaatgattttttataattttcaaactttaaaagtatatttttgtaaagaaaaattttaagtcagtaaaattgtaagtaaaacatacaaaaaagtcattttgaaaattcttcatgttttaagtattaattagtcatttagtggctgctttcaaattaagaattatttcacaaaaacataaaaacaacaaaaaattacaaaaatacagtttcatgatattttaaatatttttacgatttttttgattttatttacataaaatacggtcttttttatgttgtaatcttgttaatttgttgttgattttttgttatatgtatgttattttttgttgttactttcatgttattttgatgttatttttatgtagttttcttgttgatttttatgttattttcgtattattttttgaaaaaccgt

SEQ ID NO: 393684 - DNA, 2108 bp, Cannabis indica
ttgaaggttttaaggcttcaaagttaggtttagagatgaattttgataaatttagttctgaatatgttggatttgttagaacttgtttttagatgttaaattaaggttgtttaagtataattttgatgttcttaagggcttttaagtttgatttgagtgagttgagttcaaaactcaaaaactcactcaactatggtaaatttgcaattttagtgtatttctaagttttgaatgtttggatacgttgtatttatggtattgcgttattctggaaagtttcattaggtttggagaagttttgatggtggttttaagtgaaaaacctgaatttgggctattttgtaggaaaaacgccctagtatttttacagtgagctgtaaaaacgctcaatcgtttttactaggtagaacccagagaaacggtaggccatttttggaaaacggctagccattttagggttttctagtagctcaatttagtgtttaatcgagaggggtttattcggttttgagtttaaggccttttataagtttgattaagatatttatcaagtgtcgttgttgtgccataggattcaagatcgttgagcatcattccactcaggtcggccaacacatttgactttggattagaggtaagaaaagccaattcaactacttagcatgtcaaataagattcgattattatcgtttgtgactcgattataatcagggtaaagatacggtaattaccgttatttgaaatgagttattactcatttttggaaactgctgataggttccttacttatcgattggttaattaagcaacaatagtgacataagaagctcattggtaacgagtggtaatgatgctttataaagcataattgtctgatgttttatatggcaaatgatcgattattattactgtattacgcattgaataactgcttaccctatacgaatcattgtcataatgttatgctatatgtaatgtctttgttttacttacttttctttctgagtctttgtgactcacgggtgctctgtggtgcaggtaaggtaaaggggaaactggactagccatgagtcagaggtctcccgacaatgtacataccaaccctccatgctttggttttcaatgggcaggatcttcttttgtgatgtcttaaacatataacaacattttgtaacaaactaattttgtagagtaaaagtttgtaactaaggggatccccaaaaccagtggtattttgtaagtagagttttatttatgaattaagttattttataaaaagttttaattaaactacattttttaagccgttattttattattataaactaattaataaaagcacatatgtggcgcccttacgagttagggcgttacaacatggtatcaaagcgacgaaggtttaaagatcctgaagactagttgagtatgtaaattggatgtgaagactcgtttgactcatggtaattattagattatttattaattgtttgaattatctgcttatttgaatatatgagcaattagaaaagcatgacgggttataaacaatggatgttatgtatatgtatgtatggaaatgcttattagcattagttttgatttggagggttctaaatgttagaaagttaaggtcgtaggtgtattagattatgtacctgaggcaatccggtagggtcaaccgtgagctttctaggctcagggttggtggtgagggtacaaatcctccactgaggatgtccagctaaggcaaggccttataggccacatgaaaataaaatggactctaaaacagttagcaactactttattggttattttgagtaatctaggggctataagttttatgatcccattgtcagaaatatttttaagacgggaactgcaacattttttaaggatgttgaattttggtggagaaataaggttagcgaaattgcttttgaggaggaattgaattcaaactcagttcctacaatcattttagacaatgttcaggcttccactgtcattgatcaagaaatgaatctggaacctcaacaagacaattttgaacaagtcctaaatcaagatgaggttattgttccaaaagaacaaattcaacaccctca

SEQ ID NO: 393685 - DNA, 623 bp, Cannabis indica
tagtaatcctttactctagctatatatataattatttgtagcttattttaaggttgggaattgacgttaaaagaacagggaagcaatttaacattcggaagttagacctaaattaaattcttataagataaagacaccttttaaaaaaatatatatatataaattttttaaacacataagagtttgtgagcacgacacatacgatcaaaatagtgatatatataaaatactgaatcagttgtcttttttatttttagtgttcaaaataatttaattataatgaatattatgaagaatataattgtagaaaaatgtgtaaattgtgtttacttatgtaggataagaaattttcatattctcattaattgaattatattgtttgattgaccacaagaatcttatatattattttataaaattataataaaaaaatattttttattatttctatttaatgttaagtattcataaaaataaattaattatttgtaaaaaaatatatttattaattagtaaatctataattttattgcattttttattaattaaaatgaacatctgtatatatttattatgtcatttatcttcgttcgttatgctatttatgcacatcatctacataa

SEQ ID NO: 393686 - DNA, 892 bp, Cannabis indica
agagagagagagagaggaagaccagattgagagagacgaccaggggcgatcacatgttcttcttcctgtggtggtcgtcgcttggactagggacgatcgaagatggctccaataatgggccccgcagtgacttgctttgtctctcttattttaagcgtggaccagggacgaccgcgatggtccagtgatgggtcccttttttttttttcgctcccctcctccacatcaatccatttttctttctcgcatggctgatatccaaattcaacaacaagaccactgttttgattccctatcattttctttctcctcttctttgccaacaccggtggtgtctttatcgttgtttaccgagtttttcgacaaccaagttttttttagaacttaaggaagaaataacagaatagataataatgtaacaaataagagatttttacatagttcagacattaactatccttagtccacgagtccattttattaggctcatcgaccggtaactatttatacaaataactgtacttggttagggcaaggttgtaacattcccgtgcaacttgttgatttcctctcaggcacccgaccccattcttcgttgggaacttaaggcatgaatgaaatattgacgtgataacctttaggtcatataaggctggtcggcctaacatgacattaaaggctgatggaacatccaatatcaaaaattgtgccattacaattatgctcttcggagcttgcccaacagtgaggggtaggcaaatttgccctagaggtgcaacactctggtcggagaaaccatatacggactgaagacagggggttaaatctttgagctggagccccattttttcatgtggtgttttgaacaagatatttgcagaggctccattat

SEQ ID NO: 393687 - DNA, 1399 bp, Cannabis indica
aagtaaaaaaatctaacatgaatgaaagttcaggggcatgtattagtacatataaagttgagggctataattaagtaatatctaaagatctagggagctatggtttagtacataaacaatcactgaaacagtaaaattgaatgtaaattagacaaagtccttaaatctaacaatctgagtaattcagagggaatttttaacggacaaaaaagttcaggggacatgatttggtaatgtcaaaatttggggggaaaaaatcttgattagcctattttttattaagagattccccaccccgttcccgcccccattaggggaatccccgtcccataagcgggaatgaagattaaaatccttaatggagatggggatagggggagtactcctcgctaattccccgtcccatgtgcatccctaagtacaactcataacggggtgttttggtagactctctatctattttagtatccacaaaaatttagccttttttttttcacgatcgtgtacattgtacctatttaggattacatgtaaatttttaaaaaattatgaatattttataataccaaaaataaagtttaaatagttgtttaccacacttataagaaaaaaaataatcgcacgtgtaataaaatatttaaaccttatttacggcactgtaaactattgtattcgaaattttctaaagatttacaagtgatcttaattatatagctgcaatgtatattatcataaaaaaaaaatagactaaaaaatttgcatgcccgattaatgctgaaaaaagatagaaagtctaccgaaacaacttttagaagagtgtactatagacttacccttactataaaaaattttactttcagacacaacaaaacttaattatgaccaaaaatatataaaatagttatgactaattatagatcatcaaattattatgttgtgattaaaagatctgtggctaaaaacattagttacaaaaatcacaatttattgtgagtaaatatatttttaatcacattaatatatgttgtgactaaactaaattagtgacaacttctatctaaatactatgtactagttacaagtaattttttattaatgttgtaactaaaaattacatttattcacaattttttttattgtaactaaaaaattatcactaaattaaggtagctaatataactattagctactcaataaaacttcacattcaatttttcttatatcaaatctactcattcatcatacaagatacatatagcatctctattatatatatatatatataaatatatatataaatttatatatattcaacattaattattagaccaacgcatactcagtacctttcttatattaccatattattattactttatgtatatatatatgtgtgtgt

SEQ ID NO: 393688 - DNA, 793 bp, Cannabis indica
aaaatatatactagcatatccaattggaatattcttatctctataaaattagtactgatgattcatgtgaattccttccggtattctaactgcaagataacatatctaaaaaatgttagcgaaaaatatctaataacaatacttttttaatgagaaatattaaaagaaattagtggtgattagcacacacactacaagaaatgtcacttttgccagcatatttttgtgctggcaaaaatttagtattacgctggtaaaatagaatttacctatgatgtgttagtaaaagggagttggcaaatcaatgttagtattagaacttttgccagcataacataaaaagcgctggcaaaaaagacttttcctagcgcgtaaatatgctggtaaaagttagattttagccactgcaaatgtatgttggtaaaactttgatctctttgccagcacagtttttgaaatgtgctggtaaaagttgcttttaccagcacagtagcgatctgtgctggtaaaagtgacattttttgtagtgacacctaatgtctatattgttattagtccaactaagtattgagtcctatatagtttaatataatatttttttatagagtatcgctatccaattgcaaggcaatatatttagaaagtgctaagtgttacacatttatatgtataaactgaaacatatatgtttatgtataaaatgcgaaattaaatcaaacatatatacactatggataagaatcgaaataccttcagccattgatctttgagcttcaatccctgcgatagcttc

SEQ ID NO: 393689 - DNA, 1448 bp, Cannabis indica
atgaaaaataattttcttttgtgggtttttttgcaagccgtatccattcatatatatatgtgttgatttttattttgttattgattgttgatttctgtatcttgtatttaggtaaaatagatttgtgaagaacatatctattggaggtttggatttgtgcttagggtcagactcttccacattaaaaaaagtagccaaatcctacataaaagaaatagataaaaaaaaacatatatattgaaaaaatcatatataaacataaataaaccaattaggggaaaatatttaccagattagcagaaggttctgattgtagatcatatggaaccaaaacatatgattgctgcaaaacaacaaactaacaacattataacaaaaacaaaaaacaaacaaacaattaaataaaataaatgaataaaaaataaaaaatctaaaattttgcaacagcttttaaaccagccataatagcatcgtcatcctcaatagatagctggctataacctttgaaaaaattatcatcaaccttttttttttctcatcgttgacaacatcttttaatacctcaacatcattaccactatccccttcaccattaccatctatatcatcctcctcatcattaatgacacttttattatcattttttctccctgagaaacatcctcattcacaccatcttcattctcaccatcatcttccacatcatcctcatccccatgagaagcctcctcaatctcagcatcttcctcattatcatattcctcaacatcatgacaatccttgacataagaaaataaacaaaaatcaataattcttgaaaaataaacaaaaattaaaagtttaataacaaattacaaacaaaccttgggaggaggtcttgacaataacatgtcaatttttttatgcacggatttcaaaaaatgtatcatattcttaaaatcttcttttaaaatgaaaaatttagcagagaatgcttcctgcttagtagaaatatctgccaatctcctatgaaactctgcaaatttaaaagataaactattttcatcaacagaaccttgactaccaacatcatcaatctgcacatattttcctttccccatgtcatctagattcttatccacaaagaatccatccaaatgtaacctcaataattcttccttagttgggaacaaattcttgactttaagttgcaacaaacataaaacagaaaatacaacatgaaaaacacatagtataaacataaaagtaacattgaaataaattttttaaaactaaataccttggaaagagaaacactgaagatagaattcttgaactccttaacagaaggagcagtatcattagaccagttcagaattctaggaatacgagcatgcaatttagaacaatgaatgccatcaatataaacacaacattcattgaaccaaacttgaaaaacataggccaaa

SEQ ID NO: 393690 - DNA, 786 bp, Cannabis indica
gagagagagagaggaggacatatggatacataccgagaaaggaggatggagaagacgcttgtccaagctcgcgtgaaagagatgccagagaaagggacggagaagatggtagatcgaggatggaaacgggccagagtttcaatgtttgctccattggaaagaagaagaagaagaagaagaaagaaagaagggtggcgacggtagggtttttttgagaataaaatggagagaggaggttttctttcaaaagaagaataaaagaaatagaaaaagaaaagataaagaaaagaaatatagatttattattattattatttattattattattattttatttttataatttttaaactattttttaaataataaataatacgtggaccactaacaattttttcacgtgtagtgtatacgtggactgtccaatgtggcacttaatagaagtctttggacggaaatatagaaaacaaaacataatgtgagtttattaagttttactgtcaaaaaataagttaatgagtttaagtgttacaaatcgtaaaatttaaataattttacttctaatatccatatatatattttaatttttttttttgaaaggaacagaaagagcctaactctatttgacatatatatattttttgatttaagtatttatatattataatgcatatcttgggactccacccaatacctttaacacatacttttatggttacctgagtaagtatttgacttatattttactacattaaaaaaaaataacttaaatataacacacgacc

SEQ ID NO: 393691 - DNA, 579 bp, Cannabis indica
ttctagttattaaaacatctcattaaactattcttcctcctacatttttattacactatacatcaatttctctattttttttttctctacaacatttaaatattatatttttaatgtatttaattcaattaaaatattttgatctaaaatgagaaagaaagatttataaaataatagtttagagcatgaaaagtatttgagtattctgaataaagaagacaataagaatcaagtccaaggcttgaaagatgaaaagagacaaagcgacaccctaaaaattaactcgggcgcctagggttttcacccatcgcccaagttgacttttccaactatgattatagttttcgggtccgtcttagtgaaaatggtccaaactttgtactttgacatgaataagacttgtcatgaacatatttgagacatcagaatcagaatcagaatactttcacttttgagcacttgaggcaccaagcgccccatgcacctacctagtgcacctaatgcctaggttgacacagggcacttccaatcacattattgaagaagtatcttgagtattttattcgtctccatcaaaaa

SEQ ID NO: 393692 - DNA, 1208 bp, Cannabis indica
caagtagaaagatgtgaaccaaaagaggatggccctaggggccatccgggaatagaatttataatggcgtccaagatcagttagtgtcccgaaagtggatccacgtggcacacttataacacgatccgaagaaatcaggcgacttggcacctgtgtcacaggttggaaagtctcataacaaaaagaaaatcacatttttgggcaaacaccttactatttcaatattcattattccccacgacacatcacgcacacctgccactgtcaactgtctcttcgtgtaaggatgacgactatctccaaattgggtctcactctaatagcctatattatattgtatttatcccataagtagactttcttacacaaaacagaaccctaatgagaacgtgtccacgccgacccaccaacacattacttatatatatggcattaatccttcatacaaagagtgaggaattttagtgttcaaagaaccataaatgcattgtaaacttcatagccaaagaatttagcagcagtgtctcgtggactaaggcttattaatgcccaaatcacgtaaaaattagtgtctcattttcttctcaaacaaactttctttagcttagtatctatttaattcgatttctaaaaatcttggtattttaaatagtagtgatggattttttaataatacattttgggtatctaaatagttatacatatttttgtaattataactatttaagatgtaatttttaaaaattgaactaatttagtattaaactaataaacaatttatttaatggacatataaaataataaaaaatagaatatttaaattttatttttagtacgttaaattattatttttttttaaaaaaaaacttagagtattcccgtcaactctattccatttgtttaaatatctcattcaaaaccttacattttctttatgacgatacatttaacttttttatatttttctctaaattatttaaatattatatctttatataaaataaataaaataaaaaataaaagatcgaaagattttttttttttatgaaatatgtttatttctccactatttattaagttgtatgtacaaaaaaattattcttagagtttgagatgaggtataatcaagggcggagagaagggagggtttgtggttgggtgtacgtgagttagtttgatcggtttatgttacattttattcaacccaa

SEQ ID NO: 393693 - DNA, 1443 bp, Cannabis indica
attaattaatataattatgcaaatgtttacattttatatataaatatatttaattaagcaattagaatgaactgcaagttatgtttattggcatagacatatatattagctcactgttaatgcatgtgtggatgaaaaaaatatcaacaacactatttagaaataaaattaaaaaattaatcaactaccacattaataatatcaaattacagttatttaattaaaaccccatcaactacctcattagcaatttaggatgtgaagaatataatactaatgatcgatgctcattaattttaagtctctgaatgttataaatgtttacatttataatgttgaaagttttttatattatttgttttaaggtagatattattttagactgtgtgttttgcaaaagttatagattggactttatgttttgataaatgacaaaatagaccctatatatattttccaaaattgtaaaaataggacactcagcttgattttcgacaactttttttttaatataaccaacttgaagacaatttcgaataagaatagatacagaaaatataaacagttttgttataacacatttagatcggattattattaaattttattttgacaaaaaatcagttcagggtcctatttgtaccattttgaaaaatacagagtctattttgtcatctaacaaaatagaaggtctaattagtaatttttacaaaataaatggttcaaaatagtatttactctttattttactagcatttatttcattttcacaacataattgtgtaatatataagggtaaatacgtattattttaaattatgagtttggcaaaaattacgaattattttagtaaatgacaattatttcagattttgtattttataaaattgtaaaaaataatatttcaagttcaattttagttaaaatataatataataataacttgattattacattttttttttcttggcatatatttatactagaaactgatttcatctccgatatatgttaaataaaaaattaacaaaaattgagctcaaagtattaattgaaaattttatctttgtatatatattatttttcaaattcttaatattatttaaaatttccttattatatattataatgcgatgacccattttttattgaagactagagtgtgtattgaggtctagtgttgagaacacatggctccaacactgattctttttctctattattaatgttgattctactacattaatttagttacgatgagttgaagttcgatgaacttaagaagaatttgctttggtaatatatgatctgattttctagagttaagttttcaattatgttttagatttcatttaatttttttattattgttttttatatttattttatttcttaattaaccattttttaaggaacctacaattaactggcatttaacagcaa

SEQ ID NO: 393694 - DNA, 981 bp, Cannabis indica
aaaaaaaaattaagaaaatagtttctataataactaaaataatgaaattaatattaaggtggcactttatcttatgtctagaaatacaagaagttgcttattattttatttcttttttggcattattaacagtgcattttgatttaggctctatatatttttatttaatatataataaaaaaaatattaagtatactatgtattattattgtgggataacccattactatgcttattgataaacaatcttacaattacacctcttaattttgttaattagaccatctctactagtgtaaatatattttcttagatttaaattctatattgtccattatgcaaaactaaaaaataaaaagatattgttaaggatatagtggtacaattctttattattttattataccgtactaaattgagtaagacctcaaaccgcatcacaaattcagtgtagtacaatatggtggaggccatttacatgtaccatcaaataattcaacaaatttataaattaaaacattaattaaagtttatagccaaaaattcaacagcaaactatcaaacttttaacagctatgttacatacttattcaactggggttttgagctggatagtggattagcaaattttaaatgtagtgattaaatcggactgtcaagtgttagtcaacttgtggtgtgttacaaataaactattattttggtttaattatttgagatagcaaaatgctttattcatgcttcatttatttttatctaacgatatagtaacacaatcactgcttatttattactaggtcgtagttatagtaggaaggtggcttcttccttttgagttgcaaactatacttttagctaatttgcaaaaatatatatatatatatatactaggtgaatgtacgtgccgaaccacgtattgctagttttatttaagattttggtctttttaagattgtgaatgtattttatttttaaagatta

SEQ ID NO: 393695 - DNA, 1377 bp, Cannabis indica
attcaaacaatagtaaaatagtatgtcaaatatgtctacgtgctggacattatgcttctaagtgctacatttcaatccttccttccttggatttggttctggttctggttctcattgtcacccctctgctatgatagctactgcagaaactgtttgtgatgattcttggtaccctgactcaggagccactcaccattacacttcaaatgaagagaatcttgctcaaaaaaaatgactttcaagccaatgagcaagtgtacatggggaatggtgttggactgtctatatagaacataggtaagacacaattaattcttgtccatagataagtgtactgtccttaccctgaataacttattacatgttccacaaatcaccaagaatttgattagtgtataacaattttctactgacaatggtgtttattttgagtttcaccttgattattgctttgttaaggatcaaaagactctgaaagtgctattccagggtactcttgaagctagtatgtatgtgttccactcattacaactaccatccatattagaaagaaatcaatcctacagtctaagtgttcctcttgatgcttcttgtaataatgttcactctttaccactttcaaacaatgattctttgttccatttatggaattctaggcttggtcaccctgcttccaagactgtcaaacatgtactgaacaattgtaatattcctcatatcaataaaacctttttaaatttctattctgcataggcaaaattcataagtcccctttccctaatttagacagagtctacactcaaccactctaattaattcacacagacttgtggggaccctctcccatggtcttttcctatggatactattactatgttcactatactgatgcctattctagattcacatgggtttacttactcaaaaacaagcgtgatgcaattcaaacattcattaatttcaaaacacaagttgaaaaggaacttaatctaccaatttaaaaccttcaatcagattggggaggagaattttaagccttcacctcatatctgattgaacatggaatccatcatagactttcatgccccaccactcatgaacagaatggtgtggctgaacgaaagcacaaccatctcacactactacaaattaattaagcttttagtgacactatatagtgacacacataaaagtgtgggtcactaaaaaattaaaagtagtttttagtgacacacaacatttgactctaaatgttcggtatttattacgccgtatgtgtgttactaaaaatatggagtgtcactaaatactaaaactcaaaatttacaattttaaaaataaaaaaactatggcctatggtgacacgccacgcgtgtg

SEQ ID NO: 393696 - DNA, 1006 bp, Cannabis indica
cacaaaggggtactactatcaaacaaacataacatgaatgatatttaagagatatcatgaacatttatctaaagatatatagggtaagaagttttataataagctatttttcttcatcaaattattttgggaagaaacacttaagattgcaacgtaaatctttgaactgggtatcaagtaaagtactagttgaaactctttataaatatgtttgtggttagactaataatctaacataaggatatattgtatttgtggatgttcaactaaagcaatgtcttataagtacataaagaaaatttaaactctaaaataataaggaactatacagtatacactagtaatttatattaaaatattttatatttatagaataagataaaggaattaatattgaggtaaatgaacatttgatattcattgaatttagaaaatattaattgggtgatattttatgatcatattttgatattcattacactacaacatatttcttaattagtggcggacgactccgccgctaataacccacaattcggccgcaatcagttattagcgacagatttctcccgctaatattagtattagcggcgaaattagtctccgcagctaatactattattagcaccagagtattagcggcggggtatcgacatagggcattagcggcgggacctcgctgctaatgcctaccgtagggcttaaaaatatataaaaaaataattataataaaattaataattatataaataataataacatatataaataataatatataaataattttttgaataattatcaataatatataaaaaattaaaaattattatataaatcattatttataaatatataaataataatttaaatataattaatccacttacaaatattataatttgactccaataaaatttataaataatttgaaaatatctcaaaacaaactactttaacgttaattctattacaatgtctcaaaattaaactaaattattaaaaa

SEQ ID NO: 393697 - DNA, 702 bp, Cannabis indica
aagattaattaattatcatgtataatataatataatttaaattgaacaaaattctaaaataaatgataatatgattaagaaatattataaaatagtaactaatttttatattagtaattaaatagtttcttttctgaaaaatagcaaaatatatatatatatatatatttatatatattatttcccacatcttgaaatgttcacattgaaaagtaaattacaatggtattttttttaggatcaaccaaagaacgaccacgacgtggccagaaactatttttaaagttaacaaaaaaaatagagaataagagagaaatgcatacatataaaacattgaaacatacccaaacaaagaaaagtgttattaatatttaattattaaattaaaaatagggtctaaaatgtaaaaatctctaaaatttttttagggaaattttatttacaccccaaaaatttctaagtacaccccgttttaataatttttattttatataaaatttatatctttaattgtactaagtatttttaacttttttctttcaatttatattcttaaaaaatatacctatcaaacaaaattaaattatattttaaaaattatgacaaaaaaattaaaataaaaaattaatatgaaattttacttagaaaaaataaataaatatttacatgagttagaaaaattaatgaaaaatgaaatcaaaa

SEQ ID NO: 393698 - DNA, 1142 bp, Cannabis indica
tctaggatgaaaccccagcttcaggagcaacacttccaagaaaggccattcaactcgatcatatgccttacccatgtctaacttcaaagccatttgtcccaccgtacccttgccttttcttttaagatagtgcattatctcaaaagacaccaaaatgttgtccgtaattagtctaccagggacaaaagcactctggttctcaaagacaatatcagccaagaaaaacttgagtctattagccaaaccttagaactgaccttatagaccacattacaaagagcaatagggcgaagatcacccatatttttaggattcttcttcttaggaatgagcaccagatttgtgttgttcaaatcttcaggaatagaggcggtgtcaaaaaattcacgaacaagtttaaccacatccgaacccactatgtcccaacacttttggaaaaaactcggagtcatgccatctggtcccagagacttgtcagggtgcatctgaaaaagagactttctcacttcttcattagtaaccggagccaacaaatcagtattcatttctagagtaatagcaggagtgatgtcttcaagaatatcgttatgaagattacccgatgtggaaaacaactctgtgtagaaactgaccatatgatcccccaaacttgactcccaatcaagccagctcccattctcatcttgtagcttatgtatcatatttttacctttacgagcacttgtcgaagcatggaaatacttactatttctatctccttctttgagccaaagttgcttggattgttgtctccaaaacacttctcttttagtaagcacttcaaaaagatctctttccgcatttcgatgcgccttaacagacacatgatcattcttcccctttaactgtcgaatcaaactcttgcaatcagcaatttgttgttcaaaattgccagttatctcttttccccactttgcaagaacatcaccacatttagagatttttgaactaagtgtaaatgtgtcatactcttgccaacaatcactcacaacttggagacaaaagggctctctcaactaagcattctcaaaccaaaaatgattcacaccattaaaaatgttttgaataataggatccaaaaaaattggacaatggtctgacga

SEQ ID NO: 393699 - DNA, 676 bp, Cannabis indica
gtaatagcttatattcagttagaaattctttcaatagtctacacatttaccacgctgtaattaatttatttgtttttagttcccatttgattatttattttgaaaagagataatacttacaaacatatgtttcatattattttgggtcatatcataaaaatatttttttggcttatagttataattattattgtctgctcaagattccgacgttaaaacgacaaattaaaaggttgaaaatctgtgtattttgcagctgatttctcattttcttatcaggttgttctttttcatttttctctctgaagttttctgcccaaatgggtgtcatccattgttgaatttgcacaaagagttttgagttgttttcatattcttttcctctcgaacatgtaaagtagaaaaaggcttacttcattatctttaactaaaacgggtcccatatcattaaaggttatatcttaaagagaagcaagaaccaatgtcctacttcttttacgttcataattaagcttagcttttgtaatcttggcaacagagattaagaatatacctcattattaaaagaacctaactaaagctattgtaaacatatattatatatatgcttattgtttgtttgtgtattcaaactcgtatatatcgagatttttttacattacaaaaataatgattt

SEQ ID NO: 393700 - DNA, 660 bp, Cannabis indica
aatattttgacctatttccactaagacattcccgaaaactaaaaccctagttgaggatgtcaacatgggcactgggtgaatccctaggtgcccagattgacttccattttgcaagttcatgtgatttcagctcttggggcttggatttggttgccctatatcttcgtggtacaaaatagtgaaagaaagagagttggaaatgagttatcgaagtctaaacttctattccggagttcccaaagtcaacttgacgcagggctatggaccctcccaaatcggctgctatgactcgagactacttaattctgagctgttatctttcttgccatttgtcacattgctatcaatatcaccaagaaaagtttttgggttaaccaaagatattttctatttttaaaaataaaataatatcctaaaaatctgttcaaaattaattaaaaatataaatatgaaattgtattttcgaagtgttaaatataatttaaaactaatatataacaataaagaagaagtataaatctaacagttaagtgactaaatataattgataagtatttgaattttatgtgcatcacatttttttctaaataaaattattacaaaaaggctttcggtaggatttaaatttttgtgattgacatctattttatataaagtgtg

SEQ ID NO: 393701 - DNA, 687 bp, Cannabis indica
taagaagctcgcgatctcgctctctgtctctgttggccattacaatcgacgatgtcttatcatcgcccatcgccgccggtaaccccagagaaaacgacgccgtttcagctccgcaccctgtgtggcttcggtcccgaaatttccccaaagagaagcaaacaaaacaatcactcttattagaattttcctttgccttccttcctaatctcgcttttttttttcccaaatttgaaaatattattattattttttatatatataataataacctataggaaggaaggaaggactgggatggatacggattaagaaatactaattaaatattaaaatttaattaattaataggtttaggtaaataattatttagtttttggccggaggaggtggggggttttcatgtgagcagtttaagaaaatgtggattattttaattaatattgttaatttatttgcattgtagactaaaactaaggttaagctgtatttaaaatgagggggcggatgaatcaatggtggtgttggagttttaaaggcttaaactgtaaatatgctgtcaacaattagtgcttcaggagctgtccccaatgattggctgccagaatttttgtgtgaggggcatatttgtcctctcaatcatcttttattatttacctgagaaattttatttacaccccaacatttttt

SEQ ID NO: 393702 - DNA, 945 bp, Cannabis indica
actaggggaataacattccaaggctaaaaccctccaaacaaacaaggtaatgtttcacattaccattcccttactaagattaacctactccgaacagccccttaattaataaagattagcacagtaattaaaaaacatgtacattacactaatggttaaataaaaaaaatactattagcgaagaggcccgccactaataataattgaatattaaagagtgcaaaaatttccaagtttttactgaacattaatatcggtatggtattagcggcggactccgttgctaattacttattttttttaattttattttatttgagacattaatagcagcagaccctattttccaccgctaataatgccttattagccgtaaaatttctccgccgctaataccataattactatagtttgttagtattttcttttttaatatgagtataaaataatatatttatttttgattaacatagttattttttattgtaactttttaacaaaatatcttgggtgtaaaatatattaatttaaatataattcacttgaagacattttttagcatgaatagatgtagaacacgtaaccagttttatcataacacatttacatcagattattattcagttttattttacaacaaaattagtccatgatcttatttgtagtatttaaaaaaatacatgatatattttatcatttaacaaaatagagaatctatttagtaacttttataaaatacagagtctaaaatgatattaacccttaaaaaacatttgatcattttatttaatattggaaaaacttgagcccaatctgtatagtggaatttggaagcaagagagtttttcccatttaatttatttttgttaattaataattgaaataaaataatagtcgattaactaaggaaattttttcatatactatttttttgacttttttttt

SEQ ID NO: 393703 - DNA, 1861 bp, Cannabis indica
atgaaccctcaaagtccatcacagaggctcgtaataaattttctcatatctgtattgtcctctcagacagtccatcagtgtgacgatggaaattggtgctgaactttaattttgtaaccatagctttctaaagactcacccaaattttgatgtaaatttcggatctctatctgaaataatggattttagagctccatggagacaaactatctcccttacatacaactctgcataatgatccattatataagttgtttttaccagtacaaaaagggctgacattgtgaaatggtccactatgacccatattaagtcatgcaatcctgtggttttaggcaacccaaccacaaagtccattgtaatatccctccacttccactcagggagcattcgtggttgcaataacctcgctagattctgatgttctgctttgatctgctgacaagttaaacacatagacatgtattcaacgacgtctctctattccacaccaccaataataaggtttcaagtcttggtacattttggtgattcccagatgtaacgaataaggcgtattatgagcctcatcaagtatttcttttttgaaatcttgtaaagcaacattccattattcgagatcgagaagtctttacgcgaacctgccaatacctcatcccgagtcttaactagctcagaatcttataattgcactttttagattctttctaacaagtttgattggagtgtcaagttatgtagttttccaatcacaaactcaattctagctttaaccatgtctgaaggtaactgaggtgatatcattatagcgctaaaaacctacctgggtctttttctgctcaaagcatatgccaccacattggctttctaatgatgatataaaatctcacaatcataatctttgactagttccaactaccgtctctatctcatattcaagtctttttgagtaaagaaacatttgagacttttgtggtctgtataaatttcatacttctccccgtacaaataatgttgccatattttaagggaaaatacaaccgcagctaattccaagtcatgtgtcacataacgctgcttgtaatctttcaactgtcgggaagcatatgctataactctgtcagcttgcatcagaacacatcccagacccggtctggacacatcatagtaagcaacaaacttttcttgactgatggtaaagctagcactggtgctgtgataagtcgttactttagctcttgaaagcttgtttcacacttatcgggcaatacaagttgctggttcttcttagtcaattatgttaatagcattaaaatcttagaaaaaccttatccaaaatgtcgataataccctgccaacttgagaaaacttcaaactttagtaactattcttagcctcgaccaattcttaattgactcaacctttcccaaatcaaccataattccatctttcctgataatatgccctaagaaggataattttgataaccaaaattcacattttttaaactttgcacataatttatgatccctgagtcgttgtaaaaccatcctgatatgtttctcattctccgcttccgtttgagagtatataaagatgtcatcgatcaacactataacgcagttatcaggaaatccttgaacactctattcatgagatccataaaggtagctggagcatttgtcaatctgaatgtcatcaccaaaaattcatagtgaccatacctagttcgaaatgcaatcttcgagatgtgttgtgacagttagtagtcccgtgatccgtaaggggaaataccgggtaagctgtgcaatcccacatcgcctggggaaggtcaagtgggatgattctgagactgtgtagg

SEQ ID NO: 393704 - DNA, 1882 bp, Cannabis indica
tacctaaaattgcttagtaacgggatttttatccttataaaattattgacaatatattgatactttatcgattggttctctatacaaaattgtttagcaacataatttttatctagagcaatttatcaacaatatatcgatactttatcgatagattctcaataattttttatgtaattatcaatactttatcaacaagttctcgatggtttaatgacattgctgaaactatttcaatgtaattttcaattacaattacatcgaccattataaaaatatttttccattaaaaagatgacactttttttaatagtatcaataaaatactttaaatgtctcaaaaaaaatgtacaactatcaccacaattacgtctcaaaaatatacacacacaactatcgatatcttaactaagattctgatagaatagatcgatgcaccacctttcttggaacatcttcatgttcatattcgcgcaacaacattgaggggacgttgcatcattagatactccacatatttaatggtataaacactacaatcaccattgcatcaaacaaaaatatgagtaataagtatagcataaataagatataattagtttgatactacatataagatatttacctgagtttcgcctttgaaataagtttgtgactagctttactataatgtatttttggaagctggctacagttatttatatctactggcagtgtttggttgttgatcgggaacttaccagatacatattgcaaagaaggcaagagcccttcccaggtctttatgatggtatccaagtcctttttagagcaaatggtagaatcatagtcatacaatattatttttcacaacttgatgtcgacctcataagccacccaatgtgagtattttcaaagaaaatgaaatacaggaagtcttccccccatttcggatagaattagtcctgtgtaaataaaagatcgaaaaattaatatgacaaattgagccgattcgacaacaaaaaaaccatcgataaaaattgtacctgtacactttacagtactagaggatatcatacccctactaaaagatggccatcagacccttgtgtgatttctgaacatcatgcatagtatcaaccatatttgtggactgaatgatatacttttatggggaaacatgtctaaaaagaagtgacatcgccttctaagcatatggacgcatgtatctacatattgcatataatcttgaatccaatcccttcgtgtcaacaacctcataaactaggtaggaccctaatcacatgtcttgacatcccaaagacaatagttggggatggcctcacataattacctacaaaaactatccaacaacctctaatccgacagactaaggggatcaaacgatgcaaaaggcttatatttttattcatctcagtatagtccttaaactaagtaggttggcttctctttctctggccaaactattccccattggtggtccatctaaggccaacacgtctccctgtgattggtcgtcaccctatgactgattgtcacctatgtcaataatggtgccactcacaggagtacatggatcctcatcatcataaggatcataatcgccggggtacacaccaacatattctaccatgggaggtgatgcatgtcgtgcctctactgatggatctgttgttggcttcttctgcaatatacacaaatagatctaaactgctccataatattgttatggccaaactttatttctaggtggctactctgatatgcctccttcaagtattcttaagaagaataaagaccctttggtcagattcctgttgggttttatgccctaaataaaacttcatttcaatgtaatctattttattcaaaatcaataaag

SEQ ID NO: 393705 - DNA, 986 bp, Cannabis indica
aacaattttaaacccaaaattcaaattttctatatgtaaatttgtatttttttttaagcgggacatctctaagaattagtttccacttatgctttcaaaacacacctcaaaaggactagtttttatcagtctttatctttaagtatatttgactaagtactctaacaataatttctccaaatagagactccctactagtaaaaaaaaacaaaaatattacttctacgtacctgctgttactatcaattgcttaccttttgtaatattgaaaaacccaaattctcctacataaatgtgtatgtgtatagtaggggtaacataaaagtaagtacttgtgagttgtgattattattagtagtttaagtactccatttgacagattcttttggatgcattggagtaattattctgtaattcacttttgtagtttgagaatgacagaaaactcatcaattataaggcaatagacaagtgattcccgcagtttttaaaaggcatttattgataccattataataatatcacaatattatcattgctattatgaagaatgtccaaagataattaaggtgtgtttttaaaaacactagctatatatagtgatgtcattatataacaaccatcggctagaataataatcagattccattccattaagtacactattttctttaagatttgtttaattagtactaataagtaatgggaacattatgctttttataatcaaagaaataattatactgcatgttttatccattttgttctttggttatattcttgaaattagagatggaaattggtcggttaatgtacggggaatgcaatccccgcccccatccctgctacctatttatacccccatccccgccccatccccgtctaataaccaatggattcggggtaggggaatacccatcggttatggggaacccatcgggtatccattaaggtaaaatgaaaaaacaaattaatttaaaataatt

SEQ ID NO: 393706 - DNA, 967 bp, Cannabis indica
tttctttacacgtttcctcccccatgggccatggctcactctttcagccctaacttttccggtcactacgatcaacagatttctacagataaaaagtccaatttgttttttaaaaataccatgttaaattttcagacaaaaaaaaaagatttttttttaatagtgcacatttttctatgttatttttattttttaccagctctctattgtttgttaaaaatttatctctatttttatttttataagttgttatttaacggaatttttggtttaatagattttgttaatttaccttttttttttgtgtgtaatttaacttctttttcttctatacaaagttaacagcattacttcaccttaatttaaaagaattaaataaaacataatagcaatgaaaccaaactcttcatttgtggctcttcatcctgtttactcgttcacgtcgatgtagttttctaaatttgagaacgaacatggctcaactatgagtaattcttcgtttagctagtgaagggagttattgtctgattaagaatctttctcttaactgtttatgattttgtattttgtttggtggggttacataatttattgattctttatattctttactaatacaaattttggtattgtttgttgtgactaataagaactttttaggctctaaaattattaatttctccaggatattgttctttgtaattttattgtttttcatcttttttgaatcattcgagtttaaaaaaaaatgatttttatgagtaaaaattaatgaatttggtgttttaaaggctaggtgatgttagcagatgaaatgacgcgccaaaacaacattttcttataatttcggaagttcatgaagagtcaaaacgcatgaggtgtcgctgtagcgaaggttgagtgctcattgtagcaagcaaaaagaaaaaaaataaaaaataaataaagaaacaggtgttgtcgccgc

SEQ ID NO: 393707 - DNA, 840 bp, Cannabis indica
atttaaacttttcattctctttctagaaaattgcacaattatatttacatagagtcataacctaatctaataatttcatcgttacctcgtaatgtaacttgggtagttttatccaaacgtacaactcaaccaatatggtgagtaataacatgccaaatgaatgattactccacctattaagcacttgcatcaacttcaccaaagtattaagggtcaatttcaagtatcatgggtacaacgctggctacatctccttaaacaaatcatcgtacttatcaattggagtactatcattagtcgatacgacattgaaagattccattctctcaatatatctggcaacacatttgccatctcctctttgtcgttgtcttcaactgcttttactgaaagtctccccatgataatatcatacaatattgttgaatgccatttatgaacaaatgcatcctaatagcttctggagttcgaagtttgtcgttaagccatttcctataggggtactttttccaacagtggatcactaaagattatttctatagtagtaaactcatctacacttttcctaaattccaatgactgtttagtcttccaaattctatagtccaacatgcaactctatataacaaattatattcaaaattaaagcatatatacaaaatatcttatacaatttttgatgttttagggcaaattataaactacttaactaatactttctgttcacattatcaatttgttttaaaaaatttgacttaactaatatttctcaaataaatttatctttcttattgtttatattattacctttttagtctaattatttattattctacttaa

SEQ ID NO: 393708 - DNA, 1404 bp, Cannabis indica
ggtttttatataagaagaggtgtatgtagaaacaacccaaaggtttgtgacgaatcccaagtatcctgatcatgtagtataaactcaagaaggcctttatatggcctcgaggaagctcctaaagcatggtatgacaagttaactactttcttctttctcatgagtttgtgagaggccctgttgataatactttatttattaagaatttcgcaaccaggtatttttgttgctcaaacttatgctgatgacattatttttgggtctacttgtgatagggaggttgccaagtttgttgatctcatgactaacgaatttgaaatgagtcttataggggatcttagttctttcttgtatttcaagtcaaacaaactcattagggaattttcatttctcaatccaaatatattatcaaaaagatgctcgaaaagtttggcttaccacaaccaaactgagtaaagacgagtttggtgaatttgttgatccaaccttgtataagagcatgatagggagtcttctttacttaacagctagtcgtcaagatatttgttttagtggttgtttgtgtgctcggtaccaagccaatcccaaacagtcccatttgtttgttgtaaaatgcatattcaaatacttgtctgggacttttgaattcggcttatggtactcgagagacaccaacatgtccattgttagttttagtgattcaaattggcctgggagtttagatgatagtaaaagtaccactggagggtgtttttatctcggaaataatcttgtctcatggttgagtaagaaacgaaattccatctccctttctactgtggaagttgagtacatagcaactaggagctgttgtacttaactcatttggctcaacaaaatggtaattgattatggatttctgcaagactcttcggtactattttgtgatagtacaagtgctattaacatttcaaaaaatccagacactcatacaaaatacgttgacatacggtatcattttattaggcaaatggtagaatataagctcttaactattactcatgtgtccacaggtgctcaactttctaatatattcacaaaagcattagatgctcacacttttgctcatctataaattctattggtgtgtgcaccatctgaccttgtgaaagttgcctctagacatcttcacaatcgtgctcgagttcgtggttcatttgtcaatgattgttggcctttttggttgataggtttcatatattctgtcattagatttcctattttgattgtgaatagtgtgttgtcccagctgaaaaggctacctttcatggatgcaatgggaagagctactcttgtaccattgtgtgacttgaaaagtttgctcctttttcgtgtcactctttgagaaaaatgttggaaattatt

SEQ ID NO: 393709 - DNA, 1490 bp, Cannabis indica
gagaaagtagtagtttttagtttttttttatgtagagttgttatttaaataattaatttacacaattttgttattatttgttttattatattatattaaatgttcctaaaatatttcgataaaaataataagagaaaatttttagaaatgtaattgtgagattaataattttattgtatattaatatgtcatattttatgaaaaattaaaaaataaatcatcataaaaattatgttagtattttagaataaaaattaaaagcctatttattttgtaagataaacaaatatatgatgctattaagtttaggataaataaatgtataatactatttttttaacccaataaaatagttgtagatcggtctaaaaatttagtattttactaaacaaaatatcataaattttgaaagaaaaaaataatataataataatactaaaatttgcatttgaatttaaagtggttgtagatcttttaaaattaagtattttattaaaatggtattatcaaattatagttatcaaaatatctccaaatacctaaactatctactaaaatattttaaatttaaaaatttcaaaatattttaatataatatatgtaaagagcataatttatttatattttaaaatgacaaaataatcacgtgatgttgtaaataatttaccacgtaaatccaatttaggaaatgctttttttcacgaagaaatatttttattataataagaaacacttacacattaatttcagaagtgagttctatagaaacgtatagtattaatgcatttattatatgtcttcttatttggcatccgtatcaattaatattaaattaaaaaaataattataaaccataactaaatattattatataattttggtaaacataatttataattttaccaaatactcatctcaagatgcaattatttatgtaacaaacaattaaattaatttttaacttaaagaaaatattatctcttagttccaactataatcattgtttacactacaaaaaaaataaaaataaaaactataatcattggttttttaaattaaagatttatataataaattaaaaaaaaataattgttacagataataaagtgtaaactcaaccaacgaacactaaaaaatattatgataaattaacactaaatttttctttaaaagctaagaactatttttgtatcattattttcaatcatcataattgaaaagaatttgttttactcttaagaacattacttaatctctatcaaaattttatttccaaataatttaatatactatttcaaaaattcttatgtatctcaaaatctttcgacaaagtaaaaaattttcattcaaaaaattcttaaacataaactataaaacaatttgagaaaatatgttcaaaaaaaaaaattgcattattatttttcaaaaatggaagcgtgcattagttttgatatgatacattttaagtataaaacaatttgagaaaatat

SEQ ID NO: 393710 - DNA, 967 bp, Cannabis indica
actggtgcctagtaacctcctccgtgtcatactgctatatatataattaagtattaaatctcgtataacttaagaaaatagtttttacaaaatatcattaaccaatcttaagacacttatcactacaaaaaaaaatatatttttaattacaacaaatttatgactaaaaataaacaaaaaattataactaaataattattattatattatgactaaaaggttcgtatattactatatatatatatagtgtacttaaagattttgggaaagattccgaaattaggtttgggttgcctaactaacatatatactgaatatatagagggttggtgtatgcaaaaggctatattatgtagctacctagctttgcttttcatgggaccaatctaataagtaataatgaagatcgatcctagctattgaaggagctacagaagttatttcaatcttaatttctcttgcctttaattaattaattgaattttagaagactgttacgtctattatttctatatcattattggataggtttaataaagttgcacacggttttcttgaaccaattaagtttgaaaaataatgaaatttttatacgaaaatgacctaagacaatttggaaaaaacaacgcaaggcaatttggagttttgtactaattaatatataagggtgtgtgttgtgtgtgcttttattgcataagaacatgggtgggcctaattaacttgactcttatatatatgatgacaatattagtacatcagctaattaatatttagaataaaatgctcattttaattaactagtaataactttatattattcatattcaaattcatatatatatatgcacataaaaagcagcaagtaaaagttgtgcaaaacatgatagaaatgctaaaaaatactattggtataagtccctttttaggaataagcagattagacttgtgtctaggatttacttaattc

SEQ ID NO: 393711 - DNA, 1668 bp, Cannabis indica
acttgaatctttaaaccacatcagcgccacattaacagtattctcataaatattattatatgaaaactcattcatcggatggtgcttatttcaagaactttctaaatctatcacacatgcttgtcacaaactctctcaacatttagatacaaactttaaatctcaatctgagataattacatttgaagcaccatagggttaacctatttccttaacaaataatttagcacactaatccgttttaatcatatcctgttctgataaagaaaattgtattgactttgttactctgttcctacgtacccagatagaatcatagaaacccatcgttccatgacttgctgacatattggtcatctaattcatatttcataatatcatctttcatacttagcaaaaagggttttaacatcgtgatatatcttagttactcccagaagtaaagagtatgacataatataagattcattcagaaccttctattcaatatccttatttgactggtacacaaaccctattttcatatcatgaaattccttcagacgaaatcaaaaggtcctttaccgggccggttcccatatctttctttgtacccctattattcggagtcaccctgccgggccattttagttctccctaataaatcaaactacaatgtgatattaacaaattctctaaccacgaactcaatcccagttctggttatatctccaacaacctttggtgagatcttttctctttacaaacttgtcctagacctcttcgatttacagcatctactaccaatttacttcccagagtgataagaagtcataccattataatcttcaatcaactctaactatcgttactgcctcctaattaaatctttccaaatgataaatatttgaggctcctatgaatccatataaactttgcagttttgccaaataggtaaaagtgccaaacttccaaaattgaaaccaccactttcaattcaatatcataactgaattactattactcacactcattcaatcagttaaaagcacaggcaataacttctttggattatatcaaaatataatctaatccttgtttagaagtgtcactataaatcataaatttctcctcactgaccgacaatgttaacactgatacaatagttaacctctatttcaattctttcaatttgattccactaggatcatccctcaaccaatattctgtaacattcggttaattccagaaaacctctaacctcagttgtaaacttgggttgaagtcaactttaaactgctttaatccttgtcgaacctatcaatatactatctataatcatcttacgttctaggaaatttacttatttgggttggcaaaatttacatttccggaatttaggatgaagcttaagctcccaaagtattacaacaccatccaagaattacctctcatataccttcttgaattagatgaaatcaggatgtcattaaaaatatcattcgcaaaatcatcgggtatgaaaagctactttgaaaatacccttctctcgaatcttcaactggtcataaccagatcgaagaccgatctcagagaaaacggttcttaatattaaccatcacaacttctatccttggcaaagaatacttactcttcatcatgtatttatttaatttccaacgatcaata

SEQ ID NO: 393712 - DNA, 808 bp, Cannabis indica
tcttgagaaattttctcaagaagcatggcagtgaggacaaaacatgcttaaaacactcatgctgatctgtagggtcactcgtcattccatgaagcagttagagtgacgtacttgtgtataagaaatttaaatatatattaatataatatttataacattattatttttttattgttatttttatattagaagtatcctcaatatacaataattaataaatattatttttttaatggtaataaatattatttaatataccatattaatatatttattttaataaattaatgaatggtttcctttaatttataaaattttaaaaatatacttaacaaaaataaaaattaaaaatcgtatattgagaaaataaaaattaattttatcaaatcgtattctctctcttcagatagggttttctctcttccctttctcttaagcttcgactagggttcctcatgctcccatggacgttgccagccagatctgagcgggtggcacccaagagccttgcttctggctactctcgttcgaaggcggaggtctccatttgtgggtttcagcgacgggtgaattggtcagcgtcgggcttagctccctagggccaaattcgagatgcctagatttctaggcgagtggccaccgtcctttgtggttggccacttcggttgaggcatcgctcgcctttgcgttgcgatgtggcgttggtggtgggcttctcttgattttctctccttcgtttttggggatggctttttgaagaggccctttttaggtgtgaccttgggccttggtgttggaaattatttta

SEQ ID NO: 393713 - DNA, 1252 bp, Cannabis indica
acaggtaaatgacatgcttttccatacactaagcggtaaggtgacattccaatgggagttttgtatgcagtacgatatgcccataaagcatcagttagtctcagggactaatctttcctagttgagttgattgttttttctaggatgtgctttatttccctattggagatttcaacttgaactctagtttgaggatgatatggtgtagtgactttgtgtgtaatgccataatttttcatgagatgctcaaatggcttattacaaatagtgtctttttttttacccttaatggtgatttcattatttatcaagccaacatgagtgtaatgagataaaatcctatcttaaggacatactatggtgggaagagaaacttagagtgctatagaattttttttgagatagagaatgggtctaggaatttagaccaatttccttggatattagtaattagtggttttctgaatgtgtttcttggggatttactaagattaccataagatagggagatcgagtttttcattaatttgattcttagagctcaaccagtttctgttgcaatttactgcatggaacctatagagtttgttgaatggaaaacaaattatgggagataatggataaggtttacatcacacatagtacttccccaggcatattctttattttcaacaatgattaagattcaactatttctggggaccaagagaacttcccaatggcctgaagttggacccaccgccatagttgacatatagttaacttgggcactttcctattagtttcttgaaaaacgagaaatttttttgtcatcagaaataatgaatatacaagaaaactcagagagaacaccacaaactcgaggcctagaaactaagcccagtgcccaagttgacaatcaatctgatgtgcaggtttcgatcactcaaatgccaattctactctgagaatgctctccaaaatgttcaaaactgacgttggagacctcgtcttcaagttctagtaccttggaaatttcaaaacaacatcccagaagctctgacataagcattgagcgcccagttgaaaatggcctagtgcgctaggttttgcttatgccattctaattctatctcgagtgtttgtctagtctttcacaatcacaaagagccatgaaatcagaccagtcaaatgcacaacttcatattttcacattttcgacaaggtgattactcaaaaattaggtagttttgagtctctcatttctgcaaaa

SEQ ID NO: 393714 - DNA, 699 bp, Cannabis indica
atggaaccccatgattcttaataatataataaaattattgtttcttttatatatttttaataaaaatattgattcacattaaattttgcattaagttttataattgtgcaatagaatataatgctaaaacctaatttaaatatgtcacaaagttattttttgtatcaaagatagtacaatttttacatctttcatttatatagtgtgatgatacaaaatttacaccatatagtaaatgttgtgttaaattcgataaattcctcacaatattttttatgttctaaatttgtatcacttttaaggacacaattagaattaagtgaagcatagttaattttgtttatttgttcttcatattcctagtccttatcctcactaaataaaactttggactatcattaaaaatatatatatatatataaatataattatatggagtgttacatggatcaataataataataataataataataataagagaccagaattttgattcgtggcaggttgacagtggaacagtgagtctaataacaactcttatgtaccacaaatttaataatcaaaagcttagaacacgaaagattttaaattccatattaataaatacatatagtaccgaaaaactaccaaaaacagacgaacccattctcaatattaagcaaaagaaaggtaaccctatacaattgtgattttttt

SEQ ID NO: 393715 - DNA, 866 bp, Cannabis indica
tttcttcttcttccttctttttcatcaacttaatttgttttctagtcttctttattttggtttaattcatttttgggttcatattttcagaaatgaaagacctcaccagtcgtatatgctcgaaacttgtaaagaaggaaggatatattgctatatggtagtaggtctgccagccttctttaggtataggtgcagcttggtcaaagttgtgttttgccattgcgattcgatttttgctactacgattagtcttgtctctatgacatggtttcgggtgttttaatcttgacatggttttgggtattttaatcttgacatgattttgagtgtttcagtcttgtctgtgtgacatcattttattttgttttattttgtttcgttgttggtttctctttattcttcaatgactcgacatcaaatcattgttagtggttgggaataacaagttctctgcgagtgaaggggttgttaatagtgtagctacttaccttgcataatagtcaacaatttctattgttgtgtcttcttagcggtaaatgaaactaaatatgtgttatttgaatgactacaaagtccagtatgccttgaaatttgaagtaacttacaagtacaagaaagacttaatgtatcgccctggagttattagaaatgataagcgtgcaaggttctttttgtctacacttgcgaagaagccaaatgaatttactcccttgtttgtgactttattaaagaagaatgtttgtgttgatcctagtcccacaccaaattctgttaagcacactcatagcgaggttaggagttttgttccaaaaataaatctagaggtgttggttgccgatgtgttacctgaattaaacactatgatg

SEQ ID NO: 393716 - DNA, 593 bp, Cannabis indica
agttataactttaggttatatagaactaccactccacatattcaggtttgaacaacttacttattaaatggaaaaataaatataacattcattatggtaaaataatgttatgtaaaagagatcataaaggaatttctaacaaattaatacattattattaattaataaatgaaaataataataataataataataataataataataataataataataataataataataaataaagaaatagttagtgtttgtgaagcccatgaaagcatgtgctaagccattgaagaaagtgtatttataagtaattaatgggacccaaaattaataagagattaattgattagaatcgacacagaaccgcccagaagacactaactgcaaaatcagacactctcatatctaacaaacatgcaaattaaagcagaaattaagagaaaaaagaaccattaattctcactccaattatcatattgaccaacctttactattatatttttatataaatatctattctatataaagtgtgcctatataatcgaattcttggtttatgagaaatttatgagtgactttttatttatatttaataa

SEQ ID NO: 393717 - DNA, 813 bp, Cannabis indica
taataataacaaataatgaaactaatttcttacgattttaattaattttttgatgaaaacattatcattcttagctatctttaattaaaatgtaaatgccaacacttccaccaaaccaactcgaaaatatgagtcttttctgcctgaggaaaaaataattatacattaattatcacttttttggttacaaagtattaattaatatataatttaactaattaaacacgatcatgatcaagtttaattacgcggctaatcccaaccaaattccctgaacaaaaatccaaaacaattgtgagagtttgaaaatctttttgactttattatgttatgtatatggagaatttcaaaattggatcttgctattactaatttgagaagactaattaggatatgtagttattaatttacatttacatattgtataaatataggagtaagtctacagtacaacttaaaaaatatttcagtaaattttttattcgtttcgattctaactaagagaattttttaaaaaattatattccaagtatagtttacaatccgaaaataaaatttatatattctattatatgggcaactatttttttatacgcatatacatagtaagtaattatatatatttaaactttattttcgtaaactatttagaattttcttaaaattatgcaaataatcttttatacacaataaaaaaaaccgataaaatactgaaacacataaaaatcaaacagaagaatcccttaaaatatacaacataaatttcctatatctttatatattaaaagtgtctatctaacggcatttcttggt

SEQ ID NO: 393718 - DNA, 1263 bp, Cannabis indica
ctttcagacggaagttcaaaagtttcagatcttataaccctgtctcatcattgggataccacccgtattagatccattttcccctccgatattagcaaagccattgaatctataccccttttgccttccccataccctgatacctattactggccatacacaacacatggaaactattctgtaaattcaggttacgataaagctcactccttaatgtgcaaagatgatcccacccaatcggaccccatggctaaccaaacctggtggaagaagatgtcgacacaaccaatcccacctaaagtaaagcactttatttggagaacttgttatggcatccttcccagaagctacaatttgcataagagaaagactatccctacaccaaattgttgtcgctgccaacatcaaatggagaccctagcgcatgatattttcaggtgttcaactatccagaaggtatggaaattgactcaattctcctcttttatatcaaaatatatgtcactaacttccagggatatattcttcatgtggccgcttcctctctcacggcaagagattaccaggttttctctgtctgctctagaagctttggcattggagaaatgattttctccaccaccagaagctagtgacaccagtcactatcatccaagcaacttcaaattatttggacatttatcaacaaaacaacagacttccacacaccttggggaccaacctttcttgtgcagtagctgatagtcatggtacaccttcatcatttcaattaaaactttctgtagatgctgcccagaacacaacaacaaacaagacaggttttggtatggcgctcttcaacaacagtggggatttacttttgtcagtagctacaccgtggcaaggaactcaaacggctttgttaatggaagctcacacactttactatgctctttcttggtaccaccagcgaagcatacagccagattatattgtttcagattgtaaattccttgtagtttacgtttgtaatgctgctaatcatcacttacttttaaacatagttgcaaaggaccttaaaaacttcctatcttctcttcctaatgctacttttgtacatatttctagagagcacaatgaagatgctcaccgccttgtaaagtttgcattagggctagatcagaaagttttttagaaagatcaaaattttaattataatttgtatcccgagctttattcttctttgtaatggatacaggtttacttaaaaaaaaacaaaaaaaa

SEQ ID NO: 393719 - DNA, 2022 bp, Cannabis indica
ggatgtaggcatcgatatcccttgtgggcaggactgtatccaagaaacaggcatgcagaagttttaaaatcaaatttgtgggatctgtatggccttaagaaaggaaagaaaacacacccaaagactttaagaaaattatagtctggtgtggtgtgaaataggaattcatagggggttttataatcacgtttttgtattggaagtctgtttatgagataagctgcagaagtcacagcatcccaccagaatttcagtggtaactcagcttgtgctaggagtgtgagggccatttcagtgagatgtctgtgctttctttcagctttgccttgttgttggtgggtgtgtgggcatgggtgtcgaaaaacaaaatcaagtttgagaagaatgggcttgaggggtcgatattcaccaccccaatcagcttgtaaggttttaattttgcaaccaaactgcctttcaacataagagttgaactgtagaaagatattaggggtttcagattttaatttcagtggaaaaacccaagtgtatcttgtaaactcattaagaaaatggacataatatctatatgcttctgtggatgtctcatgggagggcccccagagatcagtgtgaacaatgtcaaatggtgctttggccatattatcagatgaatgaaaagtaaattgatgcaatttaccaagttgacatgcatgacagaaatcaacactagatttaggaatatgaaacttttccagaactttagtccaaacatgtttattagggtggccaagtcttttgtgctaaagatttacaatggaaaaatctttattacaagaatttgaaactggactagtttctgtaggtggtgtcaaagacacttgagcagatgtgtgatgcttggttctgcagaaaagatttggaccagatgactgatgagattgtagttgatacaaaccatctttaagagtgccctgaagaagatgcttcttcgaatccttgtccttgacaaaacaaaaatcaggtgtgaattctatggtgacattgttgtctttagtaaattgggagatactaatgagattttttgagatagcaggcacatgtaaaatatttttgaggtaaagaatacgatcagcagcaaaagaactgttaccaatattagaaatcgagagtttagaaccattacctacaaccattttctccttgcctttgtaggatgtcctttgcatcagattatgggcatctggtgtaacatgattggaagccccattgtcgagataccagccatcatcaggaggattggaagaaaaggcaatgttggcttgtggagtagattcattagaggttggagcattgtcttcaatgcctataaaactgacatcaaaccttctatagcagcgttggactgtgtgccctgatctcccacatagttgacagataactcttgaattgtttgaacttccacggcctctggaggaaccatttcccctgcccctgccacgattggtattatttgaggattgagaggttggaggtctgccattattggtgtatcctgaggattggtgtttcttggtttgagcaaaatttgtctgaggagaattgagctctaacaaggcagtggattgtgtgagttcaaggcgcatttcatgattttgaagcatgaattgaacttcttggaggataagtttgtctttggatgtcagatttacaactacagattcatattcactcccaactccagcaagaacataaaaaatcaattgtccttcagatactgaatttccagcagcacgaaggccatctgcatagcttttcatttttaacatatattcatcgatcgactgagaacctttttttgtgttctgaagcagggacatcaggtgtatcattcgagccttggatcgagtgttgaacagttgctccaaggtttccctgatggcagcagcggattcacaatgcataacatgaccaatcataggttcagagattgatgacattaaccaggataaaagaaactgatcaagacgcatccattgatga

SEQ ID NO: 393720 - DNA, 932 bp, Cannabis indica
atgaattcttggcccaacaccacacgtcccgggatcacactatccccaggacaagcctagaaaatattaagcaaggagaggctgaaagcctcaaaatctacatccagcgctttactgctgaagcagccagggtagggaggctaacaaaagatgagcataagatggccatcgcggtaggcgtccatcaaaagagtaagttttggaacaacaagcttatgagagaattggatgacctataatattttctatgaaagggccaaaaaatacatcccagtcgaggatgggcacgaaaatctcaccaagggaaagagcgagccaggtgggtcagccaaccctcgcgcgcatgaagagtcacgaaggaagaaggagttcgacagaggaaaaaatggccgaaataagagagttagaagggaagaggagccccaacgtagggagttcacatattacactgggcacatgctcaaaggaacaaatctttatggcaaacgaacaccaggtactgttcaagaagccgcccccaatgagaaaagataggtccaagagagtccccaaaaagttgtgcaaatttcacaaagatatcggcacaccacagaagggtgtacccaccacataatggaaattgaggatctaatccaaagggggtacttggggggctaccggagagagggggtcgtaggaggaaaggcgagaacacccctgcaatgcccctgaggtgataagagatgtcagaactatctatggaggacctgaataggaggagacaccttgaagggaagagacaggcacgccagggaggccaggcaaccacctatggtgatgaacttagaacaaagaccgtcaaagaacttaaaagatgagaggtactctataactgtgacagtcagtagtcccggaatccgtaaggggaaacaccgggtaagctgtgcaatccc

SEQ ID NO: 393721 - DNA, 502 bp, Cannabis indica
tctctctctctctctctccaccagcttcccacctaactctgagaacccaatcgacgattccctctcacccaaacggctaaaaactcacccaaaaggctaaaatcccacccaccttcctcaatctatctctctctcactccctcacttttgatctctctcactcgctcactcgctattgaaaccaccaccaacagcaaactccatctggaacaacgccaccaccaccacaaaactcaggccatcactacctatttctatcaaaatgtaccattttttaggctatttatgatttttacctctcgaactatgacatatgtattattgtgtctcctaaacttttcagcccattaccaatggtccctgaactactcacggtgttgtaaaaatgtctatctatcatgttatatgtggcaaacagaatgatgacatggctgcttagccaattgtcacatcatcactatgtgtatagattatcattaaaaaaataaaaattatgtatttt

SEQ ID NO: 393722 - DNA, 2465 bp, Cannabis indica
tgtgaaaattgcttgtgagtgaagattgaataatttgggattgtgtattcacccagaatagaggaattttaaagggaggtgctgtcgaaaattttcttgaattttcttgagtgtcaagagtattgagtgagaatgggacccaaaagagcaagagtgagtgagaaaggtgcgtcttcatccaacccacctaggtcatcgagccgatctaatgttgatagggcgagatttgtaagtgccaaagcacaagagcgctatttacaaatgaaaaataggccattcgttgaagataggggtatgaaaattggtgatcttagaaaccctagaattggcatccctcttgtatttgagccaataagagaacaagtaatcaacaggggatggacgaaatttgtggatgttactgagaggaataacccaaccttagccctcgaattctttgctaattggctagagagaaaggatgacatagtgagagttaggggtgttgatgtgccggtttctactagagctatccatgccatctatgacttgccaactttctcccgtgaggagcaacaactaaaaaagcttattgaagaaaagaagttggattatgttgacatggccaaaactttgggttaccccgaattaaggtttcatgaatatgattgggaaccctatcagttataccgatgtgagttgaacccggtggccaaagcatggttgtattttgtgagtgcaaggttgatacctaacaagcacttttctgatgctcaagtagataagctaaaatacgtctatgctatcatgaagggctttaacctcaatgtgggggatatcattaggcagagttctacctttgatggtcgaaggatcctgtgggggtggacttgggctagccgatgttatcactgatttgtgcgaggcatatggaataccacaatactcctatgatactaaggttgcaccacaacacagtattgacatggcaacggtgtttcaatttaaaccacctcatccacatggtcaacaaccagctccaccgaaccctcctcctgaacgcgaagaagtgcgtgttgaagaagtaccacaacgtgttgctgggcctcttgacccagccatgcaatacacacatgatcagctgaattatcttatttagcagaacattcacatgcaaactttatagcgcagaggagtgtctttgacgagaatcaagtgcagcagttgaatacactaatcacaaggatgaatgttggaattgaagagcctaattacttggcgaatctgcctcgtttttatccttatgaccagccgcctccaccaagaattttcttttctctcattggggacaatgtgtatctttagtttgggggggggggggagagatttataaaattttcagtttatgatttaattagtttagtttagtttttctttaaatgttatgtgttgataactgagccgaaatattgattgaactgctgttgtttacttatgcaattgattgaaattttaaccgtgtgcttgagtcatgaattctttgaattgaattagatgccttgtaaaaagttttgttcatatagatgtgaaacattgatttttgtatagtattacttttattctacttgggtttgtggaatgtttgcttgacatggaatagaacttgtgtgacttactctcttgaagcgaaatccttgatgattgttgcttggaaaatgatttaggcaaaaaatttctttggatcgattgagcctttcaagcttatctgcaaatttttttttgtctttagtttacccaaagttgagctttagcctgtttcaaaattttcaccacttaattgagcctactgcgttgtctttaactactttcattctcaatgtatcttattatgccataagcttttaattaagtttggggaaatgaagtgttttgagtgggcaatattttggaagtaagagattgatttttttttttttttttatgtgaagtgccataagatctttcatctcaaattgcttagataaaaatctcttggtttcgttcaataagcctatatcattagtggcaagcaatatgtcatcgacatatagaaccagaaatatgtatttactcccactgaacttgtgatatacacaatcatcaataatattcatctcaattccaaaagggataattatttgatgaaacttgtgataccattgacgagaagcttgttgggttttataccctaaataaaactcatttcaatataatcaaatttacttattaatatagatcagaaataacatttaatgttgcatggttcacatgatttatttcatgattatatgtacataatgtataaattcatctgaaacccttttcacatacttgatcctgtttattgtgccgtcaacacattggaaagtaaacatgactatgtgaataaagtttcctagatttatcagacatagggttttactgatatgataatctacaacagagtt

SEQ ID NO: 393723 - DNA, 1207 bp, Cannabis indica
attgactcaattaaaatatagatatatattaggttaattattttttttttctttctttaattttttcttttgtttttaattatttttttttaaaaataactatttaaaaagtggcatttatcattataatacaaccctcaaatctcaatgatatcatataataattatttacactgaaaattttgactttaactaagaaataatacaaatgcatatgtgatatgtcccataataaataattatccaaatgaaaccatttcatacatctcctcaattattatttccaaaaaaaaaaaacaacaacaacaacaaaagaaaaaataactattaaaaccaactattcaactcatctcaaagcaagaaaaccaactatgaggagagaagtggctaacactattgaaaccaaagtagttttggtaggaatacctcctttattagtctccaaaaatatggcaccataaataggttgacaattcaccaccacaaaagccgctaatatcacttgcatgaaaaattgctcgaaaccatatttgctccccgaaatggcaagtttgaggccccaaattagtgcggccaagttgattattgcaactgttgttaatgtcacgaacattggtgaatggatcccaaattcaaacgctccttgtttatatcttttgcttcgttcagcttcagttactttacttgttaaagcaaaacccgaagaggaaatacctaaacatttcaaagagtattctattataccaaacaagccacaagtgagtgcccttatcatccacattctttgatcattccaccatttttggaatgttcctccttctatgacaaattccaagaggtcttgcccatatgctccgaacacaagaaaaaggtacaaaataaacaatggttctgaaatctacaaaataaagtgagagcattatagtcattgaagaataattacccaatttgacataaatacccttttcaaattaggattagtaataagcacacaaataaaagaagagcactgttattgggtaccagtgaaacttagtacctgctagacatgttgttttgtaattaattagtaatattttctaaaaaaatatatgtgactcgatacttaattgcactaataacgatattgacacgtagaaagatactacataaggcaaggagttcgggaaagaggccgagtgttttttacactttgattggttgtcct

SEQ ID NO: 393724 - DNA, 509 bp, Cannabis indica
atgccccaaccacgtaaaaacttatgtgttccttattataatttctctgtcgcttattatttcttcagttcttattattttaatctgtttctaaaaatctcggtaaacacttatgttaattacaaataatattattttctccactctcaaatccatgctctaatctccatttgaatatttatatatatgtaatctccatctcctcttatcagcttcccaatttatctttttctaaaaataaaaaaaaatcccaatcatttgattcgggtatggctttactcatggacatgaaatttgagtgttctaagaagaggtaaatttcatctatttctacacagatttataggagtgtaaatggatcggatcggatcggatccagctatgatccgacatgatcttgattatgtaagaatctgccctgtctcgcctcgctagatcagatactcgaatcagatcagatccaacccgacttattcagatcggatttgatccgacctaacttttttttt

SEQ ID NO: 393725 - DNA, 529 bp, Cannabis indica
acgtaaaaaaaaaaaaaagtttagtggctcattttatttttattttgataaatttattagatttagaattagatgcatttatttaggtagctcattttattctagtcttatagatgagtatttatgtgctaaatgagaagttgttgttcactaaactactaataaaaataaaagaattaagaacgatattatcgaatgaaaattttagattaacttacacactaagtcgttctttttaagacgttcgcgatactgtttatgaatgtgcaagtagttaaaattcaccgatcattcccaggataaaatagtccagttatattgtatcgaaattgtaacgccctaatgctaaggcacgttacagtgctttttcaattatagtgcaatctttgctaatcaaagaattttctcgaaaaacgtgtttaattaaaactttttgaattaaatattaaactttgtaatataataaaatatttacaaatgccgggatcccgatttcaaactttgaaaaattaacatttcaaaatacaca

SEQ ID NO: 393726 - DNA, 994 bp, Cannabis indica
aattattatttggaccaataatattttaagatgtagcaattttgaataaattaacaaattagtgaagtttagaattaatggacttacaaaaaaagtggacattaatgattattgctgctatttttaaaagttagggactaatctgcatcaacacgaacttttcaaggacttgtaaatttccttaataattatataatgtggacaagagtcaaaatactttgtgcacttattgaaaaaaaaggaacaaaaatttacattgaactctaaattagagtactaacaataatttttctactttattctttaaaatactttattaaaatttaattttttctattttacctcacatatttacattacaccatacattatcttttttatatttttctttatatcatttaaatattatatcttttatatattttattaactaaaacaaagaaaaatgtgaaaataagcaaaaagaataataaaaataattaatggaatgagagagagagagagaatataaattatgttttacctcttcactatttatgagctaaatgttaagaaaaatttatttaagtttgagataaagtataatagttaagggtttaaagtatttgttggaactcaattttaattttaagatcttagctatattttttttttttatcttttagctattaatattataactcacttgttgtgagtgttcttagatactaataatctataaactaataaggaagaaggaaatggaaagacagaagactatcgggccagaaatagaaaggataagagaatgggataattacataatgcactattttttgtaaaaaaattacaaatttatatttaaagtagtttttttttttttttttacatttttaggggtttttcatagaaacaatacgaaaacaataagaaaattatataaaagtaacatgaaaataacaacaaaaaataacatacagataacaaaaaattaacaacaaattaacaagagtac

SEQ ID NO: 393727 - DNA, 1248 bp, Cannabis indica
aataattctaattaaagagagattttttttttctttttattccaaataattggatgcccttattggggtttcttctacgcttgttgtgattattatctgggtggcactcaatatacaaattggaatcttagtttgaataaaccagttactttacaagatatatactgaacttttatatgtatgggaatattaatcaatagacttattattgcactagatatagatatataatgatcatataataacctattagcattaaagtaaataataagcaaagaaactatagtatatgttagataattataagctaagtaataagaggcatgtttgaccatatattatataactcactatatatatgtacatgtgtgtgtttctattgtgaacgtttactttcatagtctcaattagttcttaacataatgttaagttaaggccactcatactaagtcatatatacctatattctatatgtgtatatacacatatattatatatacatatacgaaactaaattataaacaagatagacactcacgtgtttttgctattgatggtgatgtctttaattctgggagcgaaagcaatggcacaccgcacacaattccaagttgtatagcagttggaaaaaaaaggaaaatatattatacatataatacacatatattaattatgctatatgtatataagtaataataaaatctagggtggatatatatatatataaagtacgtagttataatattctcattctgatcatcttacataaaaaatattattcagaacacccttatatcccacccaatctcacacgttccctcaaaacatatattccctatatagctcttcaaataatgtacacaagattatcaacaataatttttcttttttgaagaacatgatttaattaataattatatatccttaaaaattagccaaaaacttcatttcaatcacatataaataccttgaaacaacgatttcagtactcttacataaagtatatatacttgaacatatatttagtgcctctcatagtgtgattatatgtaatttgttctagagaagaaattaaacacaattggaaaaggctaattaagtttattaattctttctttcattcactgcgtgtatatatatatatatacagagagagagaaattaagaggatccctagctcaagacaagatcgttaatcatcatctagttttagtactagaaaaaatgaaatatacatataaaacccat

SEQ ID NO: 393728 - DNA, 1570 bp, Cannabis indica
ataggaaatgaattattaggttactttcaggttacaagttatttattatttatttttatttaatttctaaattaatcacaaccatttaatagtaatccaatggcttaaaaaaggtaaccatgatggttacataaaaatgtaaccattgaaacctcttccatatatataaatatatatatatacgggtgcactcttaatgggtattacccatgaatgaatatattagaaaaatttaaatttttatgcttaatttttctatttaattaaaaaaaatctctcatttttacattatatatgctaagattgttccatctgatgaaaagaaaataataaaaaaaaaaattcagcaaaaaaaaaattataaaaaatattaagtttgacttaaatatatttcatataaacttattttttatatagtgtaaaaaaatatatttttttatgttttcttgaattaagtagttaatttaaacataaaaatttaagtttcttttttattattcgccatcaaattaaaatctaatggattaatatttatagttaaatttatttattactcgttaataggtaatactgagaagtgtttcatatatatatatatgcaaacttaactatatatataatgagtagcaataacttaaaaaaagctaatgtgataaataaaatgtaatgtgtaaatgtattagacaaaataaataaattaaattatataatatgtacagaaagaaacttaaaaaaaatatatatagctacataataatttttttttaaatttttttttaaactaattaggaaaaattaaaaatagaataattaaattactatactaaactcctgtaacgcagaacttctccgacaatagcgctaaaaattaatcacctaaaaattacacagcagccgcaataataaacaggatttgtcatatccacaaagagaaaaattacaactagagattaaattagtagatataaaataataaaaatatgaatgaataaaaaataataaaatgatataaaagaaggatgattagataaagagtttggtaaggtagcctgtaattttttaaatcaggttattttcggcaaaatctttttatattttaattttatatacttgaccccactatttttcttataagtggtaaaaccaccttatttttacttttctatgcaagttagaggtgccaactgatatcatcgtcaaatacttattagattattactatattagctttgtacattggtgcatctagttggtatttaatagtgatatttaactgacgctttaaatttgtaaagaaaagtatacttaaggggtttgccaccaaaataaaaataagagagttaagtgtataaaaagtaaaacataaggagatttcgccacaaattattctttgcaaattctactctaacattggtattaattcacacaccattaattataaccgaaagatattaataaaaaaaaaaaagacaaaaattaattaatcttgaataatttgaagctcacttctaacttaaaagtaggcatgtcaaaaagatcagtttagttggagcggattggagctccgatc

SEQ ID NO: 393729 - DNA, 564 bp, Cannabis indica
tttttttttcttctcagccactacattctctcccttttgaaagttcactttatctattgtcttaagactcatcctcaatcaagagttttctacaaaaatatcaaattcacaaatttttttattttggtgtagagttgtctccttcttgattggaggagtactttctcaagttaaaattcaaaattccaatataaatatgctatgaatatatgtttgagtcttggaaaactcaaagttaaatatagcattaactgttgaatgtctatataaatctgcaacctcacaaaatgaaattaagaaaagtctgttagacatttatttgtatagactaaaacatacatgattatgaataaagtgcggaattaataaatcatatatgcactataatttaaggatcgaaatacctccagccattgattcttgagcttcaaacccacataagctttgatctgcaagggaaactggttgatgtgggtaatcgggcttcctcgctctctcaactctctttagatggattttgctgttatgaacagaatgagtgaggagctcggggaccgagaccct

SEQ ID NO: 393730 - DNA, 979 bp, Cannabis indica
aatgtgggactaacataatatactcttccttcatttttccaacctatataacttatactattggagaatgaaaatataatttggaaacataatgagaatgagatttatggttatagggtggctttcattgctagagatcagaaaataatgaaaataaataatttattgaatacttgaactaatagctccaaaaaaaaaaaaaaatgctcatcatacataaaaaatcactctaatttaaattgaaaattccacaacgagttaataataagtaaatatcatgcttcataaatgtccatatctaaaatttcaaacaataaataaacaatccataaaatgttcataaaagagtccataagtctcacacaaattttataaaaaacatctattgaaaatccagtaacttgacagaaattaaacttcaaatgttattctccaatgtcatacatttctgccaaaagaaaacatattagttacaatatatttaaaaatatagtataattaacaacaaaatataagaatggaaaagataataacctatgctacaatagtatcatttaggactaataagctccacactaattcatgattatgattttaaaattccaattaccccaatattgacagaaagctaataacacaaccttgatctaagtcatatcataataaataattctgattcacaagaattagtatatccacaaaagaaaaaacctgatttgtatcatcaaataattggatcatacaaatatacaaaattcagcaaaataatattataatccaaagaagtcaatttatatctcactcgctctataacccttaaaaaattcatggctgatttttttatttttatttaataaaataataaaatattatttatatataataaaataataataaaacaaatctcattaatatttaaattaatatttgaactgatattctagaagagaattttaattttatatacttaaaaaattaa

SEQ ID NO: 393731 - DNA, 674 bp, Cannabis indica
gaaagatgaggatccagaaccatccgtgaagagaatcatcgatgcacaactgccgaaatttttttgaatgccttaaattgaattgtacaagggaaaaaggaccctagggcccacctatccaagcacaataggatgatcaagtagttcaagtcagcgaatatgcgaagtgtttgtgtttttctttgacattgtccaaatctgtcaaggattggtggaagggattaccgtccaactccatttaaagttggaagtacttatagtccatgttccaaaagcaatttatggattccaaggacttcgatatgaatagctcgctgaacaacatcaaacagcaacccagagaaagcctcaaggcttacacccatcgaatgatgaaggtgacaacaaaaactaatgtaaatgacgatatgaagttagtggccctacaatctggagttgcagtagggtccttattctggaatgaatcgcaaacacaaaggtctgatactcaatcagattttttgacaagggcccaaggatatattaggttggaagaagcctataccagagtttttagagtggcttcagcaccatcactcaatgtcaataatgccacgtgtacactgttggggctttatgccctaaataaaactcattacaatctaatctgatgttatcaataaaagattagaagt

SEQ ID NO: 393732 - DNA, 671 bp, Cannabis indica
catgtaaacgaaccaaaaaattatggacgaaataattaaaagattctaacaagaccttaggaaaagggagggatggaaaaaggagaggtcatgagttcgaacccaagacctttaagctacatgactattaattgattataaaaataccattacgccacactaaaaaaaatattactaacaagaaaactttcatgtatgtaatttttaatttttttaaaaaaaaaacacgtttcatgcattatcaaacaaaatcaacagttacatatgtacataacattaggatataaatccatatacaattgttccattatgattttgtgatatatttacattaatttttaaattatgagatatatacaattgtaaaatttaaaaataaaattaacatttttattaaaaatatagaaaacaaaataactttatcattaattttatcatttaaaacaataataaataaatgcaatatagtttaatgcaataactaaattgaataacaaaatattgaaaatatcataaaagtatatataaaagtagtgtatttattgtgatggaaattttgcattatattttattaagattcaaatttggattaactttttctatgtgacaaatttaggaaaacttttagcacattattaaagtaaaatttttacaaaatgaactatatttta

SEQ ID NO: 393733 - DNA, 788 bp, Cannabis indica
aactcaccaatgctccatctgcatttatcgatcttatgaaccaggtattcaaggattacctggacaagtgtgtgatagtgtttattgatgatattctggttcattctgaataagaagaagaacatcaactgcatctcaaatcattattgcaacgatgacgggagcacaagctttacgctaagttcaagaagtgtgagttctggttgtcacgtgtccctttcttagggcacatagtggatacagatgggttcatagttgatctggccaaaattgaaactgttcgggattggccaacaccaaaattggctactgaagttagaagccttttgggtttagctggttactatcgtcatttcgttgagggtttcttaaaaatagcaacacccctaacgaagctgacccaaaagaactgaagtttgtttggactgatcggtgtgaaaaaagttttcaggagttaaagcagcgcttgattacaagttatattttattctgtatttaaaagtttaatatttgctcttggctctagtatatcccagataagcaggattagtgtatgattagttgcagtacgtggcgttccttttgttaggacattacatagtgactctactagtaaaatcttatatgggtcatataactaatattagactaagagagatgcccaattttcttttagggcaagtgtgagatggttagggtttgtgccctttaaagcctgtaaaaatatttatatttataaatgagagttgaatattttcatatatacttaaatgttaaattattaatat

SEQ ID NO: 393734 - DNA, 981 bp, Cannabis indica
gtaattaaaaaactaaagaataatgagccagttactttttattttattgtttcattatgggaagagcaatcaaactcatcagcacatgagacaaaaccccccaaaaaaaaatatagacagtaataatttaatattaaatcccatttacaacttaaatttaataatgtactaatttttttattaattttgttatagtcaattttctgtctttttgtgttgcctaagcctaagcctttaccacaatattttggataagttaattatacaattgctatttagatacgtcagaccttactacaaatctgacgtatctaaatagcaattgttataattttcttatccaaaatactgtggtaaaggcttaggctgatcctttgagtttgatttagtattgcaacacaaaaagacagaaattgacagtataaagctttgatatttcttaattttatattttttattaattaaataactacaaaaatggacagtataaagctttgataaataattaaatatatatatttacttaatatctttaactttagaattgttgcatataaatgcacattataactattctctttcttcaaacaatgtcctaaagctaagcaacaaaaaatcaatagtatatttttatatatattgatccatatactctaaacccctaactgtgtgagactcttttgaattaaatggatgcatgtatatagttatggtcatttatatataattgtggtaaaataagttttgtttttttttaggaaaagcatgaatgtattaacttaaattagctgtataggagcacttagcatcagttcaaacacgaactcctatcaaattagtaataaacttaaaaaaatcgttttgtccatactaattacaatatgttccttaaaaatggtattccatctaaagcgttttttagtaaacaaaaataaaaagtaatctataactaatattttttgaattttctctctataataa

SEQ ID NO: 393735 - DNA, 593 bp, Cannabis indica
ttgccatggcttgtactgggtgactttaatgaaaccatttctcactcagataaatttggtggtcctatgaaacctgaagtgcaaatagatgcctttcgtaaggttgtggatctctgtggtctacaagaattaaactttgagggtgaaagatttacatggcacaacaaaaacacacgtggtgttaatgtgaaagagcgtttggactatggctttgtcaactctgcctggatcgataatttttcctcgcctgttctttctcacttggatttttttcaatctgatcatagagctttgaaggcaacaatcttacttactttggacaaccctccaccaaagtttaaatctcggtttagatttgaaaaactatggttgcaggaagatgcttgttcatctattattgctgcaaattggattcaaactggttcagaacctgcattgcaaatcttggataatttccaatcctgtgcaactaagttacaagcatggcatcgatcaaaatttggagacttgcctaaaaaaatcagactctcccaagaaaaagtgacagcgttaaacaattctttagatacatctactgctcactttgatgacct

SEQ ID NO: 393736 - DNA, 1066 bp, Cannabis indica
aagttagtatatgatgtaaatttcccttcagtatcagtccattattttaccacctttttagcatcttttgtgaaagtatcaaaattaaccactttatgatctaacaaaaaagagagaacactctattttaatttatttaagactcactcaatcccatcattgaaacctcccctaccatactatagtacatacacactggtttttttacgtgtgtcaacatgtcgatcaatgcccaaaattgatatatacgaaaagaccattctaaaattttgtataagttagggacttaaatcaacaattttcgattttgcgtcggtttaaaacaaatgctttagttttacaatttaaactgatgcagatgagattatttttataactctcttttactactcttactcactttctcattctctctctctctctcttgcaagtcatgctcagcttacaacgatcctcaaccctaaaggtcttgaccttcactggtcgtccctcacttggatttccactgtgttaaaatatattaaacttgatttactatggtttatttctagaattttcttctagtttctagagtgctcattcaattactaaaatttttagagtcttcatgtatttagtagagtttttttattaataagtcttgaattttctaaaactatttcatactagttagtaataggaatgatatatttgtagttagttattatggtatagttcctccaaacaaaaaggttttcgcaatcgttatccgcggttgtcagtcccaaaagagtcttgtgaaatgatagtcaagtcgggagggtgttctcggatgtctatcatctccactctaggtcctgtcttcaggacagctaatcatttcctaaaaaggagttccagttagctagctatattcctcctaaaatgacaattccaaatagtcgactacaatgccttcatcctatgtagaagtaggcaaaggcctatggccctcgtatctgggagctcgtttatattcctgaaggtcattacacttaagctgacgtggagacttcgctcaaacaggagttggttaagttagttgttt

SEQ ID NO: 393737 - DNA, 561 bp, Cannabis indica
tagttttgagtctcccaattttgcaaaaaggtaacatcttcgagaactatgaacgacttcatcagagctaagaaattgactaagtgatatcgtaatatcaattagacttcaaaaaacagtcccgacacatttttccactcatatagcatctagattgacgctagatttttaacttgagcactggatgtcaatctaggcatcaattactaaacaatccttagtaaaacgaccataactcactcaatattaattcgattggtgcgattccaagtgcatttaaaatctcttttgaagatatttctatgcatgtctcactctcacattccaattttgaagatttcaaattgaaaattcatccccatcaagtgtaatttttgtctgcaacttacctaaaaacgattcaacaaacgcgattcaagcttcaaaaattgacaactatttgatcatcatcatcaatggttaagatcagctcataatatatttttttatatatattttttgtaatattttttattattattttgatggacctccttgtctataaaaagagagttccactag

SEQ ID NO: 393738 - DNA, 881 bp, Cannabis indica
ttttctttcaaaattttggtcaattgtctaaattttttcaatattttatgtatattaattaaataaataaatatttttttctgtacaaatatataatatggatattatatttatttattttgattttttatatggtttattgacttatctaaaatataaaaccatgtgaatattgttgtattaggtgggaatattatttcttatttatttaagaaaattttaattaaaatctgtctagttcgtctatatatgttcaaatagatttttaaactttctttttttgacaatatttcttattaattgtcttattgtttttttttttcaaagtatttctaggatgtatttggacacccttacctcatgagtttcaattatctctttcgtttattattttctaaaagttttttctatgtatttggacacccatagttacctcatgagatcataaagtttttagtgctttattactgtatatttatatatttgttttcattgtattaattgtgtagcttgaatacatttcatgttttgggagaaattttgttcatgagttactctttgagagaaaaagtacaatcgttatggctagatttatgacaaatttaagaggaaatctttatttaaattagtccatttagctttataattatttgaatattcttttaataaattttattttttgggggggccttcaataaattagcaaaaatctataaaattactgataccgatataaattgatataaatttagtatattatttatttttatgtttatatttatctttcgtgatagttattggatacaattaagccataattatgccattactgttataaatattaataattatgtggatgtccaaatcttttatttattacc

SEQ ID NO: 393739 - DNA, 2117 bp, Cannabis indica
gaattacatggtgagacaaacatgttaaattgtgtaatacctccaattacacacaaaatccaattacattgtggctttccaaaacgcaccctaaataaaaattaacaatatgtggctcaccacgtaacattcatctagtatttaaatatatactatgaggattacacaacaaattaaacataaattagtttattcgtaatttgtgattgatttttaaattcatattaattaaaaaaaatcatatataaaaaaatcaattgattatgcctaaacattgatatggaagaataaaatttagttaattttaaaatatttctagctaaaaaaaagaaaaagtttataaacaagtgttaggtgtattgtaatttgtaacttttattatgcatgaaacatgatatactaattgtaagttgtaacttccatttttaattataggtatatgattttaaattatgaaataaccaagtaaatttccttacacttaagagcactcctaatatttttttttactccatcctttaaagtatattatgaaaactctatttgttttattttacactatatttttccattataccatatatcagattctttaaaatacatcatcaaaactgtacttatttaaaaaaatttattatattttattcattttaaatatataatattaacatatacacatattctcatacaaaaataattattaaaactaaaaatagttaataaaatatgtttagagcaatgaatagtattctataaatatatagcatgaatagtatattttaaagaaataactttaaaataaaagagtttagagcatctgctgtagcgtatttttagtacggctttttaaatttttttaaaacttctccattttagagaagctgttgtgagtgttctactacccataaaaatttttgagtcaaaaatatacatagcgggaaaatttacagcgggaataatgtttgattaaattttgaacataaattttttggaaagatcatcattttctaaaatatatataattcatcttataaattataaataaaagtgctcaaaatttataattctcacctcttctaaaattgtaacctctctccgattcattggaagttttttttttctttcttattctttgtttagtccttgaggttggtcttactcagatggtaactggtggaggaaccaaggaaaactaagagatagcttgatactctaaagacaccttaatagaagagtcaggtaattttttttttgagatggaacgacccagctaggttacaacagaaacgggtagggatcattgccatttccataccaagtgttatctaacccaatggccatttgtgccatgttatgcgcgactatatttatttacgtaggtatatgctgaagggagacagtgggggaagaagataacacttcacgaagagatctcacaattgctccaaaagcagataaaatagcctccttagcttgaatatcccttatgaggtttaagcagtctgattccacttgatgaatgtcaatttttttttctctcgacaccaacataaagcttgtaataatgcccatccttcagctgtttttgggggcatccatccttgacgactcatagccattgcagctacaacttgcccaaaggagttttaaaccaaagcacccatacttgttctcgtttttttttcctgagactgcaccatcgacattgagcttcgaattttcaggatctggggggaccattccgtatgtctggcttggctatccgatgggagatgagtcttctggtgttgttgagattgttggtagaaggtcaaaaattcctttgcatcttgatagatcctcgtggggtgctcttgctgatttttgaacacaaaagagtttctactattccaacacttccaaagaatacacatgaaaagattaagtgtcagtagaaaaatgggacttaatgtataatagtgtatcaagaatatgcattccttttaaattattcagagcatgtttaaaggacgtaccttaccacaccatctttatacccttacaatcaaacaaagcatgctagacagactcaggatgcatgtgactaacaaggccaagtggggagtggagacattttc

SEQ ID NO: 393740 - DNA, 979 bp, Cannabis indica
ctcgaaataattagggttgaatacagaggtcagtacagaatctgttatcttttgatcatcatcaatatcataataacgattatcatcatgatgatacgtaaacaaagtaatattttcgtaatccatggaaccaagggcgcggtttttggtccaaaaccctaagttcaaattttcaattgtgtagttgttggttgaagcattgtagacggtcgagaaggaggtggtggaaatcgcgagaacagcagagatagcgggcaagggagggacgagtaatttatcggtatagacatacataaagccggaagctacaagtacacaagttaagaacaacaacgttaaacatttaacaaagttgatgatttgggtctagtactcatggtgttgtcttccttcattaataattaaataattattgaaaacgatttctggtaattatgctataacactcatatattgtacatatatatatatatatatatagggttagtgtaaatctattccttttaggtttaggaataattacgagtttaaatttaaaaagataattatgtgataaaaatataggcataaatgaacaatttttattaatactaaataataaattgaaacatatatacatataaatatattaagagagatgatatatatataaataagaattaatacgtaccttatattttgtatacttaaaatatattattttttttgagttaaatttgtatacttaaaatatctatttatttattaatttttctttttttttttttaaaaaaaaaaaagagtactattttattttatttttttgagataaaaaagagtactattttttgtgagtactattttataaacaggttcaacaaaaagattactttatttattcagtatcctatatcgtgactgttattatctatatatattattcttataaattagtatatttatatatttttaaatctatatctccagaattatattatct

SEQ ID NO: 393741 - DNA, 1435 bp, Cannabis indica
atatacaaatagatattgagtttattgttaatttatctaacatgtggtatcaatatctcaaataaatcttgagtttattgttaatttatcgtgttttatattatatacaaatagatcttaagtttattgttaatttgcctataaatagaatattataattttgatagagaaatgcctagacaatttttaaatcataaaccaattagtctctaagaaacgaaaaattcaaggagcaatttgccgaaaggttagggaaggaacttgtccaaacttatatattttgggactaattggctaaaaaatcctttggagaccaacttgtcaatagttacataattcatggacaaccacttgaggctagctcaagtggtcataggagggtcgtacgttttggagatttaggattcgaatcccgaattatacattgtgtaatatataaaacgtttatttttttttttaaaaaaaaaaaaaaaaattcatggacttgtggtacaataagtcttagatataggggtagatttgttatatttaatttagtgaagctcaaataatatgtaatagtaatatgatctatagtaggatattagtttttcattttttttttctgtaataatattgcacataagtacttagtagttgcggatattgtttaaatattttatatcttaaaaatattataaccattaaagtttatacgttaactaccaaaatcaatactatcaatatatatatatatatattgttcaaaataaaatatggttacaatatttttaagatataaaacttttacaaatagcttgtaatgtttatgacattgttatgtcttttgttgccgaaataaacaagacaactaattcgctcaaaaaaaaaacaaaaataattaattgcctacttaatttcttttgaggggaggggtcacatttaagaaagaaattggtaccacactaaggactggtccacattattattggattatatattgagaattatatcaaataggattacgtacgtgacatgacacacaccacaagttgtattaaaggtgtttaatatttatatatatattctcaaatttattttatttccatgtaacttttttttagaatatgccaaataaaaaaaatgataaaaaatacatataaataaaggattttttattttttattattttttgttacaatttacaagtaaactatatttgaaaatttgaattaaactatatttgaaaatttgaatttaacatatactcattttttagaatacatccgaagtgtgcacggaagtctagcaatcacggtgtctccaagataaaacagcatctgtatatgatatgttttgtaccgaactatatcgctcgattacactttaaatttcgctctgagaaaaatcgtaaagaagaaagaaaattttttatgttgaaaaggatgtattcttc

SEQ ID NO: 393742 - DNA, 791 bp, Cannabis indica
agagagagagagaaatttttctaagtattctaacaaaaattcgagttgtttcattagctctcttatagctctctatttatagccaaagttataataagaaaaaaaaataaaaaaaaataaaagaaacccttagcatttacctacaaataatgaaataaataaataaaggaaataaaagagccaaacttagtttccaagttccctcatggtcgaaccacattgtggttattggagaatattgtcccacatggattaaatgtgaaagtattgagccatatataagaacatgggctactccactcatcaccaattggttttgagatggaaccccatgcttctcaatagtagtattgggctagggttgtgctcttcattatttgaaagctcaatagatttaaataatatttttttgtttatgtcataattaatttaattcttataattaaaaactttttttaattatataattatgtcaagataattattttaataaaatattatctaaatacttattattaatttttgacaacaaaatatgtaattaataattaaacttctattatctgtttcatttatgacaaaaatacgagttgtttcaatagttctttatttataaccaaagttctagtaaggaaaaaggaaaccagtaacattttcctacaaaagaaataaataaataaaggaaataaaagggcgaaacttagagcatgtttggtattgttttctattttttgttttcaaaaaattatttttagaaatgagaacaaaaaatagtttttgaaatttttaaa

SEQ ID NO: 393743 - DNA, 812 bp, Cannabis indica
aagtccatatctactcgtgttaattgacatgtataatttctaatatgatagaattcccatatgcactaattttgacttgttagaatgcattttcttaatgaaattgacacaagttttaaataaatatagtaaacccagagtaatgaaagtacctcactatttattaatatttattctctatatggagataagctataaaatctctccgtaatgtagaggaagtcttattaataacacattctttgttaccgaatttagtgacatcattttataattaatattgtaaaagacctttagacatgtgtctaaatcatgtttctaaagaaacttggatcataaaggtctttgataattttaaagcaaattaagccactacaatattgcttgttcttgaagtttctaaatgcaagaactcatcttgcatgttgataagatttactcacaattactaacttccttcgatttatttgtaaatcttgcaagaaattatgaatatggaataacaatctaaaataattcactatgtgttaataatcatactatattaaaataaagtcatacaaaacaaattaaaaatttattggtgataatgaagtgagatttatttttcttaattatatagtcaaaatctgtacattctggatgaagttatgagaataaaatttggaaatttctactagttctgtagaaatttataaatagtgatataatataattgcataattattaatatataattttgaaatttaaatgaatcatatgtttatcaatttataaacatgcttaatatgaaatcttattaaacaaaaatt

SEQ ID NO: 393744 - DNA, 655 bp, Cannabis indica
caacgtaaagtctacgttatgtattactggaggttcaaacaccttaatgacataagaattatcgatctgaaagaaaaaaaaaaaaccttgttcatgcctaactcaactgcaatttccgctgccagacaaactgcttgggcttctactaattttgggtccgtcgtgatggttctaattgatagtattctaccaaattcatcacgtattacaaccgaattcatacaaccaatcgaagagatcacgatatcagagttactactcacccaagaagttggaggtagggtccaagttgttggattatatttgaccaagatctagatttactaacaagtatatttattaacatcctaaatatgaatttataaaacaatagaaaaaaacacatataaaatttgagtaaccttacattgattgtagcagaatattatgactcctcccactcagatctctaacctttgttcctttctgtcatagaatattatcaagatctgagcccgatactccttcaggtgtttagattcttcatagtcttacacactatgattgaacactagacttgctatggtggacatatgcactcactcactataggctcgaaaatttatgaagaacaataaaggagattcaaaaatagaagaagaagaaggaatggagg

SEQ ID NO: 393745 - DNA, 1020 bp, Cannabis indica
aattttttattgttattaaatttgacatttaattagtcaaaaaaagttataactaaaaatttgtaaaagaatattctttttatagtgatatagggattgtttttttttaacataaattattaagatctaatgatcaagattacaataaattaattaatattaattattaaaaaatgagataaaagtagtagaaaggaaacacaaaacataaaattatacataaattacacaaaagaattaaatcaataatcaatgattatcaacatgcatgttaagagcttatattttattactcatatctttttcatgtatatttatatacctaatcatcattacttatcattacaatgttttaaaaattgcaggagaaatgtttacatttggtttttcacttattactcatccatatatcacttatagagtaatttccaaagatggtttcatgcatgatccaatacctataacaataccaaatcccatcatgatgcatgactttgccattactcaaaattatgccattttcatggatcttcctttaattttcaggccagaggtacgtatggatagacgctccatcattaatattttaattaattttgagatgaaactccataattcttatagttatattcttgtcacataaaacatccaaatatttataaaaaaattaacatcgaacacaacttttccttatgtgtcatcatatgtgaggcttagtgacaaagccacattagctccagagcgactcaagctccccgtcaaatttttaagaagtaaaatacaaaattatcaaaagaaatatagtatttcggtgataaacctaactctgtcactgatcatgtttgtgctcgtgcttaataaattgtgcacataggaaatgatgaagggaaagaattttataatttcatttgacgccaccaaaaaggctcgattcggtgtgcttccgcggtatgcaaaggatgagcttttgatcaaatggtttgagcttccaaattgcttcatatcccatattggtgctca

SEQ ID NO: 393746 - DNA, 566 bp, Cannabis indica
aacaaaataatgagaaaggttctggagggttaagctgataaggaggaaccctctatggcctgatgatgagatagatctgaatttgaatgcatatcaagattcaatctcagaaggttgtgaaagtaacagatacataatgaattaaacaaacatttgacaaagaagcaaacacttacattctatttaaatttggtttgtagaatatctgattgtcttttttgaattaaattactcttttttttctgagaatcaactaattaaatatctagctacttttgtttaaaatctttttcggtattgccaatgccaggttggactttgacttgtgccttcaatttggttctgcttctgaagatataagtttcacttctacccataggttagatcattatataaatatttcaatttattttaggttaaattgtatttcatttataaatttgactctggcaaaaaataatgaagaaaataacaaaataatatagttatatgatgtcatttatatcatataagaaggaaagtgcacataacttgaaaataaacttttatgcaaatcattaacttat

SEQ ID NO: 393747 - DNA, 1325 bp, Cannabis indica
  modified_base (41)..(41): a, c, t, g, unknown or other
  modified_base (46)..(46): a, c, t, g, unknown or other
taatactgggttttaaattcatgtttgaaccatataataanaatgngtggaaggtagatctgagagagcaagattagactgaaaagagcttcaatatatggatcagcagagggtttagagtacctccacaaaggttgtcaaatgaggataatccatagagtatatttaaagctagcaacattttattagattcgaaatggaaaccgaaaattgcagatttttggcttagcaagattttcttcatcagctaccagttatgttcctggtgttactattgctggaacattgtatgtagtttttttggatattaattcaatatgttatgttttgaatatatatatatataacacttaattatatgtgctaattttcttaattgtatgtatgcagtggttacttagctcctgaatacttagcacaaggaagattaactgaaaaggttgatgtttatagctttggagttcttgtgttggagatagttagtggtgtgaggaacaacaaattgagatcccatgacacttttgaaactctagtggctcatgtatgtaaaatatatgttatttattcccctctatcttattgattaatcaataaatatgcataatttgtattttgttttattatgtgtataggtatggaaacactaccaatcaaatacagtgtcagagatcatagaaaaaagcttagcagaagaagactttgaagaagttgaaagagttgttcaagtgggattattgtgcacacaagaagtaccatctttacgtcctaacatggcaatggtaattcaaatgcttaaacaaaatgattctgaattgccaacaccgacaaagcctcctttcattgatgaaaatttggagttatcttcttcatttgattcttgtcgatggcaaccttcttgtatatccgatttatgttcacctatcgagagagattcaaatatataataatagaaacaacccccatatttctttctttctttattttttttttgatcaattttaatcttttgtgcgtttttatttatgttcataaaaacacatatataaacattaaaatatacgcaaattgtgcaagaattttgtgatcacctttctgccaattttcggtttttgtctaagagatatgaggaaaaaattaaaaagaagcaacttatttgacttttcgattaaaaaaggttagattgttcatgatctcatggatcatgagtaagaaaaagtaaactatataacaaaaaggttagattgttcatgatctcacaagtcatggttacaaaaatatactttgttcggcaaaaaataaaaaaacaactaaaaaacaacgaaaaa

SEQ ID NO: 393748 - DNA, 611 bp, Cannabis indica
actttataatatatagtgcggtgaactgcaattattaaattaaaaattgcaaatcataccgcgcggtttggaaaaaatacaaactgcaatcgcgccgcaaaggatttcaaactgcatttttatgcaatgtgatgcagtgcgagcgatttctgcggtgtgagcgctttgatgaagacccctaattaaatggatcaaattaaaatatatatcaacaatgagcaaaactctaatgtttcttcttcaaataaaaagaaaaaaaaccgtaatatttctcctctttcaattttttttctcaatgcctccctaactctttcatcctctctcatgtttttttagctgcccatcgaacaatggtgatgctcggcctctggtggtctaatctgaccccaaattgaagatccacactcccttgaaaccttagatccacctctctctttgaatcgtcaaggctctagtggtatttcccttactctttctctctctgtctctctctgaatcacatttcccctttctctttcgcttggagaagatcagatcgacattggtggctgtaaagcccgcttagttaatttggaaattagcagttgtttttgattaattatgaaattatt

SEQ ID NO: 393749 - DNA, 1697 bp, Cannabis indica
aaaggagcattgaaatcccctgtaatgagccaaggattggccggcaaagttacattcagcaagttgacccacatctccttcctctcctctcccgtattgaggccatacacaaacgtaatactcatagcgttaatctttccagtcagtttaacaaagcaatgaacaaattgcggatcttctggaacaacaatcacccgagcaaagttcctcctccacaagataagaatacgatattcaatcataggactagtgtaataatcccaatttatgaattttctactcatcatgtcactgattttattccccctaagtttagtttccaacaaaccacaaacaccaattttattcacacaacaaaagtcataaacatcattctgcttctctactttattaattcccctcacattccaacaagctatattggtattatccatagccaatattgagagtacctgaatcgatttgcatagtgccttcttggtctcccatattcacttcttgctgcccctggagcacactgtaatggttgctgatttgttccactttttcccccgtagtggcttgattttttggtctctgtgtggctgtcttctttgggacaatccactccttcttctgctggttattacttgccttttccatggtttttttgtctccttttgcttcttttgcacctgctgtagctgtttttcttccctttctttctgaatttcagcatgccgacaagttgctttggtatgtccaaatttgaacagctagagcacttcgctggtagccattcgtattctatattctgatcttgtagctgtccaaactcgttaaagtaaggaatgaaccgtggcggtgcatccgtgatttccatttcgactaggactctagcaaattgcaacctcgttctgtctttagtgtgttgatccaccattataggtttcccaattgtgctcacaagggcacttaaacttttggtgccccaatattgaaggcctaaatcatgcaatcttatccataggggaaccgaatgaacaagattcaaagcatttaaatccatagtccaaggtcgaattattaccggttttatgtcgaattggattactcctgcttccaacacttgatctcaggttgcttcatctcgaaatctaaccattattagccccattgccatcttagacacttgctggatccctaaatgtccccagacccgtttgatgtagccttcgaaaatgggaatagggggatttgctcctagaactttgcagataacagctgatttccaacaatttccctcttctctaacctcctccacatcaacttgtgctatcttgattccctcccttatcataggttctgtgaaaagaagtttttggtcccgattcattgtttttccatttgtaaacgtctcccaggtcttcttcgcagacatcgacgatgatgcagggttcgaatgcctactctgttcctcctcaacctccatcgcccaactcgtggacctctgaatctcgccctgaccaacaacttcagccgacatagtatcctggtttttaaccaggtctgcaattaggttaagtccctctgtcgaaccattctcttcgacctcctcagaatcctcacatcctgcttacgaatcgtcaatgatggattgagtgactagcttgcgtcccacctttttcttcctcgccatgggagaagaaagcagagca

SEQ ID NO: 393750 - DNA, 1656 bp, Cannabis indica
tagaagaaagaattctaatgaaataagctgaaggatttgaggaggttggaaaggtacacgtggtgtgtttgttaagaaattccttgtacgatttgaaacaatctcctagacaatgaaataggagatccggtgattatatgaccaagataggtttaaagagaagtaattttgatccctgcatatattttagagagagaaatagagatacgctatatttgttctatatgtagatgacattctgattgccagtaagagtatgccagagattaaacacttaaaactccaactgaagaaggagtttaaaatgaatgatttgggtccaacaagtagaatcttaggcatggatatagacgaaaaatgagaaagaggctattgtacctaaataaaaaaggtacattaaaaaggttttggatacctttgaaatgagtaactcaaaggccgaaagcactccacttgcgcaacacttcaaattgagtgctactcagatgctttaagataaaatttttgtatgctagtgcagtatgctccattatgtatatcatgcagttagcaaggtgagtaaattcatgggaaaccttggaaaagagcattgggaggctctaaagtggatcttgatgtacttgaagggatctgctgaaaaatgatttatttttgacatgaataaacagagtgaagactttaatgttatcaatggttatgtggactctgattatgaagggtgtattgatacaagaaagtcgtgaactggctatgtgtttaacatgtgtggtacaataattagttggaaagtaaaccttcaacaggtagtggtgctatcgacaactgaagctgagtatatggccttggtagaatcaaacaaggaggcactttagtttactaggttgatggaagagttgaaacccaaccagaagattgttactattcattgataatcaaagtgcaattcaattaaccaagaattgtgtgcaccatgaatgtaccaagaacatagatataaagcttcattttagaacaaaagttgtggagaaagaagcagtgaagattgccaaagtgtcgactgaagataatcctccagacatgattaataagatagtgcccgttagtaaatttgagcattgcctgaagttgattgggataggaattaattgagaccagaaggggctagggaatagcaccatcgaacattgatttgtcaagtaacttcaacttgcaaccaagatggagattttttggttatggttacaagtttcgtctttcagaaagctatatctagaaagttagtcgctcttttggaaagcagttctgaaaagctagttgtccctccaaaaaggagttacgagaagcttggtgaccttccggataagctatttctagaaagcttgtggctagccggatggtcattcctaataacttgtcattagtccagaacgtcctttcggagtggttttcgtcaatctggcacgttcagagagcttgtacccattcgagtcatccttacaggaagcttgtttacttacagagagcgtgttctagagttgacgtggagacttaaaaggcaatgttagttaagtcagttaccgctgattaaaagcctatttatagctatcacttttgtaattcaaaatcatcagttgagagagagcttgagagagaaat

SEQ ID NO: 393751 - DNA, 1747 bp, Cannabis indica
gggtagaatataagatagagtgaataaggcagctgacaagatgaaaatagtaaaaaagatgaggtgtgaagcttttaatatagagctgcttttataaatattgagtaatatcataatatgaatgtgaaatagatggaggtggagtatgaatgaactgtcacgtagcccactaatgagagttattttcttttccttttgtttaaatagatgataatacaacattatctttatatattgtgctaatccatctttatacatctatttattttgtaggtagttttggtcaggtagttgtctatatcggatgccttttgaaggtggtctcaagttattttatctaaattttcgagataactaggtcttatataagttgctttgtttgtagtgactcatattcactctgtatatctttggctagacaattatcttgttggttggaagttcttctgtgtcgacgattatcatagtgtgatttcgatcactctctaagaaaaatacatgataatacatgtgaaatccaaaatatgttgcacgtggcccaataaaatgtgttcaatttaactacaagacaaaaacaagaaaagaatttattttttattttttgtaagctgctcaaaagaatgacacattcatttatatatagagagagatatatataaaatacatcaaatagatagaaccaatctaattgaatgattgaaattaattggatcgaattgaatagtaaaatctaacatctaatatatgattggatcatatctggatatgcctaaaaatattggatgtggtccaataaattctcctatatataaatatatacaaatttatgtgtatgagtttatgtgaataggaataatttttctccgcgtcttctatcataaaacagataaaatgcgccaacttaatatattactagaaaatattttagtaggtttagaaataaaatgtttgtgtctttttgatttaatatttctagaaaataaatatatattatatagtatatatttttttaaaagtatatataataaagtgttaatcaaatcagattggttactttttaaagtcaaataacatccaatttgtataagtgcggattttagatttgttattctaatccaatccgctaaagtgtaaatatccacattttacggattagatcgttaggattgaattggatcgaatactttatgaatagtcttagcgtgaacgctgctttctatatgataaattattcttaatttctcaaaattttatatgatttcttaaataactaaaatatactctgtcatgtaaaaaaattaagattaaaactatttagatgtcaaaaatacagttgatgcacccacccaaaaatacatatatggatatatgatgtactaagagtatttttaatggtgcaccatttcatcaattagcctggaatcttcacactattttacttcaatagtacaccaaattatacaataaattagtgtgcaccaaattctacaccactaatggtgttgaattttgaatatatactaatttggtgtatttttttttgcattataactcttattttattttattttaaaaaataatcttacactttagtcctcaaattaacatttataataaaaataaaataattgatttaaaaagttgtcttatggaaagtacttgtaagagaagaaattctcttatggaaagttgtttaattttggtaaacttgactttccctttttctaattgatgatttcgattttgc

SEQ ID NO: 393752 - DNA, 601 bp, Cannabis indica
ggtcgttacttgaaacccgatacccagtgatcatcccttgtctttccttctcagagataagtctggaaagaatttcagagcatataatgaaaagatacggggatagaggatcgccctggcgtaatcctctctctggtttgaaagacttagtgaggcctccattaaccaaaatttggaatgttaccgtggaaatgcactccataattaagccacaaaaccaatcatcaaatccgaaagctttcagcaccttagccacaaaagcccattccaacctatcataagccttcgacatatcgtatttaatcccaatagtcgggctccacccctttgcctacacatatcatgaacaatttcctgggcgataatagaattttcagcaatccatcaatttttgacaaaggctgattggaagggagaaataattttatcaagcacctttctcagtctgttggctgggattttagccacaactttgtagccgacattgcacagacttatagggcgataatcatcgaatttacaagcatctttctttttgggaataagcactataaaggcacggttaatctccttagagaaactgcctgttgggttttatgcc

SEQ ID NO: 393753 - DNA, 721 bp, Cannabis indica
caaatattataccttagagtaattttaaagtaattgtgtaatatttttgtcattttagtatatacctgaaaatagtcgcaaaaaataattatctaatatttttgttacttttaaattaaatttaaatatttaaacactactacaaaaaatatactttttatcccagtttttaggggcattttattccagttttcgctaaaatgaaaaccgggatatattccagtgggataaaagctcttataaaaaccggcataaaaaattacaaaaaattacttttaatcccggttattatagaaaaactgagataaaatgctatttttaatcctggttttcctttaaaaaccaagataaaaagtaattttttatccaggctttcctataataactgggattaaaggtaaaaaaaaataataaaaaaaattatactaaaactaacaagcaatgaaccactacagagaaagttttttttctttaataataattttcgtaaaatatataatcagtacatatttaaatcccaaaaattagtataacagaagtcacgaaccgccttcatcaaccacgaatagcggcgaaccacattctacaatcgtgagtcattattaacgaccacaaacagcgaccacgaagcttcgtccatcatgaaaaactatgtacctgtcgaccatgaaccttcacacctacggaaagagagaaggagagagagttgatcgacatttca

SEQ ID NO: 393754 - DNA, 688 bp, Cannabis indica
tttttttttttttttttattagcatttgaaacagcaagtggatattttgagtttcttttgtctatagcattcctgataatcttatattataaaacacatatttaaatactaaagtgatactaaagttgtaagctcagtttcaattatctcaatcaaattgttattcactttcagtagtaatgaattctaatttacaatgcaaattcacatacatttgattaaaaaaaaatttcttcattttacaacaaacttccagtagtaatcttcttagcactttgtaaatgtcataaaactacattcattcgagaaagttaacagtactaaattttgtaacaaattacacaagtcacattttgcactagacttaataactcacaaaaaagaaaactaagaattttctacacaaaatcacaaaataacaatttaatatgtctcgcccacttcattattcttgcaacatcatcatctcttctctaaataataagttgcatctcctcaactttgtactcaacctcttctacccttctagctaatctttctaaatcattcacatgtctttcatttgggtttgtattaatctaacacaagaacccacaaccatcttccacatttttctgagaaaaaataaggtaaattagacccaaaaagtttaacaaataaactaaaatcaaataattaacaacaaatc

SEQ ID NO: 393755 - DNA, 1346 bp, Cannabis indica
taattaaatacacaaattaaaatattatattttagatatatcactcaatataagtataataaatatatgtacaaataaagattataaaagttaaacaataccgcgcaaagcgcggcttagttacctagtatatataaaagaactgaagttaaagtacagaataaattttaataaagatgaaaaaaaaaattatgacatatattttttctctttttcatattttccaactccaagtaagtaatgtagataagccactaaggttactggtgaaggagagatgagaaaaaagagagaagtcatggattcgaacttaagactttgaagctattaagctattaactgattgtaaaatactattactctacaactacaaaaaaaaaaaaacaaaaaaaaacaaaaagaagtaagtaatatagatattttggaaagaaatatggaatggccttaatcaactttcttatccactttccagcaaaaagaaagaaaaaaagaaaagtcttaccaactttctctcatctgttttctaaaaagggaagactaactttaattaaatgttctggcataatttgattaagtaataacctttttgtgaaagcaaacatagaatcacttttgctgtcttttttttttttttattattaatgtttctctatgttgttaatcatcttagtttataattcaatgaaccctaatatgaataataataataataaagggagtaaagagtgtacaagtataattttgttttgggttcctaagttttatgggaaactctttttaagtgaattgttttgattttgagtatgaaaccataaaagaggttcatgtatcttacacatgtgagaataaacatagagtatctaggagtaaagagtggcacgtgacagccagcaagggaacccatgtgggattaggatttggacccacaaacaactcctcctcatatgtattggaaatcaaaagagggtcaaaaaaaaaaaaatatctagtgccataagagaaaattgtccatatataatccatttatataaattatatataaatatatatcaaccaacatgcattaaaaaaaactacagacaagcccataccccttttcccatttttataatccactttggaaacatgctaagtaataatgacattgcaaggtacaagcaacatgaacaacaaaatcttatataaaatatcccactaaataaataataccaaaaaaaaaaaaaaaaaaaaccctaaaaacaatatatatatcattaatttaattaagtatacgcctaatatgtcttttaatagtacgaaaggaaactcaatcatcacaatcgacacactactattttacttatatc

SEQ ID NO: 393756 - DNA, 727 bp, Cannabis indica
aaaaacactcatccaagctaaaatagatgagaaagactaaaatcgaggcaaaatatttattataattttttttttaaaaaaaaagttagtaccttccaaggtataatattactattggtctaattaaatatcaagtccatacgtatataatttaatgcatataatttagctaactaattataaggcgccattaggtaatatttaataccaataatatctaataacaatgctcttataaaatatacaatgtaaaaatgatatattttacctaaagaagaaaaaatttagaattaatttacaaaaatagatatagggttctcataaaatttagaattaatttacaacaatagatatagggttctcattaattaatgagtgttgttattgaacatcagtacctaacatataagtgacaccctacaattggttagcgatatttcttaaaaaatagtttcttaaggttattgagtcccgacacttaattacactaatagtggcatgacaccgagaagtatgctagacactaatatagtgtcttttaatagcaattctcttaattaataagaaccaacagtggagaaaagttgatctagaaacaaattgttttataattgttcaagctatcaagagtttcactgttatgttatcctatatatattattgataactgtaagaggttatttgctgagctaaatagacatatttccttaaagtttattaaataatt

SEQ ID NO: 393757 - DNA, 1713 bp, Cannabis indica
agcgagcagttacttgtcattttggcttctcgggaataaaattgtcttaactctgataactatactctctggtgtcgagaggatcttcctcgcatgcacaccatcttctagcgagataaacgcctcgccgtctattatcttggctcgtcatactatctatactcagtttgtatattgtataatatacgctaagtatttttagtgctgtcgctttctctttcacgcagcgaggttgaagcctcgtcgttaacgtgtgtacccacatggtttctcgtcaatacataagttaacagttcgtacatttctgtctcgcagaaggctatttagccagccgagttataaacataccctgcgaattatatttccaacgagttgttccatgctaagcatacttgtcgtttgcatgtttgagttcttcccagcttgacatgtgtcctcctctgatgtgcttaccgaacttcaggtataacaagtattatattcacttttatggatgtgtattctaggtttacttggctttatctcttaaagaataagtctgaagctctaaaaatgtttcaacttttcaaagctgaagctgagcttcagctaggaaccaaacttaaatccttgcaaacagattggggaggggagtatagatccttcacaccttttctgaaccaattaggagtgattcatagacacccttgcccaacaacacattggcaaaatggtttagctgaaagaaagcatagacacatagtggaaaatgttctaacactccttgctcatgcatccatgccactcgaattctgggctgaggcatttaggactgttgtctaccttcacaacaggttacctacacctgttcttgacaacaagtcccccattgaggttctattcaacctgaaaccatattatcttacacttaaaacctttggctgtagctgtttttccaatattagaccttacaataagcataaacttgagttcaagtctactccatgtacatttgttggctatagccttaatcataaaggctataagtgtcttgatgcatctgggagattttatatctcaagagatgttgtgtttgatgagaattctttccctcatgctcaatctgttgtcccatgcaccactatatcaacaactgacacatgtatcacctgtggtcacattcctggtccctcttttgaaccctacaggccacccaatgcagttactacaggacatgttttctcctcccaacctggtcctagtcatcttgtctctccacctggttttccaagccatcctcaacctgaacctcaaccagagcaagctattccagctgaaagtgacaccagtcagcaacaatctgaagagattgttgctgacattagcaccagtgagccatctctccatatcagtactcctgttgaggatgtcactcaatctacaatcactgtgcccattcctacagaggcaattcatgtctttcaacctactgctactagcagtgttcctgttaatcccattcctaagtattcactctatgaaaaccagatccaaatctggtatctccaaagccaaaaacttcatggtgagtagagaaccacttacattgaaagaagccttgcaacaaagcactggaacaatgctatgggtacagagattgttgaccttgaaaagaaatggtatctacactctgtaccattaccagctagatgaacgacatgtgggtagcgaaat

SEQ ID NO: 393758 - DNA, 723 bp, Cannabis indica
gaaatatctaattttattttaaattgtatgtagaaaaaaatttatatataaaaatagaatatacatttgatctattaagttttgaaatataattgtattatatgtattaaatttttaaattaatatttttttatattaaaatattatttgtatatataatttttaatttattttataaatatatgtgaattggattggattgactacttttacatgtcaatcaacatcctatacacacaaatacggattttaaatttttcaatctaatctaatctgtataagtgcggatatctgcacttttcgaattgaattgaatcgaatcgaattgactattttatgaatatttttaattataccagacattttaagttgttttaaataacaagaaatatcaaaaatagagtttaaaataattaattctatctttatttatttattcatttaaaaaatatcactctataattaattcgtctaattatatttgttgcattgtaaattttttaaaaattaataaagcgtttgctataagtataatatctgttattatcttaatatatataaaattgagctgtaaatttttagaattataaaaaaatcttaacaatataattaagggatagttataaagagaaatcaatatatatctattctatataaagtgtgtctatataacaaaatttttagtttatgagaaatttatgggtgactttttatttatattaa

SEQ ID NO: 393759 - DNA, 1182 bp, Cannabis indica
gtaaaatgacttaccatctcggaggcaaacggtgccaagtttggacccacgaaatgcttaaaccagtacggtcatgggatcgaggttcaagtcccatatttccccgctatactcaccttggaagggtgtctggacgataaaaaggtacctctaggggttgtttctacatttgtaataatgtggtttcatggtcagcaaaaaataacattccatctctctatccaatgtagaggtagagttcattacagttggtagttgttgcactcagctgatctagcttaagaaaatgttcattgattatggatacccttaacaaacattgaccatcttttgtgacagtacaagtgccataaacatttctaaacacctactttagcactctcaaacaaaatatattgacattaggtatcatttcattcgagatcctgttgagtcaaatatgctgtctatatctcatgtgcccacaactaaccaacttgtagatttgttcaccaaagctctagatactcaaaccttcactcatttaagaacaagcataggtctctataccatctgaacggttctcagttgcatttggttacatttattatatctgaccctgagtattttatatatatatatatgacatgcacacaaaatttctatttgttattacaatttactcaattttgttgttttgatgataaactgagcctatctcttatccagttaaaaacagatgcaatgggaagagctctcttaaacgcatgtactaatagaaaaatccaaagttatccaaagtaaaaaagcgaattaaaaaaaacaaacaaataaaaaaattgaaggagtggtctagattgtcatactactcttggagcacatgagctcactttgcacacacttatgaagataatgactcaattaagtaattttttattcggagtaaattgtgcacttattttatagaaattgtcttctcatgttgtctattatatatttctttgtcaaggttttgttcactactacaaaattcactattcatgtcagtaaacgcgactgttcatcgcgttgatcgacgtgaatagtaccatattcaatatattcgtcttttttaaaatgtcacaaaaaattaataaattgcttcagttctaatccctcactaattacccaaccgacggtaaaagtcaaaaaattaaaaaaatt

SEQ ID NO: 393760 - DNA, 596 bp, Cannabis indica
aaaaaaaaaaagaaataaagtttgttgaaagtacataagaagagatataatatttattaatgaaagtcgatataagaggactcataatatttggtaattggtatattggacaatgaggaattgagatagagagggagaaactagaacgaaggggagttttgaccaggaggaaaaaggaagaaacagaaaaaaaaaatggagttcctcgtagggaaagaaaaaggagagaaagaaagagggaaaggaacacaatttttgtacaaagaatgagagagatcataagataggtacagtaaaaatgaaaaataatagtccaaagcagtacaaatataaaaaaatccgttgtggtaataataataaggctaattaaaaaaatttccactcgaattttaacatgtactaaattatgttccttcaacttgtttggccgttaaaaattcccttgaattattgagattgttagatttaaggatttttgtctaattttattcaattttactgtttcagtgattgtttatgtactaaaccataatctcctgactttgatatatatcaaatcatgcgcgaattttgatatgtactaaatcatgcctcct

SEQ ID NO: 393761 - DNA, 1076 bp, Cannabis indica
cttattatgttggtatgccaaagccaaagagtcgttgttctcttagttgtgccacctaactagagaaatgatttcctcttattacatgcagagtgctaattaattacaacctcgtattacaatttcttaatcaacttcatgttcgaaatcacatgctgaaactcctcttacgtacatagcacgagaatgagctatttccctgatttggggtgtcaatctataattagagctcaccctaatcactatagacttcaaattgtaactcgagacatattacttgctaattttaacaaagaaaagaaaaataggcttttatgtacgtataaactgaattattctttttctcttcttgacaacttgttaactttcattaattggcaatacaaagtgaaggaattacaaggaacatatgaaatataaagatttagactgaagaataatgagttttaatacaacagaatacatcaccaatctagctagtattattctaacaattaccattaagcttatctactatagatttacaatttgtttcaattaggcttgtacataaatctttgtaaaccgcttaaactgaataacccgtccaaatctcaccgagaaaactgataaaaaatacaaactgaaaaaatcaactaaattataaatcacccaatctattaattggacgggttaaaaataactccaacctgcccatgtaatatccgaaaaatatattgatatttattagacatattttattaatatgtgattaagtgggtattagagtaggtttataatcctacttaaactaattacgagttgattaggaaaatatgagtaaatgaataataaagcgtaatttattaattacggagattgtattgaaatatgtgggtatcgtagataccataattcgaataaaatattttatcaggcccgactacggtggaaatttagcattatggtcagaaatgtcacgacattaatgtaagaattattttgagggtattccggactaggttagaatttttagaatgtcggtttaatagattagtaaaattactaaaatggccctaggttatttttttagaatt

SEQ ID NO: 393762 - DNA, 602 bp, Cannabis indica
gtctctactgaaatcttgaccacgggtgattcatcttcgccgatcgttccgctgctacttgaaatcttgaccactggtgtctcgtcttcgccgaccattccgctgccatctctgcgtcctcctggatcgtcttctttgcctttcttcacacccgttcttccgacgagcttcgcgctggtgtcctctattttctctggtttttcaactcctcctatggctccgatggcatctccctcttttccacctagctttggtgtttttgatactcctcgtatgaatcttgatcgaccttccattgatgaaggcaattcgtatcatctcggaattggagacaacccaaatttcctcaatgttcccttccaattaactggccaggacaattttcagtcatggaagcgcgctgccacgattaatctggctaccaagaataaaactcccttcatcgaaagtactcttcctcgtccccctgttaatcatccgtatagatttgcttgggatcaatgtaatagtgtggttatggcatggattttgcaatcggtctcacgtgaaattgcagcaattattatgttcaaagaatcgacccttgctatgtggaataatct

SEQ ID NO: 393763 - DNA, 1229 bp, Cannabis indica
attttgattaacttattcgatgtttgtttgttacattaaacaaagaaaaacttttattgacttgctagttttcaatcaatgtaaaagattgattactatggagagagtcatatcataatgttactttttggctgtgttgggcttctctagaattttgcttttttgtttttattttcgttttttttttccatggaatcccaatattgggtaggacataatggtgggatcctaaaaaggggttagagggactctagtgatgaagagccatgagaagttgtcaatagacagtggaaagtggggtcatattgtaagaatgtgttccctattttttcagtgtcacatctctattagaaacgttttccaacacttattaatactaatatacctctcttcacaaccagaaaccattccttctataatcacacttgtaataacattgcaatgtgaaaagattaagcttaagcagtatgactattactcatttagattaggactgcatgcaaattagtatttgacttgtggcactaaagttaaaaggcttaaaattttgaaattgatggtaatgatggggcaatttttaacccacacaaaaaaaaaaaatatatcaaatgacagactagtgaaagaatgaggttaagagataatgatgcatacataatttaatttatatatgataagacgaaatttaataaattaagggaccaccataggttggaggggggtgggggttttgggaagagggactgttttgttttttcatatagttgttgctgatgacacataacctgccctaataagataagaagaattgctgtaaactcccaaaaaaaaaatatcaagttttgtattggtagttggtgagtatggagatcacaataattccaattttttatttaatacatatatataaatgtatatatatatatatatatttatatatattaccaaatgcactatgtgatgatgtgagaaaaaagagatttggtggtgaaatgaagaaaataatcaaccatcgatttttgggcagaagcggagaatccaaggtctttgcatgtttaaaagtgagtaaaagaagattgctacaatgcatcaattttttataatttttattaaattaaaataaataaaatcggatattataaaagtattagacacttataatgtcttggctaattagaatttttgccccctcaactttgacatgtaccaaatcatgctccctgaacttt

SEQ ID NO: 393764 - DNA, 1537 bp, Cannabis indica
ctctctctctctctctctctctctctctctctctctctcttgttctcttagacgaatgccctaccacaacccaccacaaccacctcttgttctcactccctcttgttctcactctgtccgtctctcgatctctctcactccctcacgatctctcaatcgatctctccctctgctccccccggcgatgccacctccgccgacccttaccggtctcgatctctatctcacaaggtatatatataaatttatttatttatttaaatacttatttatttatatttatatatttatttatttacatatacatttatttatgtatatgcttaggtaaaaaaattaaagtgttttaaaaaatttaatgtgtattaatgttagttgttattataaaaattttaatgtgtaaaaaatatttggaaaatagttttagaatagaaaagatttaggtttagctaaaaagtttatttatttaatttgttattgtaaaatttaattagttattttaatttagccttggtaaaattataaatttttattagtaaaaataattgcataatttaggtaaatagatgttttagtacaagtttagtatagttatggaaaaaaagtttactataatataggtaaaaaaaagtttactttaaggtttaatttatatttatgtaataaatttaattttaattagtttgatttaattaattaattgttaattttgtgtaggtttttatttgtggtgatattgtttgaaaaattttgggacgctatattagaattggtaagtgttaacacagatttttattaactaaaaaaatattagcattttttgtaataaataaattacagaattaattatagcaataaatagacatcaagaaattttaaacgtgattttgaagttaactcttcataatcccccagtccatcttattaggggtgatctttggaatgcaaaatacaataatattagtagtaataatatattgatttttctctctagagtggtcgttccttttaccttgggttttgtccctatttatagatgtgtagggtgataattatttctttagaatctattcattcataattactaatgaaacgtggacattccccacgtttcattattatgcatttgaaataatattaaataactactctttcgtctttatcatagattgttatgctaactgtgttggattattcttattgaatatatattatccttctttactgtctttgtagggaaaataatgagtgtagagatacaatgcttctcgtagttctctcctttcattttggaaggtattagctgttatattatttattatataatataatgtttaagattaaaattgtgatatgttatatatattattacatataatataattgggaattatatgcatgtaataatcacaatattatgtgattgggagttacatatagttgtaacatataagaggtggagttaatattttgtaacttccacatgatcactaattaagtgtgtaaatagtggttacacaacttaatttttgaaatt

SEQ ID NO: 393765 - DNA, 1260 bp, Cannabis indica
cactacaacaaatgtcacttttgttaggacaaagtattgcgctggtaaaatagaatttactaataatgagttggacaaaagggggtagcaaatcaatgttagtgttagaacttttgccggcataatatgaaaagcgctggcaaaaatgactttttccagcacgtaaatgcattggtaaaagtaagattttaaccactgcaaatgtacgctgataaaactttgactcatttgccagcgcagtttgtgaaatacgctgataaaagttacttttaccagcacggaagcaaacggtgctggtaaaagtgacatcttttatagtgttttattatcgtcatttctttaataaaaaaaaggaaaattaatcatctcctcttcttcaaactctctacatgcactataaaaaattttatttttagtcacaacaaaatttgtgaataaaagtaaaaaagttgttactaattataaattatcattcctacgttgtgactaaaaagtttatagttaaaagtattagtcacgaaaatcacaatttgttgtggctaaatatatttttaatcacaatacttgttgtgactaaaactaaattagagataatttgtatttaaatactatgctttagtaacaagtaattttttgttgcgactaaaaattacatttagtcacaaaaaatttatgttgtaattaaaaatttatcactaagagtgacttgtgactttttttttgtagtgacgttttagttattggtacaatggcaagaaaaaaaaaaactctcttgattgttgatgacctattgaaagagtgtgacaatgtgattgcgccggacttcgcattatattttaattatttttttaatataacaaccaataaagaaaaatggaaaaaaaaaaaaaaaaaaactttgaacaaacaacgttttatttgtctacaaaaaccacttgtggacgaccacatgaacttatttttgtaagaattactaagtaatgagtgtaaatttaaatataacaatgaatattatacttattatggcgacaacaaaactcatatatcccataagaattcaaacataatttaatattaggtatgaatacatacgcactttcaataataattgatgttgagagcttttactttgagttctccacaaccttcacaaaaaaaaaaaatgcttaaaatgtacataaacactatggaggaggttctaatggttatatttttattataaccacatggttacatttttttagccattggatcactatt

SEQ ID NO: 393766 - DNA, 607 bp, Cannabis indica
aaaaaataaaaaaaaaaaaaaaaaaaaaaaaaaaaaaaaaatctaaaattgccataagggcaagttcaataggtgttgcccttaaaatgactgttagacaaaatttaaaattaacctgatgtagaagagataaaagtgttgcccatcataaaagtgtaatacattaattcattttggtcagtgtggctactgcccaaccatggtgatcctatttttctttttaactttttttttattcaaaaaattttaattggcttaatattacaccatagaccacttaagcaatcaaattgattgttaacgttaaagatggcctataaacgactgtaatggtatagaatgaagagagatctatacgacataatctcccataataagatttctcatcacatataagtagagatgaaaattagacaattaatgtagagggaatgcagttactacccccatttttgctacctatttatgctcccatctctgttccattcccgtctagttactagcggatttgaagtaagagaatacccatcggttatggagaactatcgggtatccattaacgtaaaatgaaaaaaaattaattaaaaaaaacttttaaatttaaatt

SEQ ID NO: 393767 - DNA, 1251 bp, Cannabis indica
ggtacgcttccgccatttgaattcttctctttgaatcaacaaaggtattctttagatctatagttatacacttataattatatgtaatatgtttatctatagaattgaattttgttgttgcatattttatgagtgatatagaatctaacaagtggtatcaagagccacctttgattgatttttgagaatttagggttcatgtttaaaaaatttgggaattttcaaaattaattaaagaaaataatgggaataagaaaaattaaggttttgatcttccatttataattttgaattgtggttatgtgatattcatcttccaatattaagatgaattaatatgtttgcgattcattgaatttcttcggtacgaaatcatatttacgtttcttgtgatatattagaagcattttgtttatttagtcatgagatatattagtttgaatcaatttaatgattcactatgtcaaacatattgttttcttgggaatacatgttttttttttttattgtgatatatcacatgtgttggctctcctcttattgccattaagtacctgtattaaatttggtacttttttttaatatatatatatataattatatatatattatgtttggagtttggattaagaattcagtatagtttttcttttactatcttcaagtttgaacaaaggtttatttggtacaataataattttattggttatgagtttctcattattatacttggtataatcatatttatgttcgatatatgtatgtacatataaactttaggctttgtatgaaagcaattaagattatggcttatagaaatatatatagcaaactatatacacattaagaccaaagttaagaatttaaataatttttttttttttgatcatttttggttcaattttggcatactaaaattctgaagtttgtctctcattctaaatgagttggttgaaacaagatacccaaagcaaacctctcttgcgtagattgctcatgaggaatgttagatgtttgtgtgtgtgtttctcatgtaagtattgatcggcccaaaggaaggttatacttattttgagggcacacatacttgtggtgataaatatgtgacaattataaggtttccatgtgaacaatatgtacagtccaaagattgacaaattgtttgacaggatttattgtcaatatttgattgctacaacaagagtaccgcttacagttaatattactgtccaaagacttgatattaatggt

SEQ ID NO: 393768 - DNA, 735 bp, Cannabis indica
gtttgtttattggataattcttttacgcattaagtgtgctcaatgacagtcgttttacctggaaaaaagcatttcccttgtacgggcgtaactatcatttagttatggaagcaattgaaaccatggagaaaaaccttcctggattcttctacgcaggtaagtacacattacttgagaaactttgtccattgcattatgaagttcattggcaccatttcctactagtactgttactgtgtaaagctttaatcatattttatgaatttgttttggttaggaaatcacaaaggtggactctctgttggcaaagcaatcgcctctggatgcaaggcagcagatttggtcatctcctatttggatacttcgtcagaccaaaacagaacagacatggaaaagtaaaaggagtaaagtacctaagaatagtcactctgcctaaattacatgacttagaaatgtaaaatgtaagatacacagtccatgagtctcttgcttcttgtttattaacatctatttgattatgaattttgtgtattgtagtatatatacgatgcactatcaattatatttaggagaatatgataaaagaatatatatatattttagaaggttatatatattattaaagaaattatactgtatacttgcatatacctatttttatggataatgtccctattgtatttcttataggggtgttcacaaagtatccgatccaatccaatccgcacgatccaa

SEQ ID NO: 393769 - DNA, 794 bp, Cannabis indica
tttttttttggtaataaaaagaagaagataaacatagtaaattggcagcttatccacaacaacatcagaatcattagattaattagtgttccagtcacctctcaccaaccacttccaaacctaaaaagctgaccaggactaagaaaagttatataagaaaagtcaactcaaaagaaatgtaaacaaaaaactatagctgtatttgtctatacattactacacctacataaattcttattcattatttataaggaaagtggtatagatttatagagatccatattcaatatcatagttagaaagagtttcatttgtacataattaagactaaaaataattttattgacttattgaatttgaatatattaacttctatttaaaaatacgaaactaaataaattatattttaattaaaatattataattaaatagaattatactaaaaaaaattaaaatatcaaaaaataataatgtaacaacaataacaataaacaatccttaatactatgtatcataataaaataatttttaagtaaatatataatatttatacatgtattataattaagaataaattttttgacatagtgttttagtcttttccttttagtcttgtctttttacatgattctttagtcttgtcttttgacatggtttattagtattttccttttagttttttctggttcgagtcttgtcttttggcatgggttgtgtagctcagaatcatcatgattctatggtagaaaacattcaagaaggggaagattagatgtgttcaacccgaaattgct

SEQ ID NO: 393770 - DNA, 692 bp, Cannabis indica
aaaaaaaaagataaaaggattaagtgtataaatattaaaacataagggggttttgtcacaaaaaaaaagataaggggttaagtgtataaatattgaaacctaagggggttttgccacaaaaaaaataagggattaagtgtataaaagttaaaacataatgaggttttgccaacaaaaaaaaaaaaaataaagagggttaagtgtataaaaattaaaacataaaagggttcgccgcaaattgttacttaaaaaaaaaaataattactgtaaattggttatttttcttttatctaaatcttaaactatttattaattgtaaatttaaaacaaaattaataattaataattatttgagatagagcacatgtctcttagtcacatattaaccatagatttttagtgatcttgttagatctaacaaaatagcatgcatttagcataacaaagggtgtacacacataacaataacataatgcaaattttattaacaagtttgtgttctcttaatttacaatggatggttgcttataagatatttattttttctaacaaagatatgtgagtacaagtcctacactaatgacatactgttgctgatgtaaatttgatgacaatgtagacatgttagataatgtgacacatttttgacaacaccaatcatttgaagatcgtcaaacactaaaaaaacgtaa

SEQ ID NO: 393771 - DNA, 600 bp, Cannabis indica
tggtctttatgttttgaagcataatgatagcttccctagcttccctagcatcatcagaaaccaaagtatttttgctaatctaaccacatccatcttcatgatgttgttctcctttccatcacctattttcaaagtgccctttttagcagctgctacttttctcttagcatcctttgtgtgcaattgatcgatatacctctcatgcatgtaagaatttatttctgaactgcgtcagtactgggggactagcaatgttaaaattaatattgtggactaatataattataagtttaatactataaacacaatcaataacaatgtgttcaatatttgtcaacaactataatgggatggttaataattaataagtgtatttgaatataatatttaatagattgttgttacatgtgtatgagttctattttattgttttgtctaagaactctagcatacacggtgatcatttgttattttgcgatcattcatttatgagaaaagagcacaaatgacatgattttgttataacatccatttaatggttattgctcttgtttctcattcagcttcaagcgttccaagaaactctgccatgttaacgct

SEQ ID NO: 393772 - DNA, 510 bp, Cannabis indica
actcatatataaattttacttctctatgtaatcaaaactagtttcgtgatgatgaaatctagtttcttgataaaaaattagtttcttggtgaaaaaaccagttaaatatataattttgttaagacaatgaattaaacaaccagttacttctatgaaatcaaaactaagaaataaattatttcttaatgaagaaacccgtaccaaaactcatataaatttcatatgctttgtattctagtttactatatggaattgtcgtcattactgaaaattttttggagttagacatcagagttatcaccagtgttggacgttggagttggacaatctgagacttagaaaccaattatatttagagtaatttgcggtataaataactaagtttaactctcagttgcaaatacatactaagtttatttttgggaaatttacatggtatactaacttttgtcatttttttttacaaaaatactgccaggcggtatttttactttttttactgtatttttt

SEQ ID NO: 393773 - DNA, 826 bp, Cannabis indica
tgtaccataaaaatcacccagatgctttaagtacacactagttaaacaaacaaatgattttcgaatacaaatgtagatttaagttaccaaaacatttttttcaagtgtgaacgtatttggaatgttgagagtttgtgtccgataggaaagcttatgtgctagctatcagacctggttagagcatctctaatagtgtcaaaaaggtggtgcatgactatattttagcactggtaagaaaaattataccttgatagtgttctaaaaagtatgctaaatttggcacatactaaaaattgtgttaaatttggcataagatataacattgtactaaatttaatccacaataaatattatttttttatttactataatgccactaattattatgttttattgacttttactaaattttatttaccatattaccgttatttaaataataaaagtaataagctttgtatattttcaataaaatatgaaatttatttttttcttattttacatcttgtgcattggagtataattgtaaatagtagaccaaatatagtacaaactcattttttgtgtcaaatttagcacaaattttaaatcttccattagagatggtcttatgtgtcaaagaaattatgaactatacaagatagcaaacatttatagttgccaatatacaacatgattttaaaatattacatttttttttattttttctctcatcctcatcaaatttaactttttttctaataaaaaagggaattttttaaatatatacataaaactaataatatttatatgtatagcgtcagttattttaatacattattttacc

SEQ ID NO: 393774 - DNA, 1232 bp, Cannabis indica
caagaccaacaatcaattgttacattcagacttaacgggactccaaggattaagttagcatcacgaacactaaacatgtcatggattaaatcatagtcccagctgtggctatcagtactaagcaaagaacaaacatttcaattaaccaaacctgggtgaaccaaagtcacaaaagggttggcatttcctggtagccatggcattctcttcaacctcagcctcagtatgtccacgtaacatgttaagcccaatcactagggcaaactcatctcgggtaaatcagcatatcttccttgcaatgtaaaaatgcacttcgtcatccttatctgatttgatcttatgcatgaacaattgatggataactgcacccgaaaacgctaatcgctctctctcaaaagaaatgcttgaaaggggattcctcattcaccctttccaacaactgcatttctataaacttggctttcacattggagtaataccaactaccacctccccaagtcacacgactagtgtaatattctgacactggaagtaaaagacgtggaactttggaagactgcaaaaaacacacaaaaaaaaaatggatgtctgaaaaattgtgcataagcatcgaactataatcggtccatgtatcggacttatcgggccctagcaaaaaataaatattcaatatggacatcgggcccactatcgggccctatgtcgggcctatcggaccctgaccaaaaattaagaaggacaatcaccatcggaccctaacagaaaaaatataattcaacaacatcgggccctatatcgaacttttgtcttcttcctagatccatcttttacatcacagataacaaatctaaccctaaatctaataaaaaactcacaaatcacacaccttaaatctaataaacaatattttaaccctaaatcaataatacaaatattaaaaaataccatagggacaaaatcttaccttggccaacactgcgtggtggtgggttcggtcgagtagtcttcgtactcaaatgggttcgagagagaaaatttttttgagagaaagagagagatgggaggaagagatagaatatgtggtggtgggttcggtcggtttgcgtggtggtcatgggcggtcctcggtagtcgttggttcgattattgggtggtcgaggggtggtggatcgtcgtgggtagggggcggtggatcgatactggggcagtgatgatcgtgggtttagggtatc

SEQ ID NO: 393775 - DNA, 1266 bp, Cannabis indica
gagaagcaacactatcttgactctatcgtaagtgactttattcagtagagtgtgtggtgcttacaggtggttgaacttgaacgtgtacatcagaatgtgtggtagctggtggtggtggactctgtatattagagtgtgtagtgggtccaagtggttgaataggtccagtgtacatgtagttggtcttggtggtggactttgaacattaggacatgttgtgcgactggttggttgcctttgcacaatagattgtttgttgggtccaggtagttgactttgtatagtagaacgagtggtgcgacgtctaggtggcatagcatcaatggtctggtcaacttgtggactatgtgtagtagagcgagtaatgcgacgtccaggtgccatggcagcaattattcatcatataacaaacaaataagaaaaaaaattaacattatgattgaataaaaaaatattaagatatattgagataaaataaatagtaacatatattttgataaaactaactatgaattaggatttcccatgttggtcgaattctatttcagaaatgtcttcatctgagcaaatcatttcattatcacttgagtaaataatgtcattgttgaagaagacagttccatcatcaaaatcttcatcttcttctcgatttttcattgattgattatggttattcatattcagttcaataacaagtttatctgaaagagttatgggtgcaacatcttgtcgaactaaagaagaaccttcaaccaagtccttggtaggtcgaaaaggaagcaattgaaatgattcttcctcttggaagacatcattatttaatgaatcattttgagtattacacacttcaggaatatcataaattatacgatgattaactttttgaacaattctccaatttaaacgatgactcatatcaagcaaatagaaaatttgttgcacttgagatgccaaataaatgtgtaaagaccgcttagtttaatttggaaattagcagttaattatatttaattatggaaaattatttatagatatttaaataattatttatgctgttattattgaattctgaaatgcattttatgtcatatagtgaatttcataattttgcatttccggtgcccggtaacatggaactcggtgtttgactcagtaaaatcacaacttagtatgttagtattgtgggacggttatttagacattgggaatgtcgggagtggtcgggaatttagaattttcccaaaataccctttagtgccctttatg

SEQ ID NO: 393776 - DNA, 915 bp, Cannabis indica
aggaaattatttgactttgtttctacacggtaagcggataattcgttggtcggggaaggtacatttggaatgtcctcccggagctactacaaccaaaattgggttcaattttgaatcttttgaggtcatagaaattgttattcttgttagctttatcaatacaggttctctttgtcagtttctagctcgtttttttttctttgtttatttgttcttattattatgccccttattactgttatgtaccaaacatttgtgagaaattgtatgcaaacttactatctccaatgcctaaatcaaaattaaattggaattcttttttgtttctttggctaccaaatctactttctttctttttttttctctttataattgattcaattcaatgtacaattaaaatacaaatattctagcgtttaatttattattggctaataaggatacttaaaattgagtattgctattagttagaaagttgatgtcagtatttaattgcactaactgtaatagcaatagaatacttaattatggtgctaatttatcattagacataaatttgaatgcgacaaacacttattttccattaaatgtgatgttaagcaattggcgtatgaatttgttaatctaaatctttgatttctatacaaaacagttgttaataacaaactagaatggacagtgcgtgtgaatgaataactatgctaaattaagatgtcactttcatttatttgaaactcttaattattatatcattttaaaggggtaatgatatttgcgcacacaaataatacaaaattaatattatattcatgtatgtagcaagtaatttcatgcaatcatttttatataagatagattctactattaaaaatgatttgggtagatgtgtaatttatgtgtgcacaattttttttt

SEQ ID NO: 393777 - DNA, 1190 bp, Cannabis indica
tttttaaacatgacaaaagagaagcctgcagcaaaggagagtaagaacaatgaaatgattccattgatgatgctgaccttcatatacttcttcttgctgatcttgacattgaatcaagatatttgattgttaatgtgaccatttatttgagcaacgttttgaaggaggctgccggccacatgtaattttttttatatataatataaatatagtaaatataaaatttggtcattggtgtaatatatttagttacattcatttgtttttatatatatatatatatttgttctactctttaaacggagtctatgtaattatttatatatatataaatggatattagcatcaaacctttcaaactcttccaaactcacatttaaacaaaaaaaaaaaactctttcaaactcttctaccaaaaaaatggaagtaatgaacagatatgttacaataaagactcagataaatggtgatccaaaagagtcagactttgagattaagtgttcaagcattgttgtatcagcacagcctggctcaaacgatgtcgttttgagaaatttgtatgtgtccattgacccataccagataaaccgcttgaagactcatagttcctctcagaacacctctagttatgcaacagccatacttcccggcgaggtactaaaagtttaacttagtattttgtaataatatatgtataggtgcactcttaatgagtattataaccatatatgagtaatattaattgaaaaatattccccatatatacatactaattagagtatataatgtatgtacttcactacttttaattgttattttctaaaaatttgtcctaacattattgtcataagatgacaaatttagatatatacataaatataattttttaataaataattacataaaattatttattatttggttgaagtattattagattgttggaatataaatttgtcattaggaatcataagaaaatgtattaagtgataaaattaattaaaaagatacatatagtcttaaaaaaaaaaagatatatatatgaaattatataaaaagatcatactaatttctcttagttaaatactaggtgattctagcacgtgtacaatgtatgtgcttaggagtgtttataaaatagttaatccaattcaattcgtacaatttaattcaatccaatctgcaaagtg

SEQ ID NO: 393778 - DNA, 1373 bp, Cannabis indica
aataaggttcttgtattgctcaatcaatatcttacaacatacattttggttacatccgatccccttttacaactagttagacatttacacaattacaattacaacaaagaattatatgttcacaatcgaattcttatctacatctttagttttcctaggcataacttccataatccggagcttactttcccattgaatgcgttttaccattgccttgacatgccacatcttttgattctataatacattatttctagcctcccaaatatggcaaactagaccagccaacaccactttcagcatgcttttttgagttgcagaaactaccttggtgtttttaatgcatagcttaccgtttttacaaggtactgtaaaaacggtagaatgcagaacccagaaaaatggtggtctatttttagaaaacggtggaccattttgggttgtttccagcagttaggttttgtggtttatcgataggggtttgtctgattttgagattaggtcctagaacaggatagattatgttatttaccaaattattgttgtcgtgacataaggttcaagattattaagcatcattccactctggtcgggcggcacacttgaatttggacttaagataagaaaagttaattttactgcataacatgtataaattatgatacggtaattaccattaatacaaaagagttattactctaatttaaaactactattaggtttcttacttatcggttgcttctttacgccacgatagtgacattagtaactcgttgctaacgagggttaatgatactttttaaagtatagaggcttatcttatagacaattaactgattactggcatttgattatactgtgaatagttgattaaattatatgttcaaatgtatgtgcattgttgttttgaattctatgctatacttaatatttgtctttttctcgtttttcttgccgagtctttatgactcacaggtgctttgtggtactggtaagggaaaggaaaagtagatcagccatgagtcagaggtctcccgacgaatgtacatatcagcctcgccgtcttttgtacacagttgacaggattcgtcttttgtaatgctttgaatatgtaacaatattttgtaacaaactaatacagtggcattttagtaaaagtttgtaaccaaggggatccccgaatacaataataatttggaaaagagtttaagttatactttaattcaattttctaaaagttttaattaaatcactttttttttttcctaaaattgttagtttattattataaactaatttataaaaggacacatgtagcgcctttatgggttagggcgctacatatgtcctcctagggctgatcatgggttggg

SEQ ID NO: 393779 - DNA, 1067 bp, Cannabis indica
agacaggacaaccatgcttttttaggtatgatgtcaggatttgtccctcacgttatgccgtactatagagcatgtacacccaattttacttgcccaagtgatccaacgacaattgacaagggcaattcaataagggaagaccctggggcgacatgtatgaggtgatcggacagtataagctgactcctttaaatgccacgtgatgaatcgaccacctatcaaatcaatggtcagattttacgtagcaagatttacccaagaagcacgtgaaaggaaaaaatggcctataaatacccctactttccataagataggggcaactgattgaagttgaaaaaaactgtattctacttataaaaactatactgaagtttctattaagcttcttcttcaagagaaatgagaggaataaagagttctagtccattgtatatctgccagtaatattcatcacctgccaatatgactaataaaataaactcatggactaaaaatagttaatgtttgaaccacgtaaaaatcttatatctactatttattattttatttccttcttatgctctaaatataatcgatttcaaaaaatctcgataaatattttggtgctttcattgagagctgaggaaagaatttgaacatgcacggtgtttgccatcacgaatcttaagtcacaaaaagaagagcctatccaagaaagaaaaaaaaagacttagcttgagtacccaccgaaatttggccagaagttgaaggcttgctggccaagggtgacgtcaataatgaaggcctatggggcacccatgcatatttgaaaaagttcagattcggccgatcgactccttgagagcatgacaggccaccagcgctctaaagcttgggcacccactactcacaagggcacgacatgtaaaaatgacaagatatgagaaatatttggatcaggtgatgaagttaagaccagctacgctagcggaaagttgttggaattattttaccagaatcttagatctactcacaagtatgttgatttaacaacctaagtatgaacttctaaaacgatagaaaattaa

SEQ ID NO: 393780 - DNA, 633 bp, Cannabis indica
tgagtaaataaacaaaatgtttattttagtctatatatcaacagaaacaacagttaatgagtacataatcaacccttagttgagacttttctccaaatgtttatccggtcaaatagaaattaatattaaaatgtgtgaaaatatgatattaaattgcactaacaaggatatatcatttctctgtgatgtttggcacattgtgcagcttaacattcctaatctcttctcttgtcgtgattccaactaagaactaggaaaagccacatcatcagggacggactctttcacaataatgtggggctagccccactaataaaaatattaccttttaaaaaattaaatgtaaatttttcaatttaataattataaaccaaaatagtagaatagctcccataaaattagataaatttaataagagtgattataatgtaattataaataatttttttataataaataagtctccacaaagtaaaaattctgagtccgtcactgcacatcatattctttttggcataaattaatctcatttctttttagttgcaaatgctagctcaagtaataagtaaaataaaatttagaacgaaaaaaaaagtgaaaaaacaagtattaataattagcctcatatataat

SEQ ID NO: 393781 - DNA, 973 bp, Cannabis indica
aatttttaaaatgagaataaaatttaaaaattttgatctcaatctcatcttcggacctcatatgccaaccctgactcagacctcgaatccggctttgacttcgactcaggctctcggccccaggcctcaacgccaacttagactccaaccaccgaacttgaatctggacctgaacccgagcccacctggatccccaccctaaccttgaccctaaccttacacctctagtctgaatgcagcaaccggacctcggtacctagcccagactaaagactcggtgccaaacaccgatccatagttgacctcaaattcgactttgacttattacattttgttatagagcattgttattaggcattagtggtgcttatccactatcgagatatgtaaaccctatcattggttagtgatactctctaaaagttattaatcaaattatatgagacatgatagttaattgcgtcaatagcaatatgatacctagaaaaatactacatcaataacgcttttggcattactctattttttttttattaaaatttatattatattaatacaaaattattactaatatgtttacgttttttttaaataaataataattaataaaatattataacatatataatttttatttaaataatcaaaagagtatttgtctataaaattggaaaaaagattaatgatttaatatataaatttgattagtatataaatatttttctttctatgaatttttattcattataaatacataaatgtatttaaaaaaaatacaacactagaaaaaaataacatgtagaataactcctttaagaaataattatgtatttttttatagaaaaattatttataaaaaaatacacaaagaaattgcattattagagttatcatttttttttttttgttaaattactatttgttttttttttaaattaaagaggtgctagttgagtgccacatgctcaatatg

SEQ ID NO: 393782 - DNA, 968 bp, Cannabis indica
cacataaataagagaacactgcattcctttaaataagtgaactcaataattttttcaagtgtgccatagaaattttgtccatcttcaccgggcaccataacaccgctattttgtgttttgcggttatcatctctttccttcaccaaaaatttaatgccgttcactatgcacccaggattaaaataaattgttagattcactgggtttgcaataatatacaactcatctgatactgtaacatgatagctcaaccatagtttattaatctataattcaaaaaaaatgacagttattaaggaaaattcaagagttagggtgaacaagattatgaatatttagaggcaacaatgcttactcaagttttaaacctttcaggaaactcaatcttttgcacatttttaatattgcctatgccccttgtttgaagcaactccttgtgctcactacatcaaaacgcacttggtaagttaagattttttgagatgaagtcaaatattattacttattgttaatgaaatttatatttacttgatatacgactcaacctttgtgcaatttttcaatatgtaccactttgccttacgcttgcttatcattggtaatgtgtcgactgtcctcatacccagtggtcggccaacatgcttgaataaagaaaattgtcgagttgacatgtttgggatgatgtcatttccgttcaggacggttgaatcaagtttccacttctcagaagtacatagaacaaaatttgatgcctcattaaccacaaaagactcaacattagagccttccggacgggcacgaatcttgacatattacttgtacatagacattgactgctcaatgggatacatccacctgtactgcactggttcacctagtatggcttatttagggagatgcataactacgtgaaccattatgtcaaagaaagctggtgggaaaatagtttctaacttgcattaaatagt

SEQ ID NO: 393783 - DNA, 423 bp, Cannabis indica
aataaaattaaaataaagcgagaaataaacaataagatataaacataatataaaatgctataaatgaaaaaataaataccaaatttagaatctaaacatgatgcatgaacacatttaaaacacaaaataatttaaaaattctacgataagataatccaaagatcaaaatttcatatttgagtcggtcaaattaacattgaataatctataagacttgttcttgtctttattgattgtaactagaataattcttattttctttacaaaataaagtatcgcttgtttggtcaagttatgcccctagcgtcaaagacaatgagattactttgcgagtgtaatctattattttggattccataacttaacttagtaatgtcaccttagggtcggtatcacactaaaatacatcactttgtcctatcc

SEQ ID NO: 393784 - DNA, 1023 bp, Cannabis indica
taaagcagcctttgatcaaataatcacaaactacttgaacaaatccatttttagctcaaggtttccaattctacgagacaaacttaatattaaaagcttttcctatttgagattgagggtagttaatatatatagctgactatgtcagttagttgttagttacagttaattctgttagttgttagtttgttgtgttagttttattttaactttattgagcttcatcttgtataaatactcattgtatctcatttattaatcaattattttttttttcaattctattaatcttgacagtgcatgcaactaactcttggggatttatttgcgacacggtaagttactttgaatttcttgaaaatttacaaaatattaaaataattatattctgtatatatataaatatgattaaaattatttaaatatcaaaaacataaaaaaatttcagtatgaccgtgtttagaggatgtaccttagaattttctttatattctacatagctagcaaggcttcattcttataattaggttcgactcatgaactaacttaaggtcatattataataaattattacacaaagttattttcaaatttttaaaagccatcatgagttgattactataaaaattagaattgaataaattatgaagagatggtatatatagtgtgaatggttttgaattgataacctgcatttgaatataattaagtaaattaattttaattttttttcttaaaaaaattgatgaacgcaccatacaaggtggaggaaaacggggagaaaagaaaatagattttcaaaaatcgaaaagaaaatgaataaaattttcgttgcttcattgtttggtagtgtcaccttttgatccaataatattattggttctctttttttattttctatacataaaaaaaaaaaatacattatctttttagttgcaaaggggtagttagtctattttcatatccctaacaaggaagccaataactctacatcctatttgaagctgtatataaatttagatc

SEQ ID NO: 393785 - DNA, 662 bp, Cannabis indica
ttctacttcactttgttgttaggcagcaagaacaagaggtcgtaataagtttctagtacacaaaaattatttatagcttcattttcattttaaaagaaattaatgtgggaaatgtacgtttaatttgaagtaactttttctttttttcctttgtatttttttagcatgcgtaattgatttgtatgtgctgtttttgaactttgaaatacaactaactttgtctttgaattaatagattaactaggtaatattaccgcgctttgcgcggttttgttatataataaatttatatatttagctttaatatttttgtaaaatatttatatatattaatttgagaaagaaatttatacatttattttaattttattttttactaatagtatattataactactgaatccaataaaaaaaaagagtagatataaaaaattgtgaaccaactttatttcttaataattggatctagagatattatatattcttatactatattaatataaagtaagactatagtacactgctttaattagtatttcaataaattttatattcgttttggtatttagacatgaaaatattttagtcaatatatttttttaatatgaacgtgtacactatagattatttgcgatttgcgcggtatttataataaataataa

SEQ ID NO: 393786 - DNA, 700 bp, Cannabis indica
gtagttatttaatactattgtttagtttttagttttttttttttattattatttccattttaatccaaagaaaaaggaaaaaaatgggaaagagtttcacattattattggtcaaaattattcatagtgtgcactcatttttgacacccaaaccaaagtaagagtgtattaaaagcaagcttcaataatgccaaacaagttatagtggaaaagtacttcaaagcaaaaataaacctaacaaaaaaagcttctctcttacaaaagctctctagattgttatttaggttagtgctaatctcttgctcttaattaaattgcatactttaaaatttgaaagttttgctatttgagtgattctactaaaggccatgagatgacttgtcacattaaaagcttgtctattattcttgaaagcttttctcaataaaatgttataccatatataacatagaagaagtttaattaagggtaaaatgcggcataaatactcaatgttttagattttatacacttaaatacctaatgtttatttttgaaggcaaaaatacctaatattacaattctcttacaccgttactaccacttccgttaactcataaatatggacacatggagggttcagatgcattacatttatttttattttatattaaaacttaatattcttaatatcaaaaactaaatgctacttgtttaaaaa

SEQ ID NO: 393787 - DNA, 1065 bp, Cannabis indica
taattattttacgaaaaatagtgtgttatgtaataaaaacatttaatttttaaaaaagccccataaaacactataagaagcccaagaaaacaaataaacttaaataaagcccaattaaacatacaaagtttttttttaaaaaaaaaggatattttaaaaaatatgggaaaaatgaaccatcttatgaaccatcttagagtagaatagccaatacgaactaaaagggaagagaaaaaaaaaaagagaaaaaatgacagaagtgtccccctctttctagactagaagaaatttgttcttaggatagtaaaatatgattctaattctaataacaaaaattatatttatttaagtttgagttttattagacatttgatgctacgtttttattttatgggatattttatggtatgtttagtgttataagatatcatttatccttggtatttttggttactctaaaaatattattttaattaaataatataagcttacgccttaatgggcctcgaggcttacgcctcgcctcacgaaaaaaaaacgcacctaaatccgcaattttaaacattggcagtaactaactaaaatatgtatatatttttttctctttttttaaggggcaactgccccattcgcctcaatgtaggtttgctcctgactgaatgtagctttaacgtataaatttaacaattaattttaaatttcaaaatacataattaaaaaaaaataacaagtaaaaaaatttggaagtatgatttgaaagtggtaatatcaggataaaacctatttatccaaatttctatattaaccattaaattatcatttctccacaaagaacagaaagaaaaaaaaaagaaatgaaactgtaaaagctgagaattctgcagtaagataaattaaaagtccagaatttgaaagaaaactaggacatcaggctgtaaaggctaatgagtatgcaagagtaagatagaaacctccatagttttaagaaaaaaaaaaaaagcaaataagtcataaaagctcagcattattatactgtataaacaaaagaaataaataaaaacaatc

SEQ ID NO: 393788 - DNA, 1172 bp, Cannabis indica
tcagtttatcgaagcttaataggtaaactaatctatcttaccatcactcgaccggacattacatatgctgttaatcatcttagccaattcctttcatgtcctcgggtcccccatatgcaggccaccaatagaattttgcaatacctcaagcaaacccctggtcaaggcctcttttctcgtttgatacagcactccaactgtaggcctacactgaaaccaacttatcacgcgacaatgtccaagtttccttctttgccaatgcagattggggcagctgccaagacactagacgctccatttctggctactgcattgtttttggggaaatctctcgtctcctcgagtaaaaaaaaatagcaagtggtttctcgctcatcggctgaagctgaatatcgtgcaatggctaatgctactttagaattgacatggctccttgctctcctcaaagattttagcgtctcccacaaacaacctgccaacttgtactgcgacaacaccgctgcaatatacatcagtgaaaacccggtgtatcatgaacgtacgaagcatgttgaaatagattgccacttcattcgggaaaaaattcagcaagactccattcaactcctccatgtctcttctcaacaaaacttggcagacatttttaccaagcctctattaccaactcccttctctaatattgtctccaagatgggtgtaataaatatctacactccatcttgaggggggctgttagtataggagtagttagttattccaactgtcttggaatctttatttttctgttatttacttcttgccaagttgcctaaatctgttacattatgccattgtactaaagcctatacataggtctgtaatttcagctcaagattaataagaaatcattctcttctcttttttctgttttagtcttaaacctctcataaagggagctccaacgccgataaatggactgatgatatgctccagactggcgacaaagtcgaggagcttcgaatcggaacctcaatcactgtaaaagcccccttcaagaaactaaaaaagggacagtacacaacaatttaaagacacgaaaagtggcctaaagacattctgaataaataagtacaataactataaagctaaaatatagctcaaaacactaagtactttcaatagatgactcaata

SEQ ID NO: 393789 - DNA, 837 bp, Cannabis indica
atatcatcatcaataagatcataaatatttatatcataaatatgtgtgaccttaccatatgttgtatataagttgtatgtcttcacaaagattatatctattaaactactacaatttacctttttacttgatattctatagtgatctgaataaaattctaggtcactaaagagttaagaaagatatacagtgaactacacaattagaatctaaatttcagcattaatctatgtggatcagtaaaaatataaaaagtcactaaaaagtaatatgggtgttcataaaatagctaatccaatccaatctgcaaagtgcggatatccacacttgtacggattagattggattagaaaattcaaattcgcacttgtgggaattagatgttaattggcatgtaaaagtatctgatccactatgttgaccaatttaatagtatatgtaagaaagctgtagaaagtttaatgcatgagatttttacgtgattggggcattaatgcgccttagtccacgagtctttcttatttatgagagtatttattacatagaatgttcttggtagatattcctctcagttgctctctttcgaacccagaattctcgacccccatcttagtccatttagggggtatttatagtatttttctggggtgatccctagaactgaatcacttgtctttctgtgcaggtttgataggggcacactattcctagtcgatgcagtatagaaatacatggcctatactgtgggtatcttaggggttaagtggatataattctttatcccttattgattgatgtgatccctcataaagtagtcgtcactagccttattaatca

SEQ ID NO: 393790 - DNA, 700 bp, Cannabis indica
aaaaaacaatattgttggctttagtgaaagctttgatgaatcaaatcaaatgaaactttaagtacatgcacattatagataagttagtgcatttgtacgggcttccctaagatatgggcaatttctaaatcaaagatttcaagttaaaacaaaaatgcatacaagttagtacttagtgggtggaaaaagaagaagaaaaaagccttaaagattttctcacattttaatgtacaaaaatgtccttttagattgattcccaccaatgcaagcaagatctattatatatacatataccaaaggatatcatttttcttttatctctattatcccttaaaatttaggtacattggaccaccaaatctaactccaaaagcccatttcatccatacaatcttacatactagtgcccttcatacactttatctcaataattattaatatattattatttattatttattgttaaggaaaaacccaaatcacatgcctcgaaattaagtccccttaaactagaaaacaaacacatatattttggaaaatatttgtcaaacaaactatactctaatgattcattgccaccgctcccaatataaatacaccaaccttttaaatatttatttatgtattttaacaaattaaaattaaaataaaactccacctctttagggtgtatatgtttttctttttttaaaaaaatgct

SEQ ID NO: 393791 - DNA, 1260 bp, Cannabis indica
tacctatcgctgattataccatgtcagtctaaatccagtgttctgacaaatcagggaatcaacttttgaacatacaataaagattatattccactgtgcagacaacactataatctttaaccaactcatatgttctggacttaaaaaaaattcatacattatatacctataatcatgaaataaatcatgtgaaccatgcaacataaaatgttatttctgatctttattaataagtaaatctgattatatgaaatgagttttatttagggtataaaacccaacactgcatccctccaaagtgtacccacgactcgtcactacccctcgcgcacattccccactcgcgactcgcacggttacccctgtcacaccttgccaacacgccaccagcacgcacggctcgcatgcaagctcccttgggctcgcacgcgagcccccactccccctcacgtcccgcatgcctccactccccctcaaatctcgcatgcctcgccaacatgctgccagcacacatggctcgcgtgccgagccctcactccccctcacatctcgcatatccccactccccctcacgtctcgcatacctcgctaacacgccgccagcacacacggctcgcgtgggagcccccatgggctcgcacgcgagcccccacttcctctcacgtctcgcatgcatcttgccactcctatgctatctccacgggactccactaccaaaaattttacttttagtcacaacaaaacttgtgaataaaaatgacaaaattgtgactaattataaatcatgattcctatgttatgactaaaaactctgtggctaaaagtattagtcacaaaaattacaatttgttgtgactaatgtaattttagtcacaatacttgttgtgactaaaactaaattagtgacaatttgtaactaaatagcatgttttagtcagaagtaacattttgttgtgactaaaagtcacatttagtcacaaaaaaattatattgtgactaacaagttgtcactaaaagtagcagttttttgtagtactcgtcagggtaatacttataatggttgggatgcgtcctgatattcggagtactacttttgaggggtggacctcgggcaagcatgccggcttggcacactactgcgggtctttcttccttttggcgaataatctcaaaaattaaagatatcaattttggggattaacaaatgtaaaaagtgatattttttgaaatatatatttttttaatttagtagctaaatta

SEQ ID NO: 393792 - DNA, 1706 bp, Cannabis indica
ccaaccatttatgcttccattcaggataataaagaatacattaaatgtaaatcaaatcaaataaataaataaaacaaacttgatggtgttgtctttggatcatcaatttgggtttgtttttttgtcatattttgggagggtgatgatgttctccatgtatgtgccaacgtacgagaggatccaaatgtcaccatcaccaatctgaataaaatgtttgtgttgggttctagtgtcaaacaaaatcttcttatccccactgataaccaaaataatatatttactcaagaaccctaaagccttgaactttctatctaaattaatgctaaactctaatttagtccaagtataatctatggaatcagtcttcaacatccacacattacaacaaaagctcatcaaaccatcatttttgtactcaaacaaagtaagcaaaccatcgcgatcatcaacacaataggcaagactcacatcactgtcatctgccaccacggccaaactttccggcaatgcaattaggccaaccgaattctccctcacatcgaagaacaagatactcctaaacacatccctattgttgtcctcgaagaaaacaagccaatgaatcttattcccgccttctaaattcagcgaacgccaaacaaatttcactagtttgtaaggcaagagggaataattattgggactattgttgtatctccatttttcttttcttagcgagtacaagtcaacaaacaaaggactatcatgcgagtatcgaaaattcaccgctttgtaatctttagtaccagagtcatatccgaatcccaacatatgaattttacgatctttgggtccaatatcgatgcatctagattcttgcaagctgggattccacaggatcaacttcgacttatgatcataggtaggatagtagaagcagaggatcccattatgtgaaccaacttttctaagatacgttgttctttctgtttgggagaatttttcatcattgggtagtggtgtgaagttctctgatttgatgctaccaccgccatgaatgtagtaaagtactttgttggtagtattgttatagcatctaaatattttcttttgtggagttattcttagctggttctcataatgttttgggacgaatttggggttacatatattcaagttccactctttggacacggttttgaacctcacgagtgatctcaccggaagtttcaagaggatctcgggaattacgtgggaagggagggaccactctgtctcctccttttgaggaagattttcattcggagaagacatagttttttctttttcactagaaaagttggggatggagactggcctggaaagtaggacgattataacgcaagctattatttatttaattttaaaaggatatggattgagatatttagtagttataaatttcaaattttaaacatggatacattaataaacaaaaaaaaaatatcgttgctttcaaaaaaaaaaaagaaataatcattaatgatttgctgaaaaaaaacaaaggaaatatcatcgtttgtaaaacaatgtgtttggaatgagttaatgctaacaaggaaatggtaatgtaatgttgatactttaaaaaagaatatgattgaatcattaccttctattatattaatttgaatagaatttttgaattaataaataaatttaaataccaataatattatcatttatta

SEQ ID NO: 393793 - DNA, 1733 bp, Cannabis indica
tgttgagcttatttgttataggtcttttagacttaaatctgattattctttgcccccttatcattgtactaaggcggtggtgtgcttgcggattatacgtattcacgaccagctaatgaacgattacccgataaaaggtcaactgacgcacgaccaattgacacattaccaactaatgaaccagctgatgcacgaccaactgacacacgaccaactgatgcatgaccaaatgatgcacaactagctgacgaactgccagctaacgtgcacgagcaggttggcaacgcaggcagaccatacacggggagcgcatgtgtgtgaggagctttgtgtgcttggcacagggaacgtgctgggtgcaaggagtgcgccgaagaagggattcctgcgtatggagacctgtgtcgacttgttgcttctcgtgtcaaggccttctttgcgcgaggatcatcattgtgggatggccatgactttatgactaagtattttttaaatagttttccaagtattaattggattaataattccaaaatttacacttagcaaatttttgggactcaacaaatagtaataattttttttgtaataatgacattttattaatgtagttgtattttttaagaagttcataaaaataatttgattcaatttgcattgtaaatttcaattgaacattaatagtgatagattaagttaatagttttaaactaatattaaatgttcaacacatttacgaagaaaacaaaattttttaatttaatttaacaacgttaatgatgatgtaaaatataatacaaaaacatgctcacttgaacaagaattggattttacttttctttaacaattttcatcagcttgaacagcaaataatgctttcaaataagataaaataaaataaaaaaattgggtatttaaataacgaaagatctaatatttaaaaattatatctaaaataactggaaaagtaaaaacaaaaccgaatataatttgttcattatgagcaaatccaaaatctttgtagatagagtcaatcattaattcccaactatgggacgaatggaatcctatacataaatcaattaataatagaaaaatttgttcccatcaggataaatctaactaacattgaacaagaaactctattcctctgtattaatccgactaatattgaatttagtaaaataaaatagtcgaatatttgaaaaaaataagattattcaagaatacacattgaatgctaagattatgcattaaatttctgttatagcggaagttaacttgagtaaagcaaaaggcaagagacaaacaattgaggcaaatctagctctcaacttcacacaggttgtgtatgtcacatatatttgttagtctaagatttatgagttggattgggcctacatgtgtttgtatgtgtgtggtttctgagctaggaatgcttggaattgtagtcctactcatatactttcaaatggtagataataatagaaatagagcaaccctaattgtcatatttatatttggtttacttgtaagttttactgggtgcgccttgtatactacttttgggcaaccctagtgattcgacggtgccgagtggaagggttgtcgctcaatggataaaaattactctagggataataggatgatctcctaaaaaatggtaagatctttgacgcaagaagaaggagttgatctatatcatcttgacttggttttgaatttctctatttttt

SEQ ID NO: 393794 - DNA, 804 bp, Cannabis indica
aaaactcaaacttggctcaacaaaggtgaattttacattttggggttattttttattttatttattggattatgtttattggatatcttttaggtattctagaaagttttaaaagatttgtagttgtttggagactttatgttaatctacagtagaaaatggcagaccattcctatgtaaatggtctaccgttattactggcagaaactagaaaaatggtctaccatttttccaaaacggtcagccattttcattgataatttttccaaagtctcgttattttgtattttctcgatatttaggttattgctatgctatttatcgatatgaaaacttttagttttgagttctggtccctgaaaagattttagcaagttgtttatccaatttatgtgattgtgacatatgacctctgttcaacgcatgaatttttgtttaggttgaccaacacacttgagtaaggaaataaggtaagactaacataagatatgtatatgtgtataaatgtaaactgcatgatacattatgtgatttgtatactaccaacactagtacaatgatgttatagagtgcattggtacaatattctatgttcaaagggtgagacgtagagttaccaacactaatataggatgagtatgtagtgcttgtggtacaacactcagtggtatccaaagtgcagtttagccctaccaacactagtacgggacgagtacttagtgttggaaatattttaccaggatctatatttactacgatgtatgtttgattaacatcctaatatgaattctaaaaacaatgaaa

SEQ ID NO: 393795 - DNA, 1912 bp, Cannabis indica
aagagatatcattggttcttcatttacaaggttatgagcgtgttcgagcgaatgttattggtgttaatggtggctcaacatgggaatcgattcacatgccgctaaaagatcgaaggaggatctttgatttgggacgatagtggatctttgacgaagttggactggacgggttggttacgggtagacggacagagctgtggtcgcgccggatcatcgaagttcatcagtgaggagatgacaacattttctcttgtgtttactgggttactataaggaaacaaataaataatgaaggtattcttgaaccgtgtgttggaaaataagaagagtattggaaagaataatatggaataggctatatttataactcaacctgtgtgattttttacttgatacaaaatggtaggtttacatctctatttataggactccatggattattctagaaatattattaaatgactaacttctatattttcctacataatttccactactaacacaagtgaaagagaattctagaaaattcaagagtactcgaacaaactagtaaatacaagatattctagaaaatttagtaaatgcaggaatactcccgaaactttagcaacaacaagaaaattctagaaattaactttattaaattaagtttaatatttcaacaccctcccttgcacatgatttgtgactccaagaatgcttcgtaatttgatgaatgtttctctcttcagtgactttgtaaaaatatttgttgcttgatcttgagatgtaacatatttcctacttacttcttttcttctaatgcattatcatatgtaatgatatcaggtatcaatatacttgcttctttcgtgaaagactgaattctttgctagtgcaagtgctaacacgaatctcaatcggctcctcttgtggcacattcaaattgtttaggaagtttcttatccaaacaacatgacaaacacatgaagtttcagtaacatattcagcttcactagtcgatagcataaccattggttgcttctttgacatcaaagtaaaagatgtgtttcccatgaagaacacaaatctagtggtgatctgtctatcatccaagtctctactccaatcactatcactatatcaaactatctcacaatttttagaggatgaataaaataacccataattagtcgcacctttgatgtactgaagtatcctctttttagtcttcaaatgagttattgttggagctttcatatagcgactaatgattccaacaacatcgagaataatcgaccttgtacaggttaggtaacgcaaacttctaataaggcttttgaataaagttagatccacttttcctccttgtcgtgctttgacaatttcactccacattctattagtgtgctaactagattagaagcatctattttaaacttcttaagtagttccttaacatagccttcttgagtgatgaaaatgcattcagcttcttgcttcacttcaatagcaaggtaatatgacatgagcccaatatttatcatctcgaattcttttgccatatcattcttgaactcctcaaacatactcgagctgctaccagtgaagatcaagtcatccacatacaagcatccaatcaaaatatcttcattcttagttttgatatagagtgcatgctcatgtggacacttagtgaaatccttgtctgtaaagtacttgtcaattcaagtattccaagctctcggcacttcctttaggccgtataaagccttcttcaacttcatcactttttcttcatgtctttttatttcatagcacaatggttgctcaatgtaaacttcttcctcgaggaaaccattcaagaaagcatactttacattcatttggtggatcttccatttattttagactgctaaagaaattattaatc

SEQ ID NO: 393796 - DNA, 860 bp, Cannabis indica
atgcaactaccatcctccttaagatatttcatgcttttcaaaaaataaaaattcagtaagaacataactcaattcaataaaagaaagaaccacaacaatccttcaattcaaagcacaaaactaccaaactccaagcttaatttccaagcacttcttatgattttcaagtgaaaaggattaggttagaaagagagggagagggttcggtaaggagagagaaatccaaaaaattcccttttcatttcctcaaaatttagcttttattaaagtcaatcaaataaggtcaaaagaccattttgcccctaaggccaattttcacctattcacatatacaagggcattctagtcaattcataatcaattattttgaaataaaaattcagattatcacccataaataataatgccaaataaatcaacccaatttatatttcggacccgaacccggttcggcccgaaatacccggttgtgactataccgcgccaacctgtcacaacacacctgaaaagacaacacagtcatactatgtaataatatagtcccataagcacgttaataaattaatttcatcattttaaccttctcgggtcataattacaaaaatgcccctggctcaccaacggggtcttaccatgttataaatcatataaattctcacatattaaattatataataatataattccacaataatacataatttactagttagggttttgctaatccattctcttaattctagggtattacaattaccccctccttatagaaattttgtcccaaaatttacctgaacaactccggatttttctgctccatatccgtctcgagttcccaggtgtcgggttttatgccctaa

SEQ ID NO: 393797 - DNA, 834 bp, Cannabis indica
tgaatccctagaacgatcgaccaccaaccaacttatattgccacttcacaacacccaagtgagcatcagctcctctcggccagggcaaggtcggcaacgacctccctagctgaaaatgacacaaagaacaggaaaaaaaccttcaagggtaaggcaaagaaaatcatctcgagagagagtagttgcagtgaattatttaaattactacaaaagagattggaattttttgctctcatttttattgaatatgtgaggtgacatttattgaatatgtgaggtgacattttaattcatgtgtcttatttttatgtcgtaaatattctaataattattgacccattataactaaataatttcttccttaataaatttagacagcaacaaaagaaagggaccccaactactgtttttttcttcagacgtaggctacttttattttattatttagaataaaaagaatatttagacataccacacctcatttaatgttgtaaattaaatagataatatatgagttacgaaagtttaaaaaaacctgttccggctaacttataattatcaactaaataatgttccataactactaaattataatctcataatagagtttttattcattagatttgaagagtattaggtgaaactctcttttacaccctcttcttaattgagtaatatatatttaacattctaaattatgtttaaagataattataattatactctcatttaactaatattgagtaataaaatttatcttatttagttatttgtttttattaaaaaataataactaattaatagtgtgattctatttatttgtttgtttatttt

SEQ ID NO: 393798 - DNA, 1383 bp, Cannabis indica
attccctgaaattgtgggctttagttactctccacgtagataaatatagttaatatttgaagatcacacagctgtgatttaaaccacttttaaggggtcaacgctgatgtggattaagacacgctgcaaaacgtatctcgctgaggcgtctcgcctagaacatgaacaggttgatttactcatatgtcttcccgcaatggcatgagcaccagtgtactgagcaaatttaaggactgctctttgaccataaagccttgcaaactggacaatcatgtcccaggttctcaatagcaacaatatccctagcaacaagctagagcttaccaggagtatgcattccaatctatagcgagaaggatgcctcgttgtacgttatttatgtcctccttaggattatgcctttggacgcgaaatggtttctcgtcaatacgtgaatcaatagttcgtacatccttgtcttgcttaagactatgcagtcagcgagttataaatatactctattaacaccccatttaatgagttacttcatttcgtatttaatgatataattatcaatatactcgttaattcatatttcctgagattgacacgtgtcactttctgaagtaccaaccgaatttcgggtataacaatatatacacaaatacatataaatattatttttcaatcactaaaaaattatttgataaaaaaatatctctaaaaaagaataatatgagtagaaatcataatatattcatattcctcacttcaatatttgtaataaacactcatattgggctattttccctaccattaggtggttcaaatacctgaaaccctgaaatctacaagctcacctgagaacaacatactgaattgaaatactttcaagaatatctaccctaaaggttagattaagcaacaccaacaaagccttaaaattaaggtggtcgaaacataaaatttgctaattgctaacgtggctgtcaataaatagtaattatcaacgagttaatttcgaccaaataaaaatttaggtaaaatacatttgcaccctacctaaatccaaaccaactgtactttgggagttgggagtaagcactaaatgatgtataatagctacaaaatgaaaatatatatcaaaactttaaaaaaaaaaaatgtgctataataactcaatattttaactcataaataatgtatctccacattaagggtgcatttgaaaagctacaatgtaattagatttgtgtgtaattggaggtaattacacaatttagcatgtttgtctgaccatgtaattacactgtaactaattgagggattccaattatactctccaattctcatggcccccataagaattgaatgtaattagactatgtaattactaaaaacttt

SEQ ID NO: 393799 - DNA, 1075 bp, Cannabis indica
attattatatgaatatttttttttattagttctcattaaatcaacaaacacaaatactaaaaacaagctgaggaataaaaaaaatacaagactattcaccacatcaattatattacttttatcttgtgataaaattccaatacaacaaaatctagtccttaatataattattttaaaaatctgaaataaatgtttaatattttataaattctttattcgtttattagttttttttttttaaatttaatcagtacaatatgaattgctcataagtttgatagctggtatcattaatttcactaaataacgagtaataccttgtatttgcagtcctcctctttgtaggtggaggtgtcaaattgatttcatttctttcataacatgttagtctatgctttatgtgaccgttaatatggttagtctttagttagttaagttagttataagtttcataactaactcatgtacttatcttatagaaccgattctatacatctataaatagactcgagttctctcaaaatttgaaactaagccttataaatacaattgataaatattcaatagcaataattaagagtaaattcatagacttgtcataagtgttcttgtttgtgatgaaagcttggaaatgttatgatcattaaactctgaattgttcatttagatcattgtaaactctacataacatatgcaagtcgtcatatattcaaaattagtcttaaaaaaatcattctttttcttttttatttagtattcgatcaaccccttcaattgattgtatcttaaaaatttgaattcgaatatttaaaaactttctttttattatatatattaaaacatcacatctagattttcggtcgtaaaaagaagaaaattcaggttaatatttgatacgatatgagctatttatatttatatttttattgttcgaatattttttattatgttgtcggtataatttgcgtactataataacactaattaaaaataataataaaaaagaagtaatcttgaagtgaagtagtgatagttaacaagcttgtatttgtgttaagcttgaaaaccttaagct

SEQ ID NO: 393800 - DNA, 1562 bp, Cannabis indica
agtttttttttttttttttgaattgatttattattatcaagatatggttttgtcaaaagtggtgacgtttttttttcttgcttcttatttataacatgacttgtttatttgcaccattattagcattaatttttcttattcattttctttgatgaaatcatgatcaccattattttttttgattagtatcaaagaaattttaaagttttatcatacaatgcatatctatcttctatataaatatataaatctatacattatattagacactagtactatccaacaccatctctcgagataatctcttatgaataatttgggatattttataatagttatttataaataccattttgtgtttaatattttacaaaagttacttattagatcttttattttgttaaatgacaaattaaacctatatttttaaaatggtactatctattttctgtatctatttgtgctagaaattattttcaagttagttatattaaaaaaaataatcaaaaattaagctcagagtactattttgtaccattttagaaaatacaaggtccaatttgctaatttacaaaacagatagcctaatcaataacttttacaaaatacataattcaaaatgatattaacccattaaaaattatgagacaccatacttaattgaatcaataataatattacattttttttaataccactggacttgacactcatttagcatgtattttgctagtatgcattattagtaacactacacacaccagaagaccccctctaaataattagtaattttttataataattattaaattaaaatatttgtgatatttaattacactaatagtagtattttgtggaccaatggtactaagcactattggattggtgttagggttgtttatccaatccaatctacactattttgctcatagtgcatctgatccgcactaagtacggattttatattttggatctaatctaatccacacaatagctcaaatacaatcaaattcgcaaaaatacagattggatagattatttcacataactagcaacaaattaaaataaataaaattaaaaattaaaaataaattaaaaaaaatatatatgtagaaagaaatatttaattttgttttaatttgtacgaagaaaaaagtaaattatatataagaataaaatatacatatttgatttaataagttaataaatatatttgtattatatgtattatatttttaaatgattattttttacattaaaatgttaattatatatattttttaaaaattttatatagatatgtgtgaattagattagatcggttacttttatatatcaatcaaattgaattatatttgatatggtgcaaattgaattaaattatctattttatgaacacctttaattagtgtccttttaacatttctattttttatttgttttcctagagatctataaccaatataacataatgccttctagctaggttattagggcatacaaaatagaaatggtcatttttagcacaagttgataaaaaaaaataaaaataaaattgtagg

SEQ ID NO: 393801 - DNA, 663 bp, Cannabis indica
atatacatatacatatattataataatatacacgggtgatcttacaatgcactctttaaaagagatttagcgatgctacctctatctatttcaatatttgagagaattcttttaatttaatcttttatatgggtatttacgttctacttttttaagatatcatgtaaaattttaatagattcgaaaaaatttaacatgtcgaaaacaaggttcaaacaatctgttacagcgagtaattttttattttgtataaattatttgaatattattttcgatatattaaatatttttttatttttttaaaattttacagattatcctaaataattaataactataatataaacgattataaaaaaaaattaaaaaatttactaaaatactaaaatagataaatatgcattagtgaagatggtgatttttctataatatttagcttttttcttctttagataatatatataaattaacctatgcatgtgttcaaaatttatcttgtaaagtttttggttgagatatttgataaaaataataaaaaattaattatgaatcagaatttcaaatatatataaaataaaatgaacaattaggctgatgcatacagctgtttttaaagataactaggtgaatgtacgtgccgagccacgtattgctaattttatt

SEQ ID NO: 393802 - DNA, 1198 bp, Cannabis indica
aaaacgccccgttagccacattatgggccgcaaaattacactgtcgactaatatgttcaaaaatacatccaacaaaaaaatgagaggatctaataaaaaatgagacatagtcgtcgagctcccaacgggaatctttcccattaagagcattgatcactattctcgaatcactctcaatcaaaataaactttaaaccacgatcccttgccgactccagagctagacagcaagccgccgcttccccgcaaagagcgtcagagaactccagcttagagatagtaacccagatcaccttgccaacatgatcccttgcgactacagctgcacacatgctttccaaccctactctgacatcacaattcagcttcacccaatcctggggagggggccgccaaacgtcctccaagtgtgaaatagtgcaagggagcaaataaacatggtgatctgcaaaagaagagcgaacagagtcaatacatttaaatacatcagcaggacaatgattgtgtaccttttcattgcgagtccgccagatgaagtcaataaatcccattttatgccgatattattgatggtataccaaaattactcgtcctttaattttttaggaaacactcatatctctctttctcaatctcttctctatttctctctattgtctctctctacttagccattggagagatgacgagcgtcgaagagaccacgatgccatgaacgccaaagagatcacgacgccacaaacgccagaggaggaccacaccaccatcccaagaacgcccaggccgttactccaccatggaaggccagaacacgtaaaataataggtaagtgtttttaaataattttttgtattgttatttgcattggttttgttttgctgtttttcaaaatcgggagatctagttttttggtgtaatttgggtatttttttaattttcgatagggataattgcggcaaaagtccccaaaaacttgaggttgatgccgattagtcctcaacttcaaaaattggcggtgaaaatacctaaggtctcaatttttgtttgtctgttggtcctttttctaacggatctgttaaattcaaatgaaatgccacatgtcaaattttaattggtccaaataataattttaattaaaaaaattaaataaaataaaaaactaaaaaaaacattttaaaatcataaatttattttatttt

SEQ ID NO: 393803 - DNA, 703 bp, Cannabis indica
ctctgtggcaggtttatgtttatttttttctttttacctgttttaactacctctgtttgatcacttatcctcaacatttcatccaattgtatactacaactgtttcatttaatcttaaccgttcctcctcctcttattttgaatttctgcatttctttttccagaaattatgcaacttccctgaaccatctctcatggataacctcttacatgatatgaatcatacactagtccttactgagtctgaacgtgaagtgcttacacttcctgctgatttacattctgatggccattctaattcgagtcatgtcctctatgctcgagttgtttcttctcgggagatcaataggaagacatttcgtattaagatgagtggcttttggaaaggccaacaccctgctactattactgatcatcattcgggccttttccttgtcacctttggatgccttggcgatctcaagaaagttttattgctcgagccatggcacttccagaatcatctcattgtgctctcctcacctgccgcccttcaatcacccacacctgaagcaatgtccctcactcccttttggatacaattacatagactgccatttcttagtaagactaaatccatggctgagtgggctgggaatctcttaggtacctatgtggatgtccatgaagattcattgaatgaaggctggggtccttttttgcg

SEQ ID NO: 393804 - DNA, 598 bp, Cannabis indica
aagagagctttcatcttatcacaaaccaaaaatcaaatagactagctccttcagaaaattatgaaacaaacaataccttattaacgcgccaagaatcaaagggatggtaacaagttgaaaggtccggcggcacccaagtttatcaactattgaggcagagcatgcacttccaagaaaagcaccagctatgaatatactcacaacaagtccttccagaattgtgttcccttcaaaaccaagttctctcgcaacagaaacaatggggccgttcatcactctgatttttatttattttttttttttgaaaaaaaaaaggcaataaaattaaaacccacatataaatccaaaatttttattcccagtagttcattgagctttaaaacgccctttaacaataaagtacaaacagtattaaactataaacattgagatagagctcaacactcacccaatgtgataaccaaagagaaaattggacatggaagcaactaacacgtgaggaaaagaaggtaaccatcccacctctgatcctgaattttctccatcatctttttcgactgaaaaaatttcactatctgcaactttcacaaaccctaaa

SEQ ID NO: 393805 - DNA, 1146 bp, Cannabis indica
gtttacatggatcatcccatcgattttcgagacaaaaatcatccaaatcatctttgcctcttaaagtaatctttatatgctttgaaataggctcctcgcgcttggtatcaaaggtttgctgattttgttgctaccattgggttctctcacagtaagtccgatcattctttatttatttacaagaatggttctaacactgcttatattctgttgtatgtggatgacattatacttacggcttcaactgattgtcttcgtaagcattttatgactctgttaggttttgaattcgctatgaaggacttaggtcctctgagttctttttgggtattgctgttacttgtcatgcccatggtttatttttatctcagaaacaatatgctgtagaaattattgaacgttctggcatgtctaactgcagtttatgtcctactcttgttgacactaagtctaaaattagtgctacaagagagactccttttgatgatccaactaattattgtagtcttgcaggggcttttctgtatcttattttcacttggcctgaaatatcttatactgtgcagcagatttgtcttcatatgcattctccgaaaaatgagcatatgagtgctctcaagcgtatcatacactatcttcagggtactttatcccacggttgcatttgtacgaatccaccattgatctgatagagtaatctcatattcagatgctgattggggtgggtgtcctgacacacatcgttccacttttggatattgtgttttccatggagataatctggtctcttggtcttccaaacggcagtatactctctcttgcagcagtgcagaggcagaatacgtgggtgtggctaatgttgtttttgattcttggatcagaaacttgcttctcgagtttcattgtccaattcaaaaggctactctagtttactgtgacaatgtaaatgcaaatacttatctgacaatcctgttcaacatcaacacactaaacacattgatatggatatgttgggttttgtgccctaaataaaacccatttaaatataatcaaatttacttattaaaaaagatcagaaataacatttttatgttgcatggttcacatgatttctttcatgattatatgcatataatgtatgaattc

SEQ ID NO: 393806 - DNA, 680 bp, Cannabis indica
ctttttctttttttttttttttttgaacaaaatatttaggtttggttttgggtgatcaagaaatagtttgtttgtggaagcaaaatgatatttatatatatagtaccaatataagaagtagttgaggtggtaagtttatgcaattattagcaaagacacagattttcatcaataacaatcagttaaaataataacttgcaatctaaatgggtaattttccttggagacacgaccggaattggaattaaaagaacaaaaataattagtcgcctaattcccagatcgtttgacgaaaaaattaaaaaaatagaagaaaattttgatttttcatacttacaattggccaataattaaaaaataaattaaagtttcacaccctctaaaattagtgtctatctttgcatagattccaaaatcacccattcaaataattatctactactttacttattttatgataaattcaatacaatatgattgaaaaattatgttgcttatattttttaaaaatattatatattatatttacaagtcctatataataaggggtacattaatagtgtaaaaagtttaggctaattagcaattttttttccccgaactttgtacatatatactaaatcatactccttgaacttttttggccgttaaaaatttctcctgaacttttttggccgtta

SEQ ID NO: 393807 - DNA, 920 bp, Cannabis indica
agagagagagagaacatatgtggagagaaagagggagagggagatctgggtagatcaagacagggaacttcaactataagaggaagaagaggcagttgatgtgttactcaatcatagttaatggtggcgagaagaaaagaatacagaggagagaaagaaagggagatcatgagcaaggatgggataaaatgagaaagggggattaggattctagggacgtggggttgttgattgtgtcgtctcaagagcttgctggggacgggatgtagctccacaagagctagtagggaccccacaccatgagaaaaccgagaactatagtgttgactattgagagatagataaaaagttttctgagttttgatttttatgatttttagtatgttaaattaattaattttattttattttaaatatttttttttaaaaagaataaaatgattattattttattttattttaaatcataatattatgtagatcaatataaacatgtcacgtatataaaaatttacatataaacaatctatgtcggcacttaactgtactaaattgatgatacttaaaatttactaacaaatcagtatttagaaaattttactagtaaaatttgaaattaaaaaattaaataaaagtaaaataatcgtttaaaaatttagctgcgaaaaattcaatataaaaataccatacagtataattaacataaccacataaataagtaaataaatagtcattcggcaataacaaataataataataataaatatcgaacgagagactaaaacgttttcttatttctatagaaaaattctgttagcttcgcacgaaggttttcaataagaggtagttaattagttacatcctataaccatatagttaatgtttcaactcaaatgcatgtaacaaataatataatatgt

SEQ ID NO: 393808 - DNA, 514 bp, Cannabis indica
ttcttcctccaatccatactggacggaattgcagtcacactttcatacttgaatggagtggatctaggaacactagaggaatttctgtaaccattacgagaggctttgaattcctcattggtaaggtccacaaattcattgacccctagcttgtacaacttgttccctgctttattaaacgactcaataaactccacatttttcttaaatatttggaaacgaatttccttttcagcatcatctttgtatgtgcgaccatagcgagccatccactgctcatgttgttctgacattgaagcatcgttcaatgttcgacattgagactgagagagccacatggctaaaactaagactaaaactagagttgttgatgcaaattgaaatctggaagccattactcttttatggttatgaaactttatataaacttttattagaaatgagaaggttgcatattttgatatagagaaactttggtatatataagaaaataaagttgtatgttaattagcat

SEQ ID NO: 393809 - DNA, 527 bp, Cannabis indica
atagtttcctattataaacaacacaataaatacttgattaactttacagtgcaggttgagacaaaaaatctcattttatacaaagtgtatgatattatacaaatacaaaactctaaatagtaaacctaaagaacaaaccatgcagttgtcaaggttgagctataataaaatgttttgctcacacataatggttgtactcatcaaaaggaacttatcttgctacaactacttttcctaatactatataaaaaagaagtttttatgtcaacatacaaagacaacatactaccattaggtgatgtaacattatgaaatatacttgatatgagatcaaaaatatcattgtactcccacaaaaattcaaaataccaacatgtccaccaatgaaaaagagatacaaaaagcactagattcaaaaacacatggtaactttttggttacttatgatgataaaccttaaggtatacaatatcaaaagggaaatttgataatttatgctaaaaaattagatagggtgtttaattata

SEQ ID NO: 393810 - DNA, 726 bp, Cannabis indica
ataaaggtctagctatatatgattctttacatgcaaactataagattggtactttatgttatagatatagaatatatatttgcatctttctgtctatttttccattataatgaatcatgttcatttggtatttattatgactaatgaatagtgttattaaaaaagtttatcaagaatataataatgttgacatttctacagctatacttttaaatacagctgttaacatttagaacttgtttgagaatatttcattataattattgtgttgttgtttatataataagttaataaataaattaatgctgtttgttttttttacatgaattgaatgaggttcatcaattaaaatatgtaacatgatcattaactacataaatagaaaattatagataaaaaagaattcccaccccctcccccctaaaaaatgatgatacacatatatattattttacccgcaaaatccaatgcctataaattacttataaataatttttttttttctttcactgattgtatatacattattgagtgtttctataatgcaccctattaaaataagtatatttaaagctgaacatgatctaatctactctaattgaatcaaaccaatccaattcaattacaaaaaattggaaatatctaattagagttggattgaattggatgtctaaaattaaacgtcaatttcaaaatctaattaaaaattgatcaaatctaattata

SEQ ID NO: 393811 - DNA, 953 bp, Cannabis indica
aaattgttagtctttttttggtaaggactaaacttgtaagttaagtgttatattaccaaggttgaagcttgaaattagtggttttattatatatttaaaaaaaaaaatcccaagaggacttaatacttaccattattttttataaaaaaatttagtgatattaaaagaaatattcactaaacttattgtgatttttatagaaaagaggctgagccacctaccaatgagttggctttgtgttcttaaattaggatattgaccatataatttcatgaaaattcacataattaatgaaaatatttctctaaaagactcctaaacacctaaaaaaaggaagttaaaattttcagtgataaaaatagaccattatatattctttttttttttttggaaaaatagtttatgtcaataatataatttataaattcatataaaatattgtaaaaaatattatttatggaatatctcataatttgtatttatatacaaaaatagatgactatagtttgcttactcttatctatgagtaatataggaccatactagagattccatacccattacccaattaatatggggtttagttttagcttcttactttctccaatttcacaaactaagaaaatatatatactttagaattataaatttacaaaccaaaaaatttattatcattaaaaaaatatcttgccatactattgttagtgtaattaaatttttattagaataaatattaatctcccgaactataattcttatagagtttcgcttccttaatttttttttttctgttataaaaattatgccttaactataaaatacctttacaattgtattttgatcatttatttataaataaacaaaatattaagggccagtttggcacagttgtgctgtgggaaaaagcagatgtagttgtgctgtgagaaaaaaacagctgtagctgtgctgtg

SEQ ID NO: 393812 - DNA, 1533 bp, Cannabis indica
ttggataattttaaaaagaaatatcaaaataacaaaaaaaaaaaatatcaaaaatattgttacggagttttaaatatttttacgatttttatgattttatttacaggaaataaggtactttgatgtatttttatattgtacacttgttaatttactattaattttttattatttatatattattttaatgttattttttgttattattattttgctattattttcataaaataatgtaaaaatataaaagaaaaaattaaacctaaaaatataaaaagtttatataaaagaatagtgtattatataattattattattattggtactattttgtgtggcagtttttatatggagataaaattgataggatatatgattttttttcctaaatttatgctcacaaatttctaaagtctttaaaattttatgctgaaataatttgattattgaatttaagaatttttgtctaattcaattcaactctaccaacatgatgatttttcatgtactgaattgtgtattctaaactttgacatttagcaaatcgcgctatttgaactttaatatatatcaaatcgtggtctctgaacttttatctacatcaaacttttgttagtaaaattggataaaaaaatttaaattcaacgatctctataattcgaaaaaaaaaaaaaaaattaacaacctgaaaaattctaaaagtataatttgatatatattataggacaaaaatcctaattaatataactaaccatacaagtccacacacaagttacttggtttctcttctttgtggtttctctcttcccatcaatttaggtttgttttctcttttcttataaaatctaatttctactctctcactcaacttcaattatgcatatttttgcttctgtcttcaaattagggtttcatatttgatttttaaggttatagtaattttactactgtctctgaaattctaaacaaaatcaataaataggtatcaaaactgagtttgtttctatgttttgttataaatattagcagattttgaagttgcaactgtttaatcttcattggatttaagtcaaacatgaaaaaaatgtcatcttgaattgatttgagtcataaatatgaaattatactgataagggtctggtctcttgagaatcatcaatagtagttcttgatctcaaaacctaaacaactcatttcctgacatgaattaaatgtttatctactgatgatttatcatttcaaggctttgttctgttgattgattcaacaagaagttatgtagaaagtgtatgcaataatggaattgtaaaacaaatttagattactattttgtgttttgtttgtctccaagccatttgatgatttgtttgttatgatttaacatttgattgttcgagtttgatcttgaagttgaaattacagaggttaattcttacgtatcagagttgaaattcctacaatttgtaatctagatcaaattgaagccatagaaaacttattcctaatgaattctaactgttgtagattttagac

SEQ ID NO: 393813 - DNA, 1058 bp, Cannabis indica
tgtgacttcagttacttggtatgccccttcctaatttattccaagcacacttgatgcactgtctttagtgttaaggaacactcttctgagtaccatatctcccacaaagaatttcttttctctcacttgcttgttgaagtatctagctactttttgctgatgagctcacaactttaactttgttagatctctccattcttcaatttcatccattgattctgttaggggattgtgattggtcttctattcataagataatcttttgtagatagaggctctagttctacgagcaatattgcctcatagccataggctaaaggaaaaagagtttacctggtagctatccattcagtggtcttatacgaccacaatactttgggtaattcctcaaatgaattgcccttagcttcttcaagatggtttttagagtgtccataagtttcttgtttactgctttgtcctgaacattttcctaggggtgttgtgaaaaaaacaacaactacaactgcatattgcacacaacattttccctttgggagctatctgatcaagtctattccccatatggaaaacgaccatgaactttacatctggatcaatacattgggccgagccctaggcactttacaaaatctttatcacttgtcacatttcttcacatatgcttttaaatcctaaatcatggtcggccaaaaatatccttgtcggaggattttcttagactaactctgcccccagcatggttgctgtagaacccttcatgaactttagtaagaagtcatgcaacttcttccgttgttacacacctcaaaaaaggtagagagaaaccccatctgtacgttactccatccaagtttaaataccgtgaaacctttctcatcatctttcgagcttcattaatgtcacttggaagctttccaattttgagataagctacaatcggggttgttgatctcgaatttagccaaccgacagaagaatcatatttatgactggtattaccacatgtacacaataagaataggaaagtaatgttggaatttattttaccaggatct

SEQ ID NO: 393814 - DNA, 625 bp, Cannabis indica
catgtggcttgaatcacaaatctccatactataacctcttattttcttattttaatatttattgtagttataacatattttatttaagttttttaatagtttattgtgataaagttaagtttgaattttttttgaacacctgtaataaattaaaatattaaaaattttgttgttagtactataaattaattataattccttaaaagtttacaatatatattgtaactacaatataaatctctattaaaagaaaaataatttacggtataaataactaattaactctcaattgtaaataaatatataaatttaattttttgcagtaataatatctaagttatatttttaaaactatgtaggtatgtgaccgttaaatgttaaattattatctacgtatcattttttttattagtatattttaattattttttttaaaaaatataaatttagtgacttggaccaatcaggaatcgccacgtggcaactttcttaacatttaataattaagtacctacaaaaattccaaaaattataatttagacattattaacactaaaaatttaacttaaatattattttgtaattaaaaattaaacttaaatatttataccataaattactactt

SEQ ID NO: 393815 - DNA, 723 bp, Cannabis indica
caacattgaaaatacaatttcgggactatgtatttaacaaaagttatcaatcaaactctttattttgttcaatgacaaatcagatcttgtattttagaaaatggtacaaaataatacccgaactcaaattcttttttaatataactaacccgaagccaatataaacaatcttgtcataacacatcctcctaagttattaagttttacttttgacgaaaatggagctcagtgtattattttgtactattttgaaaattacaagacccaaattgtcatttacaaaacacaagatccaatcaacaactttctcaaaacacgagtccaaaataatattttcctttctttttctttcctcttttctatagatcaaaactaaaaaggggactaaaacctctagcattgggatgcctcattaaaagtaatcaatccataattcaaccaaatccaaactcaaaactcagaagaactcaaaaaccaaaatcaaaatcacaacgaactaaagccagaaagatatattctttttaccaaatagggctcgatggaatcgaatccaagaacaacatcacccaattttccttcaaaattcaaagataaacaaatcaacatgaaattaaatatataacaatcaaaaaagtgaaatttacgtattgggtatgagaaagtaaccatctttatcagggacagagagggaggtgatggtgcagccatagttggtgaccaaaa

SEQ ID NO: 393816 - DNA, 693 bp, Cannabis indica
tgacaacgaggagagtactaagcaccagtaatgtttgttaacaattatcttctcaacaaaaaataagtctctaagttcgaattccatctcctcaatataaaaataataataattaatgaaattattaactaattattatgaaatttcagccatctacaaaaaaaaaaaaatgatgagatttcagccgaaaataaagtgttattgatgaatgtattaatctcatttttatttagtaagctcttaattttcttttaattaattaatggtagttatttttgatagctaagctgccaaattgcaagtgtaatccttttacatgtgggacactatttatgagttgcccattttgaaccatggaaaccactccaatggatttgaaaggtttcatcaagcacaaaaaaaaaaaaaaaaattgaaaggtttgatctttattcactcacacacatgcatgggagtttccttatattaatttttcattaagaaaaacacatttaaatgttttgtttctttagctgatgaatgtatgtgtcaaatcaatgaatcaagccaattgttaatgtagaaagagaatttgtattcttttctttggtgaaaagtttttagtcagtgtattatagtataatctttatctaatattattcaatagtcatctttagaaaaagattaaatcgccggcacacacctaactctcat

SEQ ID NO: 393817 - DNA, 990 bp, Cannabis indica
ttttttaatgaatgacacgtccagtaaagctggactagacatgtgtgtgtttgggtttcaaaattatatatatatatcacgtcccttattatttttctagtttaaaattattggacatgaatttttttttcctactccaataatattggactagaaaactctactaaaaaaatttatgtccaaaactattgttgttggacttgaaaaagggacatagaaaggattatttgtagtagtgaagatacgaaacatgtgaggtatccagatgttgatcctctcttcattatagtttcactcgccaacaagagaatcaagagagtgttggtggataatgaaagcacatttaatatcctttaaaaaggtccgttgaagaaaatggggctacaaaatgcaaagttaaaaaaccttgcatggtgagcttatgcggatttactgatgatagtgtcgccagtcaaggcatcattggactcccattaactgtaggagagccaccattatctacaacattgatgcaagacttcttagttgttgatctaccattagtttataacatattaatgggttgccctgcattgattggactgggcagtcaattcaatcaaacacttatctctaaaattccaaacactagcagaagtaggtgtagtgcgaggcgagtagttgttggctcgtgaatgtaatcgcataaaacttcaaaatataagagccaaccatcaattaatggtggtcataacagaagaaggggagaagaaagaataggatctaaaccctagaatccaagacgagaaaaaccagttaaaaacaaattgaagaactggaagaagttgttttagatccagacaatcccattaaatgtgtgtttattgggaaaaatttggatgaaaaactaaaatagcagttaacaaacttttcaaaggaaaactaggatcaattttcctggacccattcatatatgatagggattgaacctaaagtgattttccatcattt

SEQ ID NO: 393818 - DNA, 1015 bp, Cannabis indica
tgggagaaatgtgcatccctagtagtggtcccactagcactagggatctctcaagtttcttacaaaaactttaccgcaccttctactcgaagtgccttgtcaaccatttcagcataggttgaagtttcgttggtggagataattagatcatgcctgatcttagaattcaaccctgccaaatatttttcttttttgctaaaatctgtaggtactattccggaagccagattggccaaacgatcaaatttagttgtgtaatccgtgactgacatgttctcgccctaaaccaaattaacaaattccattcatttggcactgcaaactgcctcatatattacttggcattaaacagatcccgaaattcttcccaagacattctggtgacgtctcgagcgagggacaccatttcccaccacacaaaagcgtcttcttgaaactaaaaagtggcacacgccaccctgtcatttcgagtaactcccattaagttcaagattctctcaataaccgtcaaccattgttctgccttcaagacatcaagaccccccaaaaatattagaggtgcttattttcagaaccgctcatacagaggctccatatggttgccagctacaggctgttctgctggcactgccagaaccacaacagtaggtggttgtgggggaggcaccactggagcatctcgctgtccgagcctctaaatctcttcctcttggtgagtaatttgggcttgcatctctgcaaacctgtgctcccaattaaaaggagcctgaggtggattctcttggccacctctttgagcacaaccacgacctctactgcatccacgagagtttttggggtttctaccaccccgaccacctccggtctcaaccatttcaccctattcttcaacgttttgcttggcgtccataatctaggacttagcctgcgaacccacaaggcatgtaggttagacagtggtcaaaatatttcaaagacccattttggattcaaataatgtttcacaaataataat

SEQ ID NO: 393819 - DNA, 861 bp, Cannabis indica
gtttttggaacgtaactatacttgttttctttagtttcaggtttcgacatttggaatatataaattggtcaaatatcggaaatatggtgatatataaaatagagaaaaaatttataagaaaataaagctgaaactttaagcctaaatttaactataaactgattatattttggaaaaagtcaaagcatataagtttttgatctctttttctactttccgatgaatcctgaaacaactcatttggagtttatatgtgaaagttatgcaaattttactaagagagattgaagcaaaaaaaaaatacctggctagagtgtcaggtgctgcgacgaccattactagcactacagcgctaattgtgcctccaaggcaccacgacatgactttaaagggggaaaatgacttttcgaaaaagctccaggcaccgcggtaccgtcgtcatgcaaaaggtgggtttttcgtctttttgcatgttttggctaaaatttctattttgaaagcaaaagatgatttaaaaaaatgaggggagccaagggagactaaaaataaaccctagaaaagaaaaagaagaagattggagcaagactttggcgatccatgacaatcccaatctgatttccttctcattctcttttaaattctatgtgtatattgatgttaaattaattttagatttgattatgagctaaactcctcatggtaagaaatcatcaacaaaataataggaactcgaagcggtatttaaagatactaaaagtaaaaatcttacaatcttcacttgtaataccctaggattaagaaatagattagcaaaactctaattagataattaagaattattgaggaattatattaatatat

SEQ ID NO: 393820 - DNA, 878 bp, Cannabis indica
tggatccaatccaatttaatagacctaaactattaaatggatccaataaacacccataaatgtgatattactttttttttatgtgccaataaaatacttttttttcaaacgtttatttattaatttagttagccatcatgttaaggtaattgaaaataaataaataataaatttataagaaaatgactgagtacttatgtatattttaagtagttaataatattgtttaatttattttatgtacagagcagacttaattagaagaatgatcatagatgaatacaaatgagttacagtgatgatagcaacttttaatgtattgacaactacaagtaagatacggtcatgagtaattttaaaatcaaatgataagttttctatagatttatcaattagtttttttcaaaaaaatcgtatctgtaatttcttataaggattcttcaactttttaatattttatttcttcaatttttaatattttgcttcttttttagataagaaattgaataaagattttcttacttttttagatttttgtagagttatttattaacatatctatatatataaattttctaattggattgattctctttttctaattccttttcaagtgaaattaaattattattaagtgaagacatataattatgatcaaaattataaaactttattttgattatattagtattttaatcactacagaaatattcctaattattaaatataataatatctctaactaattacttataattcctaataatcgtggaccaattattaatatttgtaaaaaaatatatatctttatatattaaaagtgcctatttaacgacatttcttggtttaacagaatatacttaaaaataaaagaatat

SEQ ID NO: 393821 - DNA, 547 bp, Cannabis indica
cagcaagggcaggagctattggtctttctagagcaggaactgcaggagcaccctgctatctcaactaccaaatcccttcatcttgctcattgatcctggcttgcattgctgcaaagctattttcccgatctttggcagcttgggcaacctgtggcgggttagcatcaccccggccacgtgccctgcccctgggacctctaccatggccacagatatttaggggaatctgagctccctgaccaccactggatccaaccgaatttccctggctcctgctatttcacctagcgtccatactaattagaactgcttgcgtagccaagagctattctggtcagattgggatcaaagaaaaacttactactaccgcttatttggaaattaaaaacatgcgcttattctagtatcaagctactaacttgcttcctaataggcttttcgtaaatcatactataggaataaactactaaagcaatataagcttaatgaattatgaaacgagctaactgctgatgatgattgtacatgtcatgatgatcttcggaag

SEQ ID NO: 393822 - DNA, 1403 bp, Cannabis indica
ttaaaaataaaattcaaataattcaacgttgcaagcatgttaattttttaatcgcgccatatatataattaattacttatgaataatatttttagtaatgtaaattatttataattttaaaaaatcggtaagaacaaatttaattgatttatatattcttcaaataccaaaaacgaaaacgcttcacccctagaagaaaaatgaatagggccccctactcatggtggttttttttttaatttttgccattgtttggagttaattaattattatatgattagctaattacacttttttaagtgttccctgcacctgcctttatataatctgcaatgtcctaattggaatttatgtttggaaagacaaccaaagaaaaaagatacttttttgatgcataattgagttgtgtctagacatcttttcaatcatttacaagataattttttggatattcatatatattgtattccaaatttttagtctcttttatttccacaccactaattattacatatattattattattatactagaaaaatgattttaattataccaaataccataacaaatttcaaatgttgaattatatacatataatatgaacagtaaaaagtctatatactttttactgtgttatatttatatttgctgatgtcgtaatcagaaagaaaaggataagaatatatattatgatgatgatgatgatgatgatgatgatgatgaaaactatatagtctagctgggatttttcaaaggtagtggtgaaaaaatttcagttactaagagaaattaattaattgtcaaaaaaacaaactcaaatattatagagttgaaagttagtgagaaagtatttgaaaattgtaaaaagagttaatgaatagtaataataataaattggaccaatgaatatcaagagtgacaacaaagcaaattctttatattctttacacgaagacgatgatatatctgtttagacatcgccacgatatgcgttttcaacaacggcggcaatttttcattcttttcaattaaacccctcaacttttactaatttaccaaataacccctttttcttttcttttcttttgctatccaacaaagttttcatttttattattaactatttgtttttaacttgatctcatgtctttttttggctcataaaaattcccatgagttaggagcaaatatatgtatgtgtgtgagtgggacatattgaaaaggttaaccccttttttactatacctcaaaaccctaattaattaataaacattggttatagagtgaatttttatttattttttaaaaaaaaaaggtttggaaaaaaggtaaaattaaaaagaaaaaatggttctgagcaaaaggaatctaatagcctgatgagatgagaggagaggaggat

SEQ ID NO: 393823 - DNA, 1727 bp, Cannabis indica
ctgtcctgaattatgtgcgtagcacatatatatatatgtatatatttatatgtttttgtaatgaaggtgtagcaggtgaggacggcttaggtaaagattatatttctcttcttttgtatttggtggatgttgcaagccttaatttgaagaatagaacaaaagccgaattaaggaaactctggtcaagtttcataatttcaactagttaagatttttttttttttaattaatgcatctcttaatgttttatttaaaagtggaataatgaaaataaattataaatattgattaatttatatactaaatataaaagagtaggttttggtccaaaatatgaaaataaattataaatattgattcatgtaaaataatttattaacaaagtggagagtaattgaactaatgcactaacaaacaaaaccacaaacaaacaaaataacttaaaccaaattttggacccaaacttcacttttttatatatagtatagatagataattaatttctatgacatacacctatatatataaatgcgtaaattaattaaatctatatatagatttgtatatactttgtctaccttatatgcatcatcggattctaattatctacaatatatgcattaattattctaattctgagtgcataattggtagtaatttaatttagagggcatattcttctaattgtttaatgttaaagtagtaggtttaattttgacataatctttacctattattaaaagaaaatgttgtaaatagtaaaggatgatcactgttgtacggccaaatgatgacttgatcagatttaaaaatgtcgtggaagtgtgaaaaatacaagggatgtgaattattgaacacaaatgattggttcacgtaaaactcatatgtgtaagtatatgtatatatatatatatataatataaatatattaattatacgtaagtgatttgtaagtctgtggcttgacttgtatatgtgtttggtgaatggtagatataaccgatcatactttataatatgatattctttagaaaaagaagggtttcattcctatggtttaatagctagttagcttcaaattattaattatcagaagctgtatatataggtgacccaacaatattacacagatataaaacaaagattaattaatatcccttaatctgagattgaccaagatggatctgtacgtacgtaagataaggccgtgtattcatcaatttctcctcttgccataaaaacataatttaaaataaaataaatagttcttattttctttttcagcaataaaaaaaaaccttatttcttgcactctttaattatatgtaaatatattgttaaatgcaaaaatttggctaacacttattgcgctagattgacaagaagaaatataagtttaagtaaataaagatacaagaaatttatagtaatttactttccgtattgcgacggtattgaactacgttaactttcagctagttttatttctcacgacaattataaaaaaattgaccaaggcaagagctctaattttttgagagtgaaagtgctctaactttatggggacttagaagaatgtaaaaatgagctagataagctcttattttatagagaagagggtcctattaaaatattaataaaataatacaaaaaatataaaaaattctttttgggttgatcttctccattgatgataatctaacagtgaaattgactcttgatgaaaa

SEQ ID NO: 393824 - DNA, 960 bp, Cannabis indica
tcacccgctgctaatttttccaactataattcataaaattggtgtcgtattaatatgtcaaaatccgttatgtcactcctaattgtaaaaaaaaacaattttttaaatccaaaacaaaacttctattaacataattcagaagctcttgattcttgtagtatttctaagtctaaagcttcggctgaactccaatttctattgcactcagaatattaatcaatacattgttgatttttgaaccaaatgaaataaattaataaacaaaactattttttccttgtgacatattaaataatgaggaaatcagacatttttgacacaaaatcttaagatcagatccaacaatgaacaatccatatcataaatacacattgtttttattttttcatcattgcacctcccttctgaaaaataaataaataaaaaacacatccctattaaatagagtcatattaaattcttatttatatttttagtattattattattaaataattaaaataaataaataaataaaatatgagttattcacatgcatatattaattttgagtcacacttcactttcaagcatttgcgttcaaattactcaatctattacaagtaacaaattaagtcgcattacatgaaataccatatttgtttttgtttatttttgtactctattctaacaccaatttgtgcatttctgatggaactaattgtgcatttacgatgaaacaacccatcccaccatattcattttttgatttttttggtcaaaaatcaaaagttgtgcatcacgatgatagcaaactcccaagccacgtggcacaataagattgcttgagagcacaataaatactaacactacgtttagtgagatggatggagagggataaatgatggaaaattgattgagtaaagagaatataagggagggagagtatggtagttatcctttcaagttgtttgaaaagaa

SEQ ID NO: 393825 - DNA, 512 bp, Cannabis indica
ttatagcaaattttaattaatataaattactctcaaaaatattaatattgtaaattttccttaaaataaggtccttattaaattactataagatcactaaaaggtatttttagtacttagtattacttatggtattatatcgttatttctatttcgttattagaataattaaatattaaataatttaatttaatatcttttataaaatatcactaaactatttaccctactctatatatcattgagactcatctaaataaacgaaaatataacatgctaaacatgataatctaatctaatccgcacgatctaattcaatccaatccgcaaagtgtggatattcgcacttgtgcggattagattggattggaaaattcaaaatccgcacttgcgcggattgaatattgattgacatgtaaaaataaccgatccaatttaatccacacatatttataaaatattaaaaattatatatacaaataacattttaatgtaaagaaaatagtaattta

SEQ ID NO: 393826 - DNA, 1081 bp, Cannabis indica
aagtgaatcctttatagggtacattgaaaagtctgaaggttacaagttttattgtccatcacataacacaagaattgtggaatcaatgaatgcaaaatttcttgaaaatatcttgattagtgtgagtgatcaatcaaaggacttaggttccaagaaagatcctttaaagcctcccacttaaagaacaagattgataatggtcagtacctctaaagttcaaatgaatgttgaacaaccaccacaattcattgaagatccacaagttggtatgataaactagtagatcaagatgttcaagagtttcttgcaattgttaaacaacctgctgaaccagttgctgctccccaagagcccgctggtgaagttttaagaagatctactagacttgtcaaaccaaaggtttataaaggctatgttttatatttactagaacttgacattggaacaaaaaatgatccaaaaaagtttttacaagctatgaacaagagagaatcaaattgtggtacaatgtcatggatgatgaaatggattctatgaagtgcaacagagtctgtaaacttgtaaagttgcctaatgtggcgagggccattagattaaatgggtctataaaactaaaagggactcattagaaacactcggagatacaaaaaaagacttgatgctaaaggatttagtcaagaagaaggaattgactatgcagagaacttttctccattatcaaagaaaaattctcttagagtcatcctggaattagttgctcattttgatttagagttggaatagatggatgtaaaaattgttttcctgaatggtcatctagaggaggaggtatacatgaaacaaccagaatgattctcctctagtgagggtgagcatttggtatgcaagcttaagaaattcgtctatggattaaaaaaactttcccgccaatggtatccaaaatataattatgtcctctcttcctctggatttaaagataatgtcatggatcaatggataatgggagtaaaattttctttcttattttatatgttcatgatattcttcttgcatctagtgataaggagttgctacatgaagt

SEQ ID NO: 393827 - DNA, 1105 bp, Cannabis indica
ttttttttgaaggatgtttatagatcacattttaatatttccaggtctatccaaatttgatccaaataacaatggatgctggatttttccaaccgatttgatcacgaaacaatccaatctaatagatgtatctcatgtatatttattaaattaatttgaatttatctaatattttagatttagtatttattggattaggttggatccatccaatctaaaaaaaatagacaaatttttaatcctaattatcatatgtacacatatattttaagcataacaacataaaatctaattactcattaaaattaaatgaaaatacgatttagttcaattggatattggattgtattcgatttttgaacaccccatctcacaaccgatccgatccatttggatattcaaaaataacatttgattcgatctgaatagattataattggatatctaattgttgcttaaaatttctctaaaaatacgtgcatttcaagagcaagccaggtgacaatgggacccacactacgggacatgccatctttaaatcactcccgatgtttattatttcaaaggaataatactagattggtcatctctgagaaggtccacccggatgatgggtggttcttgtcccttcctcttcgtgagtgaatttgacccggagaagatatagaaggacaggcagagtgtagcacactgctcaaggattaagttattgtatacacatttaatgcggcatggagaagaacatccaacctattatgctgacagacgtgcacaagggtttaaacctataatgccctgattttatgatgccctatacatcaattaacagttacataatgagctatcaaatcataagcaagagataaatcagatctcaccaaacatctatagtcagcctaaacacatcataaaagtaggcaattatgccctatgataaaatttgaaaaattgtgcaaatcatggtttatacaatcatgacaatggtggccttttaccaccattatgagcctataaatatcccaataatgtatagaagaagggactcttggataattctctgtaaacaaaacaactcattaataacagtgactcgtggactaaggct

SEQ ID NO: 393828 - DNA, 561 bp, Cannabis indica
aaaagaaagaatgactagattatagacacccagaatagaaaaactatgacaccctggaagaaaataaaagctgaaattggaaaagaagaaaaaccaagaggagatattgactgagaaagtgaaaagagaaagagacccatatggagtcgagttctggctgaaggtttgaggcgccatttgataagagaaagagaagaatccaagagcttgagagcctcgtccaactgagaaacttctgttgagaatgggaattcgcctttgtgtcgttgtgccttctccatttcaggattacaagcaatgattactaccaaaggtggaagtagaaacattagaagtgcgaagtgtcacactgactggaaatgagaattggcaaatattaatgtatttatgttgttggatccacccccatgggctgggcttgaaccgatttgggtactaagcccaaagttaatttcaaaaagtatttttatgggattatttcacaaataaaaaaaaataacaaaaaaattacaaaaatacagttgtacggaattttaaccattttttacgatttttttattt

SEQ ID NO: 393829 - DNA, 2403 bp, Cannabis indica
tattttcatattctaatattttttcaaccttctcctcttcggtggtaaaattaaaaataaaactaaaaataagcacaaacatataaggtaaatactcatatacagtctcacatttatattatcttttctagacattttatctatatttttcttttttaaaagataaataaaaaaaattattaatattctcccaagataggtttgttagagagagatggggtaagatgatttttttaatttaaaaagagattattaatatttaaaagattgtttaattttttgggtttaattattgggtttatttattaacgggagatcaaacgtaatcgttaaatttaacagaatattcttttattttttaagtatattctgttaaaccaagaaatgccgttagataggcacttttaatatataaagatatatcagttaaaaactaattttaatccaataattaatgtaattaatttaaatatgtttataatattaaatatttaaaaattgactaaaaataatcaaaattataaaattatataaaaatcattttatattctttaaacaaagaaaaatgtaaaaggttaaattaaatattaaaatatattttcattcattttatatcttttgtttaattacttttgtagttttttaatattttaaagtatttaatatactttaaaatatattattatattgaattaaaattattttggacactgttcgaaaaaaatatatattttgctgctattaaatattttacataatgagaattaatacaaaactgaattactttaatcgaaaattttgaattaaaatatacacttattaataaagatcaaactaaaacttaccaataaaatttgaaattcttacaagatcattcagtagtacttagtatgtatatatcattagttttttttaaaaaaaaaacagtatataattaattgttaattaaaaatatatgtaaacgaattccataattgtcaagacagtaatttgaaacatattgatcaataacgctagttacgtagacactcagtaattctttttactttactcaaacattaattcaggctctattatttataaatcatcattcttctttttttttttttgctagtgacgcccaatacttctaaaactaaatgttacttaacccaatctatgcttcattgcaggatcgataatgatcgattccaattaaatattaatttctttacgactgattaattagtgataactacaaatatgttattgtctcttgaatcaattaatatgcacttaattattattagaaagctattatgctatttcttgggggcaaagatgttccgtttctgtcgaacaggatggtgtagatcattttcttataagtcgtttcatattttatttttcttatattaaatcaccaaatgaaaatgaaaagcacataagacttccataaagccaaaaagtttaggtaatatgttaggtgactataagaaatttgaagcgaaattattgcttttacagatgtcgcttttttgaactttgcttttcccttgattgacatgctttttaattcaaattatttaaatttattagtaatattataaatctctattattttgtgaaaacaacattttattacttttattagttatgtatatatgtaaatatatataatcttcgcacattgttctgtcaagcatgggacacattggtaccaccacttacacgttagaccaattcttttgctttatacatttgcttatataaaacttcatttatatagcagaaaaaggggtttattagtaataaattattactagggtaagaataatatgtaaaaattacagtgggtttaattcgaaagagaaaaaaaaaatagtaaaactgtataaaacccgttttctccattattagcatcttttctcattcctatctactttttgacattttcatttttccaccccaattgacctgtaatagtaattaattaaagaatattggtcagtcaaagtcaaagacttaatcggtttgcattgttatttttccttaatatttaccattattatcgtagatgagtgcactagctagctaggtaagtgtttttttaagtcttatatgtccggacatgtaaaatgatcagaattaaacgcaattttttttcccctttctcaaacatgtacaataaacttcactgaaatgtatgtatataactcctctaaatattttttctttttaaaaagtaatattattgtcatgatcgatttggttctcaaattacctaataaatatattaaacactgcttttagtgtaccaagtaagaaaaatcaatccattttttatattgttggccgggacccctaattagagtactaaaacatacaaagggtcacgtactacctataaatatatatatatat

SEQ ID NO: 393830 - DNA, 984 bp, Cannabis indica
ttaatttatactcagttttatagatcatattctcatgatataaataattttgactagttatatgaggttatatttaatactttgattataaaagacggtatttatcaattaaaattattttatagttatatttagttaatatgtaataaaaaatggtagttctcaacttatcccaatctccaagcatcgacctatttatgagcattgctatttgacaaatagtattttttgcataaattaatgtatttccttaataactataattaaaaacataattgtaacaatagatagagaatttattacaattgaaaacagacttgcatcaatagaacataaatggaaataaattgtacaaaatttaaaattttacacaagaaaaatatatacggtattagtattcatttgattattactagtctactgggtcacgtctagagaaagaaatcaattagtaaagtctcaaaaattacaaatacaattgacatgaacaagtttagactctctctaaagctttgtcgcaatcctttctgttttttattgagatttttaaaactgatttaaataagagcttaagaaactaaataagtaaatatagaatggagatgaggatttttacatggttcagatgttgattaaccctagtccacgagtcaatgtattaggctgaatgactttgatgcattacagtgggatcttacaagttcgagaaccctagtttcttgctatattttctcacttaggtttttctagcttagagaggaagaaaacctaaaaatgtgtgaagtgaatcgtctgtcccccttggatgaatgcataagggagtatttataggttagaatttggatttgggcatacatgacttttagggccgttggcggtattttggctcatggggagaaggtatctgtttagctagggaccacgtggtctcagacagatgtcctgtgggtgtcgtacttgtgtgttattgtaaagaccgcttag

SEQ ID NO: 393831 - DNA, 766 bp, Cannabis indica
tgcacaacacatcgctaaacatcagtaatcctcataaaaagttgggtatgatttcgcaacatttagcgatgtatttagggatgttgtgaattagaaacatttagagatatttcatgatttcgcaatgttttgcagtatttagcgatgttttgtgtcattgtcaaaaaccagaaaaaaaaaacacgcagaaaataagcaagttgagaactccaacgatgggtagggattttggagtggttgagctcatagattttggggctttgggtttcacgatttctctttgcggttttgcgatatcttcctcagttttatcctacgtttcgtccttggagtgagtttcgccgaaggtggtatggtgttcgtgggtttggtcttggtctagtttggtctgaatctatgcttgtgggtatcagttgggtttggtgagagttagagagagagggagagattagagagagagggagagaggactgagagaaagagggaaggtatgaagagggtgcttttgaatttaaataattttagagtattaaattcttattcattttaatgtgacatactaaaagaccataaacaacttttaagcatgaattatcaaattttcttattaaaattgtatctctaactaagtttaaacatcatatttagacttattagggattaataatggaggctgaccattgctaattttttagcaaagatccccaagaagttattgtatatgttgcccctgattttgcccaatatacgtggaccaaccagataa

SEQ ID NO: 393832 - DNA, 694 bp, Cannabis indica
cagtatgaaagtcacttggacactcgacagcacccaaacaaggaaatcattttctatccccaaagaaaaatgatagtaagcatgctaatacatcaacgtacaatgacctccgccataacaatcgtgccacaaaaatcaaacgcgactaaaatgagaaggtcaccgttcttacttttccctaacatgtagagaaaatagaaaaaatgtgcacaaagacttacacaatggtgataggtgagaagttgatgtcgaccgatgatagaatttggtctggcaacggcggaggaatagcaataggaagtcaaagatttcttgaatttttgaatagattggatgggtacaaaatagtgaagtggtgaaagtatcctagcaaaggaaaggtgttggcttttataggccagaagaggtgcaaggtagctgtgatcggacaccatcgtacggtgggaatttatagcgaattgaattttgtgatccaatggatagggtgttatagtgagatttctctcacctagaaactcgagaccagacccctatttagaggacacgtatactcagatttccaatggacgctgagatgtccatgagggactcctcaaagtttcaaacctcgcttaagatagaatcagcgagaggtagcgagcatgaccaaagtctgatcgcattcgagacaagagagtagctcgcatatatcgaa

SEQ ID NO: 393833 - DNA, 655 bp, Cannabis indica
cacgctgagcagtatggctaccaggattggcagacgtaccaagcgcacggagggtttccccttgcgtgcttatccctacgtgggttggcagacgagggttgtatccagctctagcaaaaaaaatttccggaggagcccttccattgctggatttataggtctctcggattcttttagcaagatttgctctttcttgctcttgttcaacatgttgattgtttataattcatcactggtcaatgaaataggtttgaatctgttcatgttgcttgtcgagagagaatcacagatgttgttgtagactagcaatagtttgctaagctttcaacttgaggatcgacctccttggttcttctagttccacatgtggctccccggttggaatttggtcactagtttcagtacctaaatttggtggccttgggatatgagtcatgaagcttattctgaggcctccacctaacatctgagatgcaggtgttgtcccatcaccagtttaagtgataggtgcgcctcaagtgagttggccagtagtttcactttcaacacttcttgatcttgtggcaaccatctgttgggattttatgccctaaataaaacccatttcaatctaatctgatttgttatcaatgaatgattagaagtcatttatgtt

SEQ ID NO: 393834 - DNA, 1862 bp, Cannabis indica
ttttttaaatcacacgcgtgccgttcctatggattaggctgttacactatcactcctcaacgtgggcttagacaaggtgatcccatgtctcctttatcctttttttactttatgctgaggacctttcgagattggttagaagggattgtgataataaattattgtatgtgttcttgtggtcggggtggccttgtatttgcacttgctatttactgatgatagtttgtctttttcaaggcttttgatgtgtgttgtgtgagatttcgacaacttttgagttgctatggagcggcctcaagatagttagtaaattttgacaagtttgtagtgtgttttagccccaatgtcattatttaagtcttccttgttttgcgggagacaacgagacagggttgtttaattctattcgggataggattttgagaagcttaatgggtggaaattgaaattgatctctatggcgggacgagagattctcatcaaagcagttatcaagtccactcctacttattctatgaatctttttaagcttccaaagacatttatcacaaaattccatcatatgtgtgctcgcttttggtggggtggtaatgatgcaaaaaataaaagatgcatggtgcacttgggacacactttatttacataaggatgatggaggtatgggattcaaggaccttcgcttatttaatcaggctctcttggctaagcaagcttctcacatttacaattttcctgattctttggctggttctatgttaaagggtctgtattttcgaaagtggtcctttgccgagatcaagaaatcaaagagtggctcttttgtgttgaaaaacatcttatgggagaaagaatattttgactctagggctgtttggcgtgtggggaatgggaaggacattgctatttattctggcaattggattccttcagttttgcctttcattttgtctgctccttgtcaaattgatggatctagtaaggtgtctgtgttaaggaaagacttgggtgtttgggataatgtgttaattcgatccattttcttacctcatgaagctgaatctatgatttctatccattggtcctcacatgatgtggctgataaaataatttagaactttgagaattcaggttggtattatgttgagagtggttattgacttggcctttgtaatctggttcatcctcgtgcttctctatctagtagcgcatttggttggtggaaaaagatttggtctcttaatcttcctccaaacattagactctctactcgacaagtgttacacaattggattcccactaaaattaatttaacacgtcgtggtctattatctaatgtgttatgtcctttgtgtgggttggaaggtgaaactactcatcatgctctttgggggtgtactacattgttacagtgcaggaaactctgtgagtttgtgtgaagggatcctcttgttcattgtgtggattttcttgaattcattcatgggtttattgattccctttcaaaggagatgattgaattggttatggtgactttttagaggatttggttcagatttaataaaatggtccataacaacattgaaccgactcctgtgcttactgtgcattgggcccgtaattacgtggggacgtttaataacaaataggcatcggtgatggctcccacctgttggaaggtggctaacatcctattgttgatggaattttttacaacaccaaaaataaattatgataataataatatggagaatttatgcgaatgctcaacccaaaatggagagtattcaaattatggacacaaaatacttaataaaaactggaaatataaaaaaaaacaagagaatatagtggttcagtcagat

SEQ ID NO: 393835 - DNA, 1173 bp, Cannabis indica
tatagatttgataacccttcactgagaaaaatgacacttgaaattgagatctaaaggcatgaacacaaagagaagtcattaaaaagtttcttcacaaaaactcattaaatgataaaatattgtctgaacagaaataaaaagtgtggagacgaaatcctgatctatggtagaattatatatgaaaataggtctcgaccagggaaactttgctgcaaatctttatgttgtattgcagccagggaagtttaggtggtagtagtgatccttctccttctccttctccttcactttaggaaccaataccctttccctatactcatctttattatttttattggaaatgtttgtgcattaatagaaaatcaactaataaaattacaactctacagacaaattatacaaaggagaataatatatatatatatatatatatatattaaataatgttacaactgtattgctaaaatacacataaaatagagaatatggagatgaggagaataatctcaacaccacaaccaaagtgataagtaggatgataaattgatattttgtcttctaaatatagtcaatttatgtattaatattcttaaattgattctttaaattattaattagtgtgattataatttgttaggctaccttaaagactgatcatgcatttggagtcatttggagggattttagcacattttggtgaaaaatagtgaaagtcgacaagctcagttttgcaaggcagaacttaattgtataggagaatcaccaaacttgaacaatggcttacacctttgtccaaaaatttatttctgctaccacaagcacttaagaaaaaagaaatggaaataactttctgaatttatcaggcctatattatttttagcaaggttcttacttgatagaaatgtaaataactttcatgttgttgtttgagtttttatagttgttttatagttatttttctattattttgtgttttttttattgtacaattatttttagttcatgtgcatttattatggtatatacttttaatttattttagataaatttttgttgtatatatttgcattattttattttgatgttgtgttttagttatttttaagtggtcttcatattatttttttgttccacagttattttttagttttttttattcatgtgtatttttat

SEQ ID NO: 393836 - DNA, 1773 bp, Cannabis indica
tgaagtacaattcctaccgaacaacaggtagaatcctttgcagacaatttaagtacgcgacgagatattgtaagtggcagagtgactttgctgccacgatcaactgagatttagctctatatcgcttagattcgtccctcttttttttatataacagtacactttaagttttgagatatgtttacctcaccaagcatcctctaaaattttataatgttgttattggttacatcttttcgttgggctttaatttctcacttgccacctcaatgttattaattaatgtattgtatatatttagacagtggaaggtagggttggttaaaatatgtggtggtaactcacttctatctatattatttatagaaccagaaattatacacgttgatattttgtttattattttttatttcttttttgcattttttatactattttttatcaaattaattcatcgggttcacgtgaaaatcgtccaaagaaaaataaaacgtcaatgttaaatagcaatatatatagttattgatgaatcttgtctgtactcgtgaaccacgtacatttgcattatttttcgtcaaatcaaatttcaatttttcttttctttttaaaatgcgattaatctttgccacacgagttctactaatattattcattttcacgtgtattttatgttacataggggcggacccatattgtagtagggggcagtcgctcctctaaaaaaaaatcgggtaaaaaatacatatgtattttaattaattacaagatatatttgtattaaaagatgatatttataaatataatagtaagtttggtgtaatggttaaggtaaatggcaaattaatagattagaggataaatgttcaaatcccactaaatacactttatatttttctttttaaatttatttatgccatccctcactttaaattttgagtccgccgctacgtgtaaatgaatatatgtatatagatatatatatgaacatattaggtagtataacgtccatatcattgttttgcattattgtaaaataattctattattagttggagactacttttgtagtaaattttaaatttgactttgtaacaagcaattattcaataaccttttttaggcaaaaaatgtacttgaagattagcaaagtagcctttctgctaggctctacctctgttaagtttcattaggcgttaacaaataagaattaccattttactaattttaaatattttctctctagaaaaaattattaggtttaggtagtaacatttctaccaataaagttgtactaataatacttatctttagaaaaattattgattatagtaaaataatttatacattatagttgtgaaataacttatataagtgatagacaattctaaataattaacgaattaaaattctaaaataatttgaaaaattattaattattcctaccaataaagtagtaataatatataatacgaaaaatttagcttagcgtgcttcagttaaatgtaaagcatgaccgtcttttaatatatcatctaattagaaataggataaatactattttagatcttgtgttttgcaaaagttaccgattagacattctgttttgttaaaataacaaaatataccttgtattttccaaaatagtaaaataaggaccctgaacttaatttcgtacaatatctttttaattataaccaacttgaagacaattcctaacacgaacagatacagaaaatagtcaacaattttagtcataacacatttagatcagat

SEQ ID NO: 393837 - DNA, 1352 bp, Cannabis indica
tcttatacatagttacttttatagcttgttcaaatcttccattccaactcctttacacatgagtcttgttatgaactatattggccataaaatttctagccatacaaatgaccttcttggctctaattttattgggaaagacatttatttggtagttaagaacttgaacccgtccaaagccccaagaaatgatggattaccaagccttttctaccaaaagtattggtgtacggtcaagaatgatgttacttccatatgcctgaaagttcttattgaaaactttccagtcatttacctcaacaacaccttagttgctctcattctgaaactggacaagccgaatagaattgatccattcagaccaagtagcttttgcaacgttatttacaaaatcatcttaaagtgccttgccaacagattgagaaactcccttgaaaaagttatttttgaaaattaaagtgcctttgttgggggtaaaatcattcatgacaatgctatcatcagttttgaaggccttcactgtatgaagaggaattatttcaagaatgattctaagatggctttcaagcttgacatggtcaaggctcatgaccaggttgagtggtcttttctagagcaggttatgttgaagctttgatacatgagagattgggtcttcaaaatcatgcagtgtgtcctcattggagtaatccttcttaattaacggcaaggttgagggttgtgttgttcctcaacgaggacttagacaaggggaccccctttcatctctcctctttttcttgttttttttttagttttgtttttttttttttgtgctgaagctttctcgagccttataaagaatggagaatgtcatgggaggctcaacggtctgaaatttgggcaatgccgtgtgttagtctcttatctcttcttcacagttgattgtcatattttctatgaggcttctaaaaaagagtgtaaagaagtgaatattatccttgagctttactccaaagcctcggtggaacttataaattttactaaatttgagctttgctttggaaagcatgtcagctggtgtaaaaagaaggccttggctggtatgattaatgtcaagatggtggataactttagcaagtatctagggctgccccctaatattgggaaaaggaagaagggtgtgttccaaaatatcaaagatagggtatagggcgaactcaatggctggaaagcaaatttgttctaggttgcgggtcgggaaacgtcttatcaaagcggtggtgcatgccatcccactatactatgagttgctttagacttcctaaaaaaccatcataaacaaaaataccatagcctcattgctgatctgt

SEQ ID NO: 393838 - DNA, 1090 bp, Cannabis indica
  modified_base (83)..(83): a, c, t, g, unknown or other
taaaagataaatattatatctacggggaccccctatatcaaaatatttacaatctggattaaaagtattataaaatagtttanattccaaaatacaatcagattagacatcttgcccactagaccgtggcaccgcgactgatatgtacatttctgctgcgacctcggactcatggctgctcaacctttgccttccctttacctacaccatggagcacctgtgagtcacaaggacacagtagaaaagtgattaaatccataaacaacagaaaaactcattaaatcacaacatagcaaaaatatactcaattataacacatcatgtattacatgcataatcaatttctcataatattggaacttcataaagtacccttaccactcgtcaaccatgagctatgtatgtcactatggtttctcgatacaacgaatgataagtaagaaacctattcgcggtttcaagagtaattactcttgacggtaacgaccgttttcaaccctcggcataaccgagcctcaacaaatatttaactagaatctcgatcataatcgaggctataagcatataactgttaacatttaaccataaacggtgcatatcacttttcttacctcaagccagagctcaagtgtgctggctgacctgagtggaaacaaggttgggcgatcccggtcctatgtcacgataaccaatacgtaataaatgccttaaaccaaaatttcggaaaccaaaaccctaatcccgaaaccaaacataacctaacttccaacaatctcaaaataggctacacataatcaatctaaatagacaccaggtatcatcccgagtcaaaaacaaaacccgaagaaaactcgagaattctcaatgcagggcaactggtcgactggttctggtagactagaaaaccttgggttttcttcctcaatttcgacccaaacctccttcaaacctaatcaaacttcacaaaacacactactacaaaaataggtttcagtaagtccttttgagtgactctaaaaatatttagtgacacttcattgctcgtcactaatgtgggtgactgaaaaagtagtatttagtgacacttcag

SEQ ID NO: 393839 - DNA, 785 bp, Cannabis indica
ccacatatcttctttacatctccaagctaaggataatttctcattcaactcagcttcttcctccgataatgtctacattttgaatttattcaagtggtcttcatttttttcttctcgttattctataaagtattattatgccatattttatataagtattaatcatgctctacttatataatttaatattttgttattattagcatttttatatatgattctcttttactaaaaaattactatgagcagtattttatcagtttttaaatattgtatattaataatcttgtaaggagttaatattcaaaaataaatatagagtgaactttatttagaatcattttgcatgtaagatacaaaaacataagtgaatctttatctcattactttttctaattcaattacttttacaaaattttattttcttattcttgttcccattgcctataatatttagtcatttacttatctattttagtttagctgacttttttttagtgtattttgctgacatgacaagcacatttactattgtgaccgtacatagtataatttattgggccacatcacataattatagtaagaggccttttggtatgaggtgtttaaaataatttgattataggaaatattatgaaggagaatatgattatagagaaatgtgtaaactgtgtttagttgtgtagggtaataggtaatcatattcccgttaattgaattataatgtttgattgagtacatgaatcttatatattagggtaaataccattttagaccctctgttt

SEQ ID NO: 393840 - DNA, 1000 bp, Cannabis indica
gcaagcatttgaaccaaataaaagaaaaaccaaattattttttcaggaactcatgcaaactcgcagcagaataggtggattaatacaagggatttttacaaaaaatactagatttttggtaagtttatattactgctatacgacagaaattacatttatattgtctttttttttttctctcttttatactgaaaacaccaaaataaaaaatttaaaaatgaggcctccatcttgcatattcatggacagaaccactacatcaacaccaaaacagttggaaaacaattattaatttcaaagaaattgagcaaaaacattgaaaatatggagtggggatccctggattttctttttctttttgagagcagtgtagattttaagatgtatttatgttctaacttggtatcactcttcgattaatgcaggcatttggaccaaataaaaaaaaaaccaaattattttttgaggaactcgtgcaaacttacagcataataggtggattaatacaagagatttttacaaaaatattagattttaggtaaaagtttataattttactgccagatgatagaaattacatttatactgttcttttttctcttttatattatataaaaaaacgaggcctctatcttgcacagaaccactacagcaataccagaatagtcgaaaaataaccattaatttcagtgaaattgagcaataacagtataattgacatcaaataaataatcatggctatatttgcaagtcatgattttataaaaactaacaatcttctgcacaacttcaataccagatgcaatagcggctatatttgcaagcccaattttaaaaaatcagaataaaaaaacagctaaaataaaactaaaaaacacaaaaataaatgtaaaacaatgaagcagatataattacttagaaaagcataaaagaaccacactttaaaacccttttgctagtgagcttgtcaaatatttttataggagaactagaataaaaa

SEQ ID NO: 393841 - DNA, 503 bp, Cannabis indica
agagagagagagaaagagggagggaggggttggttgggagcttcagagacaagaaatgggttttctattttaatttttttagaaatgaaaatatatttcatttttactacattctggtcaaaagaccactttgtcctcaaggcttaaaaatcaatacaattagcatacaagggcataaaagtcattccaaccacacacattatttcaattaaactcatatacataatttaaattattgcctttatcacataattcataaattttggactctgaacccggttcgagccaaaatacctaatcgtgaccatattaaggcaaacttttcaaaaatcacatgcaataagataaaaaagaacatattatataataatatagtccattagcacaatatataataaaattctaattttgcccttctcataccataatcatgaaaatgcccctaactcacaaatggggtcttaaattcatatattccaaataatttcacataattaattata

SEQ ID NO: 393842 - DNA, 2111 bp, Cannabis indica
attacttacgggagtcttgtcgtaaaaatgaggacataaggcaacccaagactagggaacaggaaatccctcgtggcaacgagagaaatgtatacagcttactcctcttcaagcagggattacgactaacctctcaacagctagaggcgagctgtggcatgtcttatagggtcgccctgtaaaaaacatcagttagttcaatgaaagagctcatgtgtttgcacggaaagaggaagcaaggaacaagatgaaattcataaatagtggttcgagaaataaacccaacactgttgcaacaagcaccgtctcgttgaaggctgacaatcctggggcctctagcataaagagaaaagatgactataaggaatcagccaaagataagaaaatacaaaagaagcacgataagtacgtggaaatttacaccatttatactatgctcaatgaaactcgggaaaatagttttcttccacatgagcacagggttgcatttttcatgcctaaacccatgagacatgcgaggcatagacgggatgcaacgaaattctgtagatttcacaaggacacagggcatacaatggatgaatgtcgtcagttgaaagatgagatagagagccttatctcgcgtggttactttcaacagtatgtaaagcgacaaggcaatggacaaaatcagttgatcagccaaataagcggggcaacaaaagattacaacctcccctagttgaaggagaggacattttggttatctgaggagggcgacatctcactggagaaagtattaatgcccaagagagatatgtcaagcaaatcaagaacgaccggtcagctttcgctcctaaatcatcaaagaaagctaagattgaagaacctcaaattttgtttctagaggaagacacaaagcacgtgagcttcccacacatcgacccactcgtgattacaatccagcttgtcaataagagaataaaaagggtgttggtggattatggaagttcagtgagtatcctttacaaggatacattgaacaaaatgggattgaaaaatgcgaagttaaaacctttcacggtgaatttgtccagattcactggggatagtgtcgccagtcaaggaattgaactcccattaactgtaggcgagtcacctttatccacgactgtaatgcaagattttctagttattgacttaccatcggcctatataatactgttgggtcatcaagcagtatttggactaggagcagttagttcaattaagaatctatctttgaagtttcaaacaccaatagctgtaggtgtaggtgtagtgtgaggtggccagttactggctcgtgaatgctatcgcatagagctacaaaataaaaaggctggccatcagctaatgacagtcgtaacaaaggaaagcgagaaataggatgcggatctaaatcctcgagtttaagatgaaaagaacgtgttaaaaccaatcgagaaattggatgaaataattttagatccagaaaatcccacaaggtaagtattcagatatgatcgggattgaccttaaagctatttgccatcacttgaatattgacccaaattatcaggctaagagactaaaaaggtgaccctttgatttcgagagacaaggggtactcaaagaagaggtggacaagttactgaataatgactttatacacgaggcattctacccttcatggatatctcatcctatccttgtcccgaaaccaaatggaacttggagaacttatatcgactttttagatttaaacaaggcatgtccaaaggattgctttccactaccaaggatcgaccagttagtggatgcaactgctggacacgagctaatgacattcatggacgaatattctagatataacaagatcaagatgcatgtccctgatcaagagcagacaagttttgtaaccaacatgggcctttattattataaagtcatgccttttggcttgaagaatgctagggcaacatatcagtgactagtaaatgaaatgtttgaaaggcaaataggaaggaacatggaggtctacatcgatgatattttggtaaagtcggtaaaaagtgaagatcatacaaaagaccttgcggagtgctttgaga

SEQ ID NO: 393843 - DNA, 1311 bp, Cannabis indica
tttaaaatagaattataattttaacaattaaatttttctacatccttttcattttacttccaaagagcatatcttttggtgcaccattttattaaatttgggtaaaatttttagcatattttactttaatagtacgtcaaattatgtatcaaattgatgtatactattaatggtgttggattttaaatttacaccaattcaatttaaaactattttcttgcattctaacccataatttaatttattattaaaaataacttacattttagtcttcaaattaaaatttattacaaaaattataagtaaaatttattttaactaaaaatttgttgtaatattaaatttgcaaatatgctaacaaatagcatgaagatcgaccgggacaaaccccccactaaaccgacaacgtgaaaaagaacaagcaggacgaaccaaataatcggtcgccttgttcgcaaatcgcttaacaaatacaatgtattattttaaaaagaaagtagacaattataatcacaaataatcaacctaaacagagatttcaaatactaacatacagaaaaatacaaaataacaataacaaaactattaatattaaataaaataaaaataacataataatatgttataaaactaaaaataacatcattattaaagtaaattattaattgatcatacgtgagaacaccataataatttaaaaaaggtgcgagcttagcccgcctatgcctaagatcagccctattaatgtgtgtctattttttcataaagtctaaattaccacgcacatttcaaaatcatttccccaaaaatctctttgtttctctctttttccctctcgctctctcttcatctttatgtggttctcaccaaacttcatctctaaaaccaccgtcgaacttcatcttcatgccttgggccaagtatcaattcccctcaccccatgctcaaaccatccaaccacttgactcaaattctttttaaatggtaggggtgttcatataattcgcaatttgtgattccaaactccaaccaatccggtccaaactatttgagaccagacaaagtgaatccggagtgaatgatttgatcaatctggatcattttaattctttggtttggccacgattttagaaatctcgatagcagtccaaaccaaatcaatctgtatacttattatatatttacttaatatttcttttttgtacgaaatattaatatttggaaaaagctttaggtagaatattgatattgactttatattgttacgataataattttttattgttatttatgtattataaacttattaaa

SEQ ID NO: 393844 - DNA, 969 bp, Cannabis indica
tagtttttgaaaattttaaaatataagtcatgtttgattaatgttttctgaaaataatttttatttttattttatttattttagtttttgaaagatacttcaatattttaagattccgatataaacaggacctgagcagaacccgaccctggacctagacccgaaccttgatgaaatagaaaatgatgagagaaagtgatgagagagaaaataacgtgagaaaacgatgagagaggaagtgaacagaaaatgaggagagagaaagtaatgaaagagaaaataatgagtgagaaaacaatgagatagaaggaggagagagaaagtgatgagagacgaaataatgtgagaaatagaaaatgatgagagaaagtgatgagaaagaaaataacgtgagaaaacgatgagagagaaagtgaacaaaaaatgaggagagagaaagcaatgaaagagaaaataatgagtgagaaagcaatgagatagaaggaggaaagagagagtgatgagagacgaaataatgtgagaatgatgagagataaattaatatgaaaaaataatgaatataatgatgtgacataaaatagagaaaaaatattgacaaaaaataaattgtttttgaaggtggatatttacagcataaatacattatgttttttttggtttcatacacttaataccacatgtttttttttacggattaattaaataccttatgttacatttctgttagggtaatttgcacccaaactccctgaattttagagtttggcacgatcaactccctaactgaaataattagggttgaattctccaacctaacaatcgttttgctctgtactcctttcatccactttagtctgttaagtgccaaagtagactcatgtacacatgtgtacatgcatgcggcgaaatttcataaaaataattataaaataaaaaaaatattgaaatttgaaataattattttaaaaa

SEQ ID NO: 393845 - DNA, 1224 bp, Cannabis indica
taatttagttttagtcacaatacttattgtgactaaaaacacatttagtcacaacaaattgtaatttttgtaactaatacttttaaccacggaccttttagtcacaacatagaaatgataatttataattagtcacagctttttatacttttagtcacaaattttattgagactaaaagtaaatttttggtagtacgagttagcgatggaagtagaatttctggccattctccgggctctttagttgggcattgaagttggtattcacttcataaaaattgcttcggacgctttgctagtgatgaaagctttggagaagaagcagttgtcgccatgtaggaaaagcaggactgtagtgtttagaaattttgaaagcttggtagtgcttttgaattgttataatttcgtttttattaaaagttactgatagagtagctaaattggctaaaattaattgtcatattgatagagtaattgctcaaaaatatagctaaaaaatatattgatcttaggcataacttcattttatatcaattttggcaattttttttaatgaaaaattaacttcattaatgcgagcaattgctcaaaatatgctaaccacattgatcatgttcataggcataaattcatattatatcgtttatattaatttttttttttatatattatatcaaatttaacattaattttttagtatttaaatttaaatcaatttttagaatgagaagtaatgttttttacaagaaatatgctatataagtatataacactacattaattttttggcatttcataataaatgcatctctaatatttatttatgcatttagagatggatgtactattttaaaaaataaaattaaaaatattgtataagtaaagaacattattattaaggcttagtaatgtttatatttgtaaatgattaatgatattttattgtaataattatattaaaaaaaactcgaaatttaattatatcaataataatataaaatcttaatgctaaggactattggttttatttaaaatttcttataaataaatctattagtagccattataagtataacctagtaattttacaccatctctagaagagtggtcttaaatttgaatctcatcttgtctaattgcctaatgataaaaaaaagaaagaaatgaatcataaaaaaaaaaaaaaaccaaaatcataaatgtttagcaaacaaaaaaatccaa

SEQ ID NO: 393846 - DNA, 1192 bp, Cannabis indica
gtgagcaatggccatgcatttccttttggaaagtctgtacggtaccgatcgtaacttgaaagtggtaaaggggatcctttcattgtaggcttgtattctagatctggttcaatcccattgtccagcttttcaagatatattagacacttatcaaatggatgtcccaactggccacactccatacaatattcgggtaatcgttcataacgaaattcaacccaaaatttttcttctacttgctgcagggtgatcattcttcctctcaataatggttttgttgtgtcaattttaattctaacacgcaagaaaggccccacccctcatttagtgaatcctcataaacatcaacatattcaccaataatattaccaagagctttagcaagccccttagttttgctaagaaaaggaagcctataaatctgaacccaaaaaggtgtgaaaatgagggtagccgaatgcacattttggccaggcaagggtgaatgcatcacaatgtgatgattcagaaagtgaaatgactcttttaaaaaggacccctgccttatctcctgcacatccaaaactgagagaaaacatatcagaagattctgttatagtgacaggaaatcttccattccagtgttgtgccatttgattcttaaaagtggacaaccatacttttctgttagtaagaactttggcaaataaaacatggtcttgagtcgcaggagggtctatacatcccatattagacaagtcaaacacggattcctcttcctcagtcaacttcaatggctctttcatcttatgtgtataaggatccatggcggaagaagtaaaaacaggcagtgaagatcgaaaaaccagagtggaaggaaacggttatagtggacggtttagaggaaaacagagtaaaacaccagaaaaatcaaagtgaaaattcttaactgtaataaactgccacagagcacaaaaggtgggcagacgctcttttatgaaacatgtcttatacatctgattttggtcagtttactgaccttatttatattgtaattaatttattatattatatatcattatgaaaaatagttacttttaatgataattttttagtcacaataaaaaattacttaactaaaacatagtatttaaatacaaattgtcattagtttacttttagtcacaacaaaacttgtgactaaaagtgaaaa

SEQ ID NO: 393847 - DNA, 1538 bp, Cannabis indica
acgtggaccataaaaatttgccacgtgtacaagtgtgtacacgtggacagtccaccgtggcacttaacggtgatttttagacggaggtgtgcagagcaaaacggaaccagggtttaggtagtttagccgccaaaaattcagtttgtgtggttaagtattacaaaccgtaaagttcaagtggtttagccgccaatatccctattttttttaaaaaaaaaaaaactatacggagagattagactagatagaccagaggaacacattctcctttcctacgcactcttatccgaacacttgtagagatgatattataaatccaaataatattaaaatatatatatttatattcaattagcaacataaatgaaaataatcattttatattatttgttcttttatactttttagataactactttgcatagaagtattattggtctgacaaagttctgcccacaccgttcatactgtaccccattttattttaattctatgagaaaaataaaataaaaagcttatttcattctaaattctgtaaatatttcacataataatttcataaatatgatgctttgtatgattttattttttttaaaaaaaaaaaactgtaaatatttatgaaataatatgctgtgtgaaatcaaatcaaatcttgaattgaattctcttcttctttggtgtgatttcttttggttgaattaaactttctacaggctgtcaccaatatttctaacaactcaggtcaagaaaatatataatattaatatcttatatttataacaactaaaataaaaaatgctacagaaagttttaaggtcaaactttatacaatcaaattaaggaattataacctttacaaaaaataaaataaacagaaaaagtaattatatactgaaaatacatattataatattattttactaaaaattatagaagtgttcgttatagttataacattatctttataaatcattgaaattttttgagtaatttacagtattgaaaataagtttgaaatttttaaagcacgtgtagtaaattagaaaatcaaaaattctatttttgcgattatcaacttttcaaaattttttaaaaattcacacaaataatattgtaactataataaataccttgcataaaaaaaactataataaataccgctataagaaaaaaaaaattacatgtaatttcaagcacaaaaactaactaaaaatttataatataaggttatgattagtactcatcaaatataatgtattatgtaccaatctagctactacaaaaataaaatattccctagattttttttatttaactagataaccaaagaatagcgatgacaattatacccgcgaattgtcgaatttggggggcggagcgagtacgaatttaaatgttcatacccgagtcaagttcagagcggagaaatagttacacgctccaatataatatatgtatagatataagttttaaaatcttaattattacaattaaaataacttcatgctttaagttttttattgattacattaatgaga

SEQ ID NO: 393848 - DNA, 1316 bp, Cannabis indica
ctctctctctctctctcctgtggcattctctctcttttttgtctaacacgcccacacctattcaaggtgtgtgtgacatcaaaatcctaatctcgttacagtatctcatgagttgactatacactgtaatacctaaatctgttcatccaataagatctaatagcccactctattcctgaatattaaggttggcttggaagatcaagctgtagattcttcaacgaagttcttggattggatgttcgattgttatactaaaagaatgtcctgataggcttcaagaggtaatcgattttctttcagtagtttagatttaatctatatacattatgtcaagatcattgggcttatagttcatattataaaataaaaattatcaaaattatgcttccactattataactctgatatggactataaaagccaacaacgtctgcttggcttgctcaccatacttgtaacttgaaattgccaaagtgaattacgctacacacttgggggcaccaaaaaaagagagggaaatttttcaaatcgacaaggactagctacccttggttgacaagagaaatgcacctactttaccaaacaaaagttacttagccaaaagaggtcttgaaagacactcatggcctaacgctgaaacgagagggacgcctcttgggcataagcaaacacttccaaatcaagagggtgactaagtcaagtacaataagttccctcacattcgagtggaaggatgaataaataataagaggatgagaccgctcaaagaataatactcccttaattgaaaacctgcttaccacagcagagaaagtcacttggccaaagagtaaccctcacaatcacttggccaacatcagttacaaaagtaacttggccaaagggtaacccttagagtcactcgactaacattagttacaaaagtcacttatccaaaagagtaaccctttgagtcactcggccaacatctgttacaaaagtcacttggccaaagagtaacccttagagtcactcagtcaacatcagttacaaaagtcacttggccaaagggtaaccctccgagtcactcgactaacatcaattacgaaagtcacttggctaaagagtaaccctcagagtcactcggccaatatcggttaaaactatcactcggctgcattgtggctaaggtcattcgacaacaaaaaaatatttagaaaaaagagttagacacagtgaggataattttacactacaccaaggtgttgctatgaagtaaaattcaaggaagggaagcctcctatatatagtgggaactgttggaattattttac

SEQ ID NO: 393849 - DNA, 756 bp, Cannabis indica
tattaattcctactcaagtagttttttttttacgaaagtaatacctactacctaatttttaataaccattagatcacttatatctaaggttaccaaaataatataggatgagatacataataaaaaaaaaaaaaaaaaaaaaaaaaaaaaaaaaaagaaacaaatctttgttgcgttgaattgatcttgttaacgccgttgaaatctccttctcgatgcgcccaccgtctctatcgacaccatcagtggtcgtgatggtcatccatccaagtttatttttctcccaataagaaaacaaaccattcttctcttcctttgtaataattactgtaaaaataataatatatatataaaaatataaatagctatgatcttctgccaatctactctattgataatattttgtgataaagagagaaacatcttcttggattttttttttcttttggaagaattatattgtgcaaatagatttagagttcactgattgaataattacatctctcaatatttacagagaaccatcttattggaaaaaaaatcctctttcttatgataccattacatatttgatcactcatacccattgttagggaaatttgaaattctatacttacatatacataatatcttttccctaaactaataaaacatatgaccactttttcaaaaccccaaaaatacccctctcaaaaactcttatttttttttcaatttttctgggcttttaaggggtcgggtccgatggggcccgat

SEQ ID NO: 393850 - DNA, 1731 bp, Cannabis indica
tcgctaattaattaacattttgatctatgaattattatgatgatgaagaagatgttaaaggtagtatttgtggtggtgatgatgacaatggataataatatggggtggtgctatgggattagagtaacgaagggcttatctgtgtgggatttctgagtgtcaacaacaaatgtgtgaaagatgaaagctttcgcccaaatgttggtgataatgtgcccttttcgaaccttgttgttacccaaattgttgcagtggtactactatgggttcaaaatatttgagccctaaaacaacttctataactactacttctacaccattatcatcaatattgtcactaggtcttgatgataaattattatatttgtatgtgtaatatgtatgtgtgttgtttgtttttcaattgtaataaaaaagtacctctttagtacttttataattaggatacactacaaaaaactgttacttttagtgtttagtcacaacataatttttttctgattaaatataacaaattaatattacttgtgactaaaacatagtatttagttacaagtcatcactaattttgttttggtcattatatattgtgactaaaatacatttagttagaacataatgtaatttttgcgactaatacctttagctacaaactttttagtcacaacataataaaaataataatttataattaatcacaattttttcacttttagtctcaaattttgttgtgactaaacattagattttttgtagtgatatatgtctaaccatgttattataatgtggaaacatattgtataccttcacatgaataaatacatatgcttgttcaatatatctatatatatatatatactaggcatataattaaaatcttattttgtttaaaatgtataaattgctaaaaaagccaataaaataaggaaagttttaataaaaacatgaacaatataaagtctagagcaattagggcatattctttgaacaatataaattagatataaattttttttaatattttaatgtcaacataaatgtactttagaaattatttaagatgcatgatttaaataatgaataattatatgtttaggatttaatagaatttatatattaaatgtataatcataaaataaatatatgaataaagtacatgataaggttaagatatgatttctaatcattatcgataataaataagattacattgaaattgaagctctctgatactcgagtcagtttctccagcatagttggtgctggtggttccaatgttttgtgtgcttggagtagtactagttctatgggttgttactcctagtcttgacgttggaggaacatgtgaaggcatgggattggtcaccataggatccctttggtttgtaggagtccacacacttggatttgtaactgttgggtcaacaaatctgtagtttgattcctccttgtggttacaaccttctttgatcgatttggtgaaagtcaaatcaagagtgttcttctcgctctcaacgagagcactaaaatagccaacgacactgagtcaattaaagcgattgcaaatagatgaatttgaatagagtaattagcaaataagaatacatataatttggggctgcctccttggcgtctcactggcatttacggggagccaaaaagagaacttcggtctcaaacttgggacctttttcggtcactcaaaaatgatagtcttctcccatggtgtct

SEQ ID NO: 393851 - DNA, 842 bp, Cannabis indica
tctttctttctttttttgaagtgtgtatatatatatagttaaataatatacacatatagctaaactaggctaatgggttaatcaaggccaatgtttaaatattggaaataaaaataataatatgtctctcctaggttctgatgtaattaattatgtaaataatggtgtagctaggtcattcaaattcttctataaaaacaatctctttctcttctatatagttatatcatgggtaaacatgagtcatgactgttgtttttaaatggaaatattatgtgtatatgctaatgctatatatatagttcaaaaaccatgcatatatatatgtatatatatacattaatggattctttccacatgatcgatcaatatatatagactatagtatttcaaaagggaaaataaagaagtttgttggattctcttatggcaatgataagttaattaaattcataaaattaataacgcatcaaaccaagggactacttcttatctctaaaaaaagttctagttttgacttcaaaagcaaattaagcacatctcagctgttctttactaataaggtatgtatgaatatagtctctctttatttatatattatatatatagtctcttaaaaaagcttattgttccataatttttagtcaaaagaaacaaacccctattcttaactttttggttttgagtaattagaataataaaaatacatataaataggtaattataattaggcgtatagttttccttactatatactaaactattgggtcatcagatgagtccacattatgatgaagttctctagtaaagttcactttagtcattacatcctaattaaagac

SEQ ID NO: 393852 - DNA, 1658 bp, Cannabis indica
cttccctttagcatttttcttcttcatgaaaatccacttacaccctatggacgtaatatcctcaggtggagttccatattcccaaagtttgttggtgcacatggaatccatttctaaatccatgctattgttccacttgtctaaatcatggtcattcattgcttctttgtaagtcaatggatcatccttgtttgtgtcagagataagaacatgttcatagtggacaggttttctcacaatcctcccactacgacgatgtactggggttttcttttcaggaactgtggtaatctttgtcgttcgttcaagtaatggtgctaaaatcattggtacagaaatttgactatttttgattttcttgataaccacttgactacgtggcttgtgacttttcatatagtcatgttcaagaaaagtagcatttgtagatacaaatactttgttatcttgatgactatagaaatagacacctcaagtctcatctaaatatcctacaaacatacacacttcagtcttaaaagcaagtttcccatacttgggtttaagaacatgagcatgacaaccttaaatacagaaatgtttaaattgggttttgtcccattccataattctattggagtattgcttatgctctttgagagtactattttcaaaatgtaggtagcctctagaattgcatatccccaaaaattcagtggcagtgataagtaacacatcatcgatctgaccatgtctaacaaggttcggtttcttctctctactacatcgtcgtgctgaggtgttccaagtgttgtaagttgggataagatatccttttccaataaatagtctatgcatttagaatccaaatacttaccaccacgatctgattgaagtgtctttaatgatttacctagttactttttagccatagccttgattgaactttccaaaagtttcagacttcttggccatcaggtaactatgatcgtatctagaataatcatcaataaagtgacaaagtattcataacctcctcgaacttgaatattgataggtccgcacacatcagtgtgtattagctcaagtagttctttggctctattgcttttttgcagaaaaagttttttttgccatcttgccttctacacaagattcacatactggaagagttctaacctttagttctcccaaaggaccatcctttgttaacgagtttattctgtctagaccaatatggcctaaacatagatgtcatagatatgtttcatcatcatcagaaaccttttacttcttatttgattcaggcaatgctactctacataattcattatttaaaattaatttctcacttggcttgagcacataaagtctgttactttatttttctaaacaaatttggcattcaaaacttggaaataataatatcatttttaataaacttaaacggactttgccaacacacttgacagatacttatgctccattgcccactctaatggccacctttctataggctagtttctttgacaaatcaagtatttactttgaaggacaaatattattagtggctctaaatcaacaatccataaggattcatcatcttccactaaatagcttgaagaacaaataaatcgaattttactttcttaagctcggagagatacttgttacagttt

SEQ ID NO: 393853 - DNA, 1479 bp, Cannabis indica
gccatggtcctgctaggtcaatctaggctggccatggtcctggcaggtcatgtgcctaccaggatcttgtaggtcactatggctttaccaagaggaggtcggcctttagatatggaggtgagccttttgcaagttgaagacagctttgtacatcgtctccttgtagaggccaggttccctcggtcgaacgaaagctcccttggtccgaaagtcactttttggccagccagcttgtgcacagatcctggcgacctataggttcacccctggctagcctataggcttttcttagacggccagggacgttggtatagctccttaagggctctcttcactccattcagttgctacttgattgttttaatatatctttcatggagtccttgttctgctactggcaggattgtactccacatgtactctatctttggctgatgtggacatgccacgtgaggcggaagaaatttgatttaacattttccccacaactcccttttcaaacatcaagtcgaataggaactttctagctgtcgtcttatttgtagtagtcattgttgagcagccttgcccaaccaagtgttgtctttttgcaggacatgcttttggatctttgatcttctctctttatatacatctcatcttctatttttggatatctcctctttgtacctgccattaacaagtttcaagctttttaagcttttggaaactttttgattctcatgttagtttataatctctttggtatattgatcctcacgacagctttaaaatgtataatgtgtgactttttgatagaaaagattcaattttggcctattctaggattcttaactgtttgagtcataaagaatacgagatacatattcgagttttgaaagaaaaaatacacattgggattcaaaacttaccttggctggcctaggaggtcttgcttaagacctagccggccctaaggcttaatcttgggacttggctagctttagggtgttaccctataaagtttgcctattgatggatgggtttggtgaccctagccagttcttggttgagtcatgggaccctggccaactatttcaaggcttgagaaccttagccggcatgggccttggttccaagtgggtagctagttttctgtatcttttgaattcgacaagaattaaactctgtaggcatatacaacattagtctcacaagtggtttccttggaaactccatatgaagcttaatggtgagtctattattgtcgaatgttaaactttagactcaacatggattggaacctgtaaggaactctgccttagccatagcccggtacgtggcccctataagagctgcatccagttcttttccagctatatggttttagcagggccttggcctcatgcatgcaaattgatctcatatctgacctcaaggctttcatgttcttgctttggcctataggccctctatttttgaacactactattatttagc

SEQ ID NO: 393854 - DNA, 975 bp, Cannabis indica
acggtggcggcagacggacgtggccggaggcgcagctgggtttcgaaatgggtctggtagggttttgaatggggaacgacaagtgaaataatgaaataatagtttgtaaaatttgagttttacaaaggcgttatcctatttactttggtgcacaaccgtggcaaatatattaaccttaatttcaaaccgaagcaaaagagattggcttcagttttaaactaatgcaaaatgcagaagacagttttttaaattgtcacattttacttcggttatactttttgcgtcagggtatgacccgatgctaattgttattttttagcttcagtcacacactcaagcataaaatctccccttattttttacctcggtcaaccattttggagagacgcgttgaccgacgtaaaaagtactttttgtagtagtgtctgtaggaggaggggatacctctgttatctcgagagggaacacgtcacaagaagataaggggaagtttatctggtaaagtaattacataaaagtattacgaagtaagtaaataccggctcgctatgattgccgtattaaggtgctatgggaaaagtgggtcgttaactagaagcagttaaagataaacaactaaaaccaggattaattcactaggaacccaaggatattacacggattgaccttagatattaaatcaattatgggaatttgttagggattgaccctgaacatcaaaactcgttctatcaaaaccagatgcttctaaaagattgataaaataaacaattgaactgggaagttcttatgagattaatgattgtaaatcgcatcgctgatgtaatattttgaacttcagttgtgaataaaataatcatttctttcaacaagtaattataaagcgtaaaccctttaaaattacttaaggagcatatatgtatgctcaaccagaattaatctggaaatacaaaatacaatgcaaacccatcactt

SEQ ID NO: 393855 - DNA, 757 bp, Cannabis indica
aaaatcataagcttttgcatggagggtttaacccctatttataggctagggtcaagtttttgggtaaacttggatttgttaaggtttttatctcaaaatattcacaatgatgggttaaaatacatcaaaatagtaactttgggttagttatttgaggcccatataacaaataaccaccatctgtaccactacagtggtatttgtacgactgtcgaaggcctcgtaaaaaagaatattagaagaaatttggtgttagagaaaaagatgctttactttttgtcgtgagcctctttgcggtctggcacatagacatctcccctacttttgggggattctgttagatattcgccacataggttggtgtttgtgacccataccattgttgggcatctttcagtattctgcatccggaggtcatctaggtttgccctcagaatggtcgtttattcttgagaaacttcgctggatcatccaacttcaggtctctgggtttgctgtcagtggacaccccagccaacctatattacttagctatctgaaaacacaaatgacgtataatgatgtggtcacagtagaatataattatgattggatgttcaaataaaacttagtcctaagattgtcagtgcacaaggtttatgtgctgactggaaaatttgcgatatcatctattcacactaagtagaatataactatgattggatgttcaaataaaacttagtcctaagattgtcagtgcacaaggtttatgtgctga

SEQ ID NO: 393856 - DNA, 1127 bp, Cannabis indica
cttcttgtcttcaccagcttcatagcctcttcatcaagagcttcatgaattccctgatgcacaaggaagttttcatctcaatcctccataaactaaattcatttgttcaattaaacttatccacctcgaatcttgcagcaaccatttaactccaatagtttcttgatgtttgaagatcaatcttggaggcttaaatgtggatcttagaaacatcctcttgacacatatctctgataccacttgtggtagaatcaaactcaccctttaatttctcactgttactcaactaatagtggcaagattgaattcaaacaatgacaacaaagacaaaaaaatataaaccagaaaatcggagatagaataagagtaaagaacatagaactttcaatgaacacttagagaaaaaatagcaaaactcacagccactttattccttcatgatcatttgtaataaaaagagaatatctcgaattgatgagtacatttgtatagaaaaaacagtacaaggacaaattacaattgaacctcacttgagtcccctcaatcaaaaacatgagggagactttaacatccctctaatctctaaaaaaataaaactctctaagtgtatgaatctatgtacaattgaattaaaagccttggttgatcataaagggtggttgccttttatattggttgtagaagcttgacttgactggtttagctccaactaaattaactgtcattttccaactaggatgattagtgagcagctaatgtagcagaggacaatagtgattcaaatccactgcaattataaaaaatttaaaataatgccaccaaactacaaatttttttattttatattttaaatgtttcaataaattaatatgtattttgcccctaaacttatagtttgaccaaaaaaattcaagccttgaattattaccaatgttaaatatcccctataattgttagtaaaatatgggatttctattatactttcttctattaaataattagcaattttatattttcgatttgttaccactgcgacctttcttttattaaaaaacataaattgaaaaataaaagtacataatttttttttttttttgtaacacaattcaaacctaattttaaaaaaa

SEQ ID NO: 393857 - DNA, 2269 bp, Cannabis indica
ttttcttttgtgtttctggggatatttagtatgtggagatagaaatttaaatattgttaatgagaatagtcatgaggagcaattacttaatatactaaatagaatttttatatatagtttgttatataacaaattgttcttgatacatatattttggaaaccacgtacatcgtcatcatcatcattactattttaaaatgattattgctattgggcatcagtggtgactagcattcttaagacgccttatgattggctagcaatactttctaaaagttattatattaaactatataggacctgatactaaattagaccaataacgatattgatacgtaggagggtgcttgacgccactagtgccttttagcatttctcttttaaaatagagcattggtatttaccatttatagtgtctaacacctgtctttgcgattggctaataatattctctaaaaattattatattaaactatataaaatctgatacttaattaaactaataataatattaacatataagaagatactaagcaacaatgtgccctttcaaatttctctttaaaataatactaattaatgtactatttacactagaggaatttcaaagggtaccagtggtgtctagcacttagtatgtcaatatcgctattgatccaattaaatatcgggtctcatatagtttaatataataacttttagagaatatcgctatccaatcacaatgcgacatgtcgagaaggtactaggcaccactggtacttaatagcaatagtactctttacactaattaaaatatgaaacatataattatatatgtatgtaacttatttaagttttattgggagatacaagttcccatcgaaatggatgttatgtataattatataatttataaaaaagaactcattaaacttatcgaaaatgtctcccaccacaccacagctgtcatcacctagttagcttcttaaggtaaaaataaattttatatataagaaaaatgattaaagttgtcaaacactaccaaatagatagtgtaattaaatatatttattaaaaaaaaaaaaagatgatagtgtaattaaatattatatcttatttatattttaatttaataattgttaaattattttagtaatttatttatattaaaatatttttaatttattgtaaatattttataagaataaaatatcattttttttttctatttaattgtgttttgatgactgctatttcataaaagaaaagtatttctttttaagaaaatttaattaaacgagttattttcgaaaattaattttttattttgctaatattttttttttggtttcactatgaatatagcagattgtataatctttatatgacaagtattaaagtctaaatcatgatcttagacttatttagaaaattttttaaatttgtcatttatagagtcatgtaattctgtcactgaaaataaaggtttgttttaggattttcgtacagctgtaaaaacgtgttctgactatctctagaatttttatatgatataaataggacctaaagagcaacaaaacgttctcatctcttctagtcatataattttatatttttatatctttgtaagaagagagtttgttctgtaaaaacttagtgtgttctactaggttttagtctttgttttattgttcttaaagtataaggtgaagagctttgctcaagagaaaagtctttaggagaagaattgtccaagacttactttgggaggaagtaaacactcacacatcaaaagttgaaggagttcgttgtttggtggtagtggtgttcaaaaataagattaattggcaaaataaattacaaaggattgcaaaaaatcattagagtgagtctaaatttgttttaagtcaattatgctttgtaatttgatattttattaattgatttaattatctgatcgtgatcctgtagactaatagtatttgaaataatactgataccacgtattattctcttgtgtcaagatttaaattctgcataatttatttatgtttccattttgttacagcaagtatgtgttctgcactaataagttttcaatctgttattccaagccattacaatcacattttaattataataaacaaataaattagtatatgcaaaatacgatttttctaataattattattaactatttacaagaccttattgttagaaataattggggtcacaactgtatatataaaatgtgtgttaggtcatcaaataaataagtcaaatttat

SEQ ID NO: 393858 - DNA, 796 bp, Cannabis indica
agagagagagagagaagaggtggattatcttgtttttgtcattttccaacttaattgattttctaactaaataaataataaaacttaatttaaatggaaagcaagctaaaagcatgctgattgatactggcgcaacccacaacttcatttctaaattcgaagccaagaggatgggcctaaaactggagaaggatacggctgcatgaaagcagtcaattcaaaggccatggccacaattggagtggccaagaaagtgaatgtcaagatcgatggatgggaggggcaactggacctcgtagcagttcgcatggatgacgttgatgtggtattggggatggagtttctagctgacatgggggccattccaattccagcaacagggaatttacttatcatggatgagaaaccttcaatggttcccgcgaaagtaagacatcccctaaaagtcaagcttctatcggccttgcaactgaagaggggtttgaagaagaagaggtcaacatttgtcatcgcttctgctttgtatgatgcaaaagttgaggagttcactccgcctcaaattgagcaggtgttagatgaatacaaaaatgtgatgtcagttgaacttccaaagaagctgcctcccgagaggagagttgatcatcgaaataaattggtaccggttgcaaagcccccaaataaagcagcataccagttgtcttccccaaaactcgagatttaaagaggaagttaatggggatgttagaattagggttgatcaagtcatcaaaggcactatttgttggaaattatttta

SEQ ID NO: 393859 - DNA, 1468 bp, Cannabis indica
cacaagtcaatacaagtaaaatgggagaatgctattaccaccattacaggatcaaacctctacaataacttcggtgttctctttgctttactttgatcattattattattatttaattatttctaatcgctttcattgacttattgtcgttggctaaatgcaaggccaacaagtatttatacatttctaattaattggataattataaattgaggttccaacattattctcatcaattgtatcaaatttaatcaaggttatgattttcatctttaaacataagccaattaaattttttttagaggtgcaatgatctcaacatcaattgcattaaatttaataaaagttattaaaatcttatcatcaaataaagtagcctaattaaatttattcaacaaagcaatgatcacattatcatttcctataactctaatttagtttgattaaatttacaaatgtcaaatctcacaagataatcaataattcctaaacaaatcaagtgtaacaactatttttgaattgttctttaaactcacaattatactcaagaacctcacaataagttctatctcaaataaaatgatattaagatttaacttaaacacattcttaaaaattcaccaaattaaagttaagaatttgaaggatacctctcaccactaatggtgtgtagtttcattaagaaatcattctttgataaaatctttgaacgcattattgcatccatacttgtgattaaactctcttgcatatctcatacatacttgtaattaatcttgcattgaaacttgtactcatagccatattcacatcaaactcgtaatttttgatgaatctcgtcatctttaacccatccgtagtaaaatgagtataactttagttgtagatatattattcgcacaaactttataccattggaaagaacttcaaagatataaaaatatcatgaagaaactatcttcaaattctatttctattagcgtcaaaatacgactccaagtagcaggacctggaagttgcaaaaattcattctctgccattgctgatcatgcaaaaccacaaataaagttattagaataatagagattttgattgttgaaaatttatggtataatataataagtttatgacgatatagaaatattttctttgaaaaattaagaactatgatgatcaagatttacatttatgggatgaatatgaatcttgataatcaagaaacaaagtacaaatgaaataatgatgctaatattgaatgaaaatatacttggtaaagattaataacagtaagaataacagggttaataataattaaagcaatgaataaaccaaatattagggttaagagaatataacccaatttcgggaaaccaaaacttgcacagtctaatgaatgctgttcaaaatttgtatttcttgttgacagatgggaaatcaaatcacattaattagtttcctaattttgtgt

SEQ ID NO: 393860 - DNA, 659 bp, Cannabis indica
agtgacaataaataaaaaataataatatattaaatacaaaataagtaattttgcgcatgtcacttattaccaggcgacacattacatgctatcttctctgtctctcaatactctctgatgatacctaaaattatcaaaacatctcaaaacctctcaaacgtaattttcatcaatttaaacatactgttgaaaaatcatgtataacagtcttatacttcaaaacttcacatcaaattcaaatttcaatggtaactgttatttaccgaatttataactcccaatatgttacaaggatttttatcatgttacttaaccgtagtaagagcacgaaaaattgagcatttttttttattcaacctttcttattaaggttggccaagacgttgaaatcttttgatttatttattttattgaatattattttgtttaaaataataatataccatatatagtgttaatgcttggatttaatgagtttcaattatgctaatttgcataagcgttaacttttgcactttacaaactcgattatcaaatggatcatgtcaatttaagaattataatttataaatttaagaatgaaactgaaactgttttgctaatctccatatattcaaagtattggagaacattgtctcacatggattaaatgtaaaagt

SEQ ID NO: 393861 - DNA, 783 bp, Cannabis indica
gagtaatctcaaactctttaaattattctattagaaattttcttaaatctttaaacccgtctcaactaaaacccactaagtgaaactcttacaccaaacacactacactatcagtctaattagttgccccacatatatttctatattattatttgttttgaccaaaaatggttaagttttttgttttgatcaaattatcctgttaataattttttagtgggtttcttttttttcttttcaaggtcataatgcctctctcttctacatgattgtttttttttccatagtatgttctttgcatgcatagttgtgctatcatttcttaaacttgtgtaatacgtgtcctcatgagctgtcttaattcttttaaaattagttttttaaagttataattaccttttcttaaactttattttgtcttatctatcttgattttgctatctacggaatcgagatatgatttactcttgatattttctctattttacctcggcgtgtattaacctaagtatatccttaacctcttagaatggtgtcacccttggcctatctcagtactaggagtattcgcagtgcaggtagtgcaaattgtgattttttttcaaaccaaactgcatatgcagtttatgtaatttctcaaatcgcaaccgtaccacaagatctaaaaactacaaaaatcacactttaaaaatacagtgtggtgcggtgcgatgcgatttaaacagtttatactatcatcagaacaaaaattaaaaaaattaatttataaagttttaacaatac

SEQ ID NO: 393862 - DNA, 519 bp, Cannabis indica
gtttatgattaattgatttataagtgtatgcattatgatgtcatgcatatacactttaatgctttatagttttttggtgcttcacgagccaacattggctgcctatatattcaaggcattttctttgtaaaatatagttgattcataatgtaatactctcctctttaatacaaagcttctcttggtcattctctttggatatatatggtgtccttcattgttcatcatttattcttcatttgttctatgtgttcttcatcatttctttgttcctttttgtgggatcgattgctgtgactttcgagttggaggctgaaccttgcagacggacttgcgagccgccgcaccttcgggcgacggaccgttcggggcgtgtcatacgtctagtaatacgtctagtaattggggccaattcttctggttggcattgacaaagtgtcgcaaatactcctccaacatcccattgaatctttctgtctgcccatctgtttatagatggtagctcgaggagatgttcat

SEQ ID NO: 393863 - DNA, 839 bp, Cannabis indica
gaaaaaataactacaaccagaattttatatcacactttgttatatatttaatctatcgtatatatatgtgagtgaagtattcactgtctctcttctccaaaagattacaatacaccaattcttcctctgattcaacatccggggacctgaaaaactcaggcagtgtataatgcaccaatttagagaccgacaatagcaacaaaagaagatcggcaccaaaaacacacagaagctccacttataacagtaaacgaaaacataagctcaaagcaccgatcaacccgcacacacagatttcaatcaataactaagccaacttagatcgtccttgttaacaccaatcataagaaacataggtacatttatatatataatgctatacatacatatatataaaaattagaaaaaaaatacactgaatatgcgcattttcaatttaatcttaaaaaataaacatctatataaaaaaataaatttcataccaaaactatatcatctttcattctttcataatgaaatgttgttaattaaatatagattgagactatgaagtttcacaactaaaatacaaatataaactgaaaatgaaacattatgatatttttaattttagacatatacactcgaaatgaaaaaaattactgaataatatgaatctaaaaccggttactacaaattatctgttaaacataaataaagataaatgattattagaaaccagtttctcaaatatatagtgaagaaaacacatataatttgaaaaaaataataataataaaaagaaatcggtttcttaatacattatatttttttaactatttgttttcaaatattataca

SEQ ID NO: 393864 - DNA, 1220 bp, Cannabis indica
cgagatttgatatggcaaatgaccaatgaagacatttcttcgatcacccgggggcaaagaagacatagtatacgggagctatgcacgttacatgagcattcacaaaaatcatggtacacgagagccatatatgtcacatacactttggcatacgaagccaggtgttaccatggtatacgagagccagcggctgcagtgacattcaaggattttgcacaccagagttaagcgttgttttgatataaacgcttgaggtctcacaagaatataatgatcgagtttataaatttaaagttcctgtgcaagtgttactctttggatcacaaaaatcaaaaaagaaaataaaaagcattatcaattatagaaagctctctagaagcaggacgcggcatcctgaagagattttctaattgatcgaagaaaaccctctaggagtgggacactgctccagttgtattcttttagtggctaagctcctcctaagtatgggatgttgtacttaacaaaggtttaatccaatctttcttttttctttttcctctcttagagttttttttaacaaggttctatgatttgaaatcatcaaaccaggatcttcattgcgaggaaataatattattcatgagaatgacatgttgagtttgactttcactgttgattggacgtggaatttttgggattcttatcaaaaagaaaacatagtaaggggagtttcggctaggatggttgattgtggagttagtttggtgagtctggtgtggcatttatagccttaggatcaagatcttaaagtcggtggctacaagaaacgaggttgttaagttagttagaaatatctaacttaaccaactcctcatttagcgaagtctccatattagcgtaagtaccagggcctccgagatcatgaatgagcttccaaactcgaggaccacggactttcgctgaagacacttctagataggatatgaagtcgactatccggaactaccaatccaggaaggataactagccagttgaaactcctttctagggaagggctagctatcctgaagactgatcctggtgagggcatgatagtcatccgggaactcccttccgtactcgactatcattccacaagacaccaagatcgataatagtgagtgaacaactttccaaaaaaaatgattacggacaccttttcatttggagaaactataacacaaaaataatattttttt

SEQ ID NO: 393865 - DNA, 1055 bp, Cannabis indica
ttttaatcaaattaactcaccattttttgcacttgatcactcttacacatctcctcaagatcagttaatataatttctttgcctggtatggtattaaatagtacaaaaaaaaagcgctcaatttcttatactataatacattattattatcatttagtgactttttagacatcacatatgaaatttctatgactaaaaagtaatttttatttatagtaaaaatattgtgaattaaaaataacatttaaatatttaaatattttagtgaatgtatatataatgatgttctttatttacaaattgccactaagaatttttgtagtataatattgtagtattatatttagtataaaaaaaatatatatttttttgtatgttgtattttgtaaaaaaatattgattgaactatctattttattgaatgataattcaattttctttttttttttttgtaaaaatggtacaaaatagagctcaatttttatcaaataaaaacttaataatattttgaactcgagatgttatgttgaaattggttatatatattttgtgttcgtgttagaattatagattcgggttgattatattaaaaaaaataatgacaaaacttgagaaaagaattattttttaccatgctagaaaatataagattcaatttattatatggcaaaaaaaaaatttaattgataatttttgtaaaatataaaatccaaaataatatttatccttaaaaaataatctaaatttatagtagattgtaggctttttgtttgttaattttcaagaaatggaaaatggtataggaaattgtacttttaatttcatacaacttgagaatttctaatatagaaaaatcactacaagaaatgtcacttttgccagcacatttttgtgctggcaaaaattagtattgcgctggtaaaatagaatttacttatgatgtgttggcaaaagggggttggcaaattaatgttggtattagaacttttgccagcataaaatgaaaagcactggcaaaaaaacttttcttaacgcgtaaatgtgctggtaaaagt

SEQ ID NO: 393866 - DNA, 952 bp, Cannabis indica
ttttccctgtcaaatgatatggagtaaaattgcttgccttatcaaatatctaagtgactttattacacatttagtttctcttgttttgctcacgaaatatcactattataatttcgatctatactattgcataagaaatattatgatatttgtgaattttgagattaaaaatttcttatatcaatattaccatcgataccaatattttcattttgatcatatcaggaaatacgtgatgctgaagatgattgggctgttgccaagaatgttgacactgattcaaaaggattgcgcggtaaaattcccaagaacatcccatactttcatgttgaatttggtctaaagagaggatttctccatcaaatcgatgatgaagaacaattcaggagtggttttggcctgaatgtcatgagaggaatacttgagctgcccgaggaagatatgtaccgtcgcaggcgccagaggtctgagtcagtgtcggaacaaatgcaagctgttcagaaattcacccgtgattgggagccatttgactggacaaagcagctgcatcaatgataatgttaacattttattttgtttttgtaagcaatgctaacatttgatttcattgtaacatagaataacatttttgtagccttggaaggaaaaaaagaaaatatggaacatgatttatttcatgggtcttttgcgtatataatgccctttgatgccgaaaataaaattgaaaaaatgtgtatgtcaatatttttgcaataccattgaagttatactcatatatgaaatgaagaattagggcagagagagagagacgtatttgcctaatctattcccttctatgatgctcaagtattgtttttaaaagaaaaaaaaaagagattttttcacctcatgtcaaaattgacactttttttacatttttatccatacacggttttttaaacttttttaactt

SEQ ID NO: 393867 - DNA, 608 bp, Cannabis indica
ccaaaaaagccattttaaggccaattgattccggtgttccgctgcaggagacgagcccgtttgggttagatatatgggcgatcctccgatagctcttttaacatcgataggaactggtcgtggtaggtgcgagtactttggcgtgtcgaagttgaagagctcattttcgttctcaccatgggggcatggcccagttcggttctagtgggttttggctgaggctttgctctctagatctctagagacgatagatattgagcttctctgttttgtgttttgtttttattttaaaaattatttatttactttttgtaatattaagaagtaaataaatacatttttatattaaaatatatattttaaaagtttgaaatgatttttttatttaaataaggatattggcgacaaaaccacccaaactttatattttttaacacttaaccacaaaaactaaaattttaatggcaaaacctactaaatccccattctgttttgctctttacacttctgtctaaaacctcaattaagtgccacagtgaattactcacgcatatacttatgtacacgtagcaactttttagtggtccacgtaataataattttaaaaa

SEQ ID NO: 393868 - DNA, 1158 bp, Cannabis indica
aaaattttgagaaattaaagaaattacaaaactataatcaaagtagtttttttttctttcatggatttataaaaaagacaaaattaagcatactaccgattatttaaaaatattataaaattatttttttaaaaaaattattataatttataataaatatcattataaaaaaagatatataaaaattattggctaattatgatttttgtcctataaactttttacatgtatcaaattattaccctgaatattttctagtcgttaaaattttctcttaaactattgaggttgttgaattcaacgactccttataatttcactaacgtacacatgacatggatggaagttcaagggacacgatttgatattatcaaaatttagggacaaaatttggtatatatcaaaattgggggcacgatttggtacattttcaatcgtcacattagtaaaattaaacggaattgaacagaagtttttgaatccaacaatctcaatagttcatagaatttttaactgttggaaaagtttgagaatttgattaccaatatgttaaaaattcagagggtaaaaatcataattaaccaaaaatattttacgtgccttaagaacgtatggcaatctaaactagcatgtttgttatgatgtagtttataaaaattttggagtgcttatatggtgcattcccaaaataggtacaagaatggatcatcttttaatatttgaatagttataattttacttatacaaaaaaaatagttataatctctctttacatatacatttgataatgtatattattatataacacatcttataaagttttgataaatttgaaataatttaaaatatagaaaatagagttcatattatttattttacacacttataaaataaaaaaatactctctattatttgaactatatttttaacgtattaaattattctaaatttattaaattttattgaatatattaaataattacgatttccattgcaattaaaactaaaagtatggagatttttaaaatataaaaaaagatgcattaatgtactgttttttagaagggttaatttcacaaatgcacaaaaacaacaaaaatacggtttcacggaattttgaacatttttacgatttttttgattttatttacataaaat

SEQ ID NO: 393869 - DNA, 713 bp, Cannabis indica
ttgtctctttcgttgcttcccatactttggtgtgatgggataaaagaaaacactattattattgaaagctaaagataacgcaacactacatgacccaggaaaagatataaatagagagatagagagagagagagagaagcatgtcccatccattctctctgctgcattttgtttgatcttcttcttgcttttagaaatcgaattcgatgctttttgcacactcatatcatatgatttatttaggaatattttatttatttatatgagatttctgtctttgctaactaatgaaagacatgttagttagttggtggttctttctaaagacttaaattaaatatagttgggtctaaaaacatgatcatgcatgattcggtttgtaaaaaataaaataacctttgggtagttgattgtggctttagttatgcgaattaatatgcgagccggtagtaatacagattgtgtcaattacttattagttggtagtatgaccaacgctatcaaatatttttattttacaattttttgtatagggagtatttcatctgttctttttaggttatgaccatcttcaaactcatactatcataaaatttaaaatttaatgtcaaaaattattttcacttcaattacagcactaaaaattatactaaaaaatattctttattattacattaattaaaagaaatattatattaatttactaaaatctt

SEQ ID NO: 393870 - DNA, 914 bp, Cannabis indica
caaatggtcttatttgtgcatttatttaagagaaatactagaagtcattagtggtaataggcactatataaatgtgttatattattattagtataattaagtattgtgtgccaaataatttaagtggaggttagtaatatttttgtttttaaattacaaaaataagtaaaatttttgtttttaaataataaaaatatgttctataactatttttgctttttaatttcaaaaaataaaaacaaaagtatattttgtaactacttttatttttatttaagtgagaaataagaaattgagattaaaaaagttgatcaaaatccggcactagggtctaggtccaggttcgggacaaagtacatgtttagggtcaaagaatggggctaggtcaggtctagggtcggagtcgaagtcgaattcgagtctaaatttagggtcagtatcagattctaaaatattaatgaaaaaatataaataaaaaacgtggttttattttgtttttaatatttatttttatttaaaaattaaaaaagaaaaatagtttcacaaaacatgttttttgaaattttttttagttaaaagaaataaaaaattgattaaaaaagtgttatatgaggcactttttatttaataatttttataaaatgttactaatcatttataagacgttatatttcggtaatactaagtatctacactgctgataactaatagtaatgtatatttttaaaaaaaatatatatatatatatttacactatttagcagcaaaatccatgagtaatttttgttggtcaactaaatcaactcaataaacaataacaatatatttattatctactgctacattatttttgtagcactcctatcagtgtgtttatatagttataaactaaaaatttagcttaaaattgtatc

SEQ ID NO: 393871 - DNA, 2201 bp, Cannabis indica
gttttagagggagtctaaacttgattaagtcaactgtctttgtaagtatttaagacattactaattgatttcattctttcggcgtgacccagtagactaggagtgttcaaaagaacagtgataccacgtacaattctattgtatcaagtgattttattttctactagtattttaatttttggtattttatttttggttctggtttatttatgcaaaactgtgttttgtagtgacagaattacattctactgctgtagactgttacaattgtatttttactgtcattgtgtaaaaattaattggcttttgctaaaacacaatttttcaattggtattagagagggacactaaactcttagtgtggtcctttaacattttcatgtgtttttgtgcaatatgttattttttgcagaaggaagttctatttctcgtccactattgctcaatgattctaattattcttattaaaaagttaaaatgagggcttttatcaagtctcaagatgagaaagcaaggaggacagttctttcaggatgttctcctcctgttgtggtagattccaaaggtaattttgaattaaaatctgaactagaatggtctacttaatatgataaattgtctgcttacaatagcaaagctttacatgctatatctaatggagtaggtgaaagttatattaagcttatatcttcgtgtgaatctgctaaggatgcttggcagatctttcaagtgttctagatttattatgcttcagaccacatttgatgatcttaggatgtctaaaaatgaaactctgactgagttttataaaagattgtttgatatagctaatgaatgctttgctcttggtgaaaatctttatgaatatgttcttgttagaaaaattgttagagttcttccaaacgggttcgatactaaacttttggccatagaggaagctaaatattttagcacaatgaaggtggaagagttaataggttctttgcatacttttgaattgaatcaacaaatcaaacaaaaggacaaacccaagtccatcggcgataaagataaaagtatcgctttaaaagttgctaaaaaagaaagttttgataatgaatgtgattatgaaattgctttattaaccaagagtttttagaaatatataaaaaagatgggtaataaaaagaataacctgaaattttcaaaaagaaatacaccttttaaaccttctgtgactaataaaaaggaaattcaatgtaggaaatgtgaaggctttgggcatattcaatttgagtgtgcaaacactttgaaaaagaataagaaaattttcaatgtcacttggagtgatgaagaaaattctaagaatgttgctctaacctttgttatgactattgtattgtgtgattcacaggtgagagaaagatttgtatttttggataataccattgaaaaagaagcaactaattcagatgattctaaaatatgtgaagagtctctcgctgaatcatataaggtcatacaagattggtattttcgttggtgcacccccatccactgctgctgcaagttctagttctgattctgcagatgtgcgtgaagtcaaacaagaagtcatcttggtgaataatcgtttggctgccatggaggaggtttagcaagagatgtcaaagcaattgtccaccctaatcaagctttacgggacataagcttttttaaatttctttatctgtgtctatttgttggacttatttctatttatatttatttttggccctaagatacacaaaaaagggggagtaatagtttttaatttcttactttgttttctcaactttggaccctttttcgagggggagttgaggttggtacttgtgttaaacattggtttaaagttagcattatatttcagtttaatgatgtgtttcttaggggaatatttatatggtgtagctaactttgttttgcaagtacaattttgaaggggtgttcataaaaatcgaaaaactgaaaccgaccatcaaaccgaccagaccataaccgaattttcggttccaagtcatcactgaatttggcggtcggtttcggtttcagtttttttgacatggcggtcagtttcgattttttaaataaaaaaatagattaaccaaaaaaccgtcaaaactgccaaaaaccgcctaaaactgccaaaccgaaaactgccaaaaaccgtacggtcggtt

SEQ ID NO: 393872 - DNA, 591 bp, Cannabis indica
aataaaaaataaaaaaaattaacagctcgctacgtatgtaacattgctaaactggcttgaaccatgaaggaagatggaaatgataagtgcgctagaaatgataagtgtgctttggtgtgcttattcacctgtattctctttttctattctaaattaatgtttgtgggcaatttttaactttctcaagaatatgtgaaattccacaaaataacccttaatttatcggataattataattatacaatattttcatagtttcttaccaatataactttatatccattcaaaaagtttttattttaatttaaatttttttctgctttatgttttttctactacttcctttctctctcattttcactagcaataacctctttctttccatgaaaaattctctggagcttagtggtggtggtttcgctactagtaggggtgttcacaaagtatctgatttaatctaatccgcacgatccaatccaatccaatccgcaaaatgcagataaccgcacttgtgcggattggattagattgaaaaatctaaaatccgcacttgtgcggattgaatgttgtttgacctcaaaaagtaaccga

SEQ ID NO: 393873 - DNA, 626 bp, Cannabis indica
cgaatcatttaaatttataatctatttttcatattatatattttaccatttataaatatctcaattttatataaatttataatcatttttttatattatatattttaccatttataaatatctcacttttattacttgatattttaatctttttgatatatttgttttttgttaggattttttaatatatattttttaaggatctttttaatatattttaaattacctttaatatatatgtaatattatcattaattagctttatttatgtgagtacatgtatgttttgatttcatatcccgtagattagctaatcagttacattttagttttttcctttttttttaacaaaagttatattcctttagtataaatacatatatactgcaaggcacgcatgcttaattttatattaggtgctatataattaaattataaataatataaaaaataattatgtataatttattttattattatagtctaattaaattcttttaatataaaagtgattaagacaataaaaagtaatacaattattttgtaaagttttatttatatatatatatttaatacatgtaaataattaattcaatattttatcattctttataaaaatgtatctt

SEQ ID NO: 393874 - DNA, 676 bp, Cannabis indica
catttagtaaaaaaaaaaattaagctgtgattaaaaatttgtcatgaaaagtaactatttttcataatatgcttcaaatctaaaaaccaatctcaaaagtagattccaaagagctacttatgatcaagtcgtccaaaattaatgagcaaaaatctcactatctttagggtgctaactgaaagtccacaattaacaatatgtaaaaaaaatttataccatttatatcatatatacatttaaagttgtactttatgttttctaatgccaaccccaatgctaactaccttaatggctgtattattattttttaattagaatattaataaactaatcaattgaagaaaaaagaaagtgggcagcggtgatcaacaggagcaacccaccttaggagcaacccaccttatatttaaagttgaaaagttaatatttttctgacatttaatctcattttctgacaactacttctcaatagcaacagcattggagttgcactaaaacttggaaattgtggggtccacatggattcttaattggttgttcattttcaaaaattgattcaagactaatttaaaatatgtgacgtgttaattacaaccttctattataacatctagttatcttttatatttgaaattgcgtgacgaaatatttttttttcatggcggtattcgttata

SEQ ID NO: 393875 - DNA, 825 bp, Cannabis indica
tacgctacaatagatgctctaaactccttcttcattttattttttttttttaaaaaaaaatcactattcatgctctacatttataggatacttttcattgctctaaatatattttattaattattttggcttttaataattatttttatatgaggatatgtgtatatattaatattatatatttgaaaggattatttgtgttgaaacttgcttaaatttttgattttatacactaaatccttttatttttttttgtggcgaaattcctttatgtttatttttctttgtaaatttaaggtgccaactgcatctcacattaaatatcaattgaattattattgcattgccttcaaagtttactttcaggtatacacaggtgtacatagtggtcatctagttggtatttagcggtgatatttaattgatgtctcaaatttataaggaaaaatagacttaaagggatatttccacacaaaaaaaaaagataagttgttaagtgtataaaaattaaaatatataaggctttgaccgctattttatttgaaatgaataaagtataataaattttaaaaaagttagattttggtgattattttaaaaaagcgggtaaatactattttggactctgtattttgcaaaagttactaattggaccctaggttttgttaaatgacaaaataaaccctgtattttttaaaattttacgaataggactctaaactgattttttgtcaaaataaaacttaataataatctgatttaaagatgttataataaaattagttacatttcctgtatgtgctcgtgttagaaattatcttaaag

SEQ ID NO: 393876 - DNA, 811 bp, Cannabis indica
cgtagcacgtgttattttcactactatataataaatatttaaataaattttagtaaaaaaaatttattatagtcttttaatcaaaacaactttttccaaaaattgagttgtacctgttttagcttttagtcattatgagttgtcaaaaaaaattactaaatagtcattgtgtctatcatttatattagaaaaattttattactcatgcttaataatggtgtaggtgttttaaaataccaatttaaaaaatataggaaaattatactccaaaaattcttaaactcaaaatagtctccccattcaaaaagtctttttctttctattttccctctttgtcagtgaactctccctctctctctctctctaaatctcactaagaatatccaccaccaccggctccaccacccccactagacataacccacttgaaacctaggcaccctgacgagacccacgacctccgacgacgaaatctcaaccatgaaaaccagagagtcgcacaacgaaatcgcgaaacccaacaaaatcgagaaacgcacaacaaaattactaagaagaaagtatatttctaaacctttacttgattttaaatgggtttttgatcttaaatgcttgattgttaggaatttttttttgtttcgggttgagttttcatgtttacgattcaagatctgcaattttgcttgttatcaacatttggtgactatgttcgtgacgtttattgatttcttttctagatacagcaaaatgtagtagttgtttgttttttgcgatgtcaatctgcgacatgtttagtcttgatactatctaa

SEQ ID NO: 393877 - DNA, 607 bp, Cannabis indica
ggtttgagaaatttattggtctgattttatttctaatagtcaaaaattcattatattggtttggttcaaaaaatatgaaaatttggactaaaccaatccatgaacacccctaacaaaaaatctactacaaagttttgtccaaaagaaaattactactaatgggtgggattaaaccttcactttctcctatgcaatttttttattattattaaattcttatatgcaattttgggcatgttaaatatttattattgtgaagataagaagatagttattgcttttaaatatatttatagctttctaaaactaatttctttatatacaaaaaaaaaaaatagttttcaaaattagagaagtttttttcttattttttctgattctataagctaaaagcacttttatttaagttttgttaaaacctaaaccgaacatatgtctatgacgaaggttgaaaaacagagttataatcctcttttttttttttttgtttgagcatagtattacgtctttttgttctataattttagttgtacattttatttaattattcacatagattaatgaggaggatcaaaaaaagagtgtccagtttgtaatattgcaacta

SEQ ID NO: 393878 - DNA, 529 bp, Cannabis indica
ttattgttgttttgattaggggtgttcataaaaaccgaaaaaccgaaaccgaccatcaaaccgaccagaccgtaaccgaattttcggttccacgtcatcaccgaatttggcggtcggtttcggtttcggtttttttgacacggcggtcggtttcggttcttgaaataaaaaaatagtttaaccaaaaaaccgtcaaaaccgccaaaaaccgcccaaaaccgccaaaaaccgcctaaaaccgccaaaaaccgcccaaaaccgccaaaaaccgcctaaaaccgccaaaccgaaaaccgccaaaaaccgtacggtcggttttatacggttataatttctaaacggtcggttacggttttcgtaaaataaaaaccgtaaccgtccggtcggttataaaattttaaaaaccgaccataaccgaccgattttcacccctagttttgatgttatttttatgtagtttttttgttattttcgtgttgtttttatgaaaaactgcaaaaatcaaaaaaaaaaaaaataactgtaaaca

SEQ ID NO: 393879 - DNA, 2521 bp, Cannabis indica
cactatataaaactaattattttaaaattaaaacaaaaccattccttaccttaagctttcccttttcaaaaatttactatcctttactacaagagattgaataactaggttttgagttgaaaattgaagaaaatcagttagtgggggtgacggtttcgttgcactgaaagaggaagagtttgctcattaagtttttagtttttagaacatgatatatatataatatatatatatatattaaactggtaagaataacattattattaataatgtaataaaaataataatataatattaataaaattttattattaatagttatcttattatttcttactcattaagaaatttttaattttagggtatttggtaaacttcgagtaccccgaaatactctagtatttctaaaattaacttatctcaatgttgaccttgaagagtgatcaaccgacagtgaagtcgtatagatctaatgcttgccttgtgtgtgcagaaataagaataagaaacaatagacaacaggatttattatagaggctcaacccccttgtgatagtgggtaatgacttactcccattttagttgtattataccaagagaattactatccagattgctataggtgggatctgctatagtaccctttaggattataatatatgaattagtgtctggcagaacttaagtgttggacaacctagggttttgtgcagcctaggcttgggcatgtgagagagtgaggaagagagagagagagtctgccacatagagaatatgagatttctagcttagttgacgcctaggcaacttaggtttttagctagaggttaaggcctttataaaggaggcctaaaccctaggtatacaacttaaatcccttgaaaataggatatttagctagatactttcaaaagaccaaaatgcccttagaatctaaatacttctcagtctgtctgttgggcttttagggcccgattcgtagcccattcatgttgtgcatgtgtaggagagtcttgtgggacctacagtgcaatccttggctggccaggttggttggatctgatgttttttcctggcctggcttaccataaattatgggctaggagtggcgaactagctcttaagagcgggttggactgtcatttgatcctcgtttgagtaccagtgtctttgtttgctcagatgctgatttggccttccttttagtgagctatactaccacgtggcatagcatctatcaacataagcatgtcacatcatgaggaaaaaaaattgggataacatttgccccctaagtccccatgcagacgtccgtacggatagggactttaccaacaagattaatgttgtcaagactacagttagttttgctgaataaatagtagtgcgtgcgtcgaagcaatttatcttgattgtttgatcttattgcaatagagaaataactcctttctgagcctttatgatgagttggtgaagtatgtgagaaaaagggggcccacatgtacataagtgagttttgggggaaaccattttctcacttacatttttcacttttactttctctcactagaatttggctcttgaaaatgctccttctctctacgtgaccaaacctctaggcttcaatctccttgagatttttgcattatttcaacgatctaatcttctaatctttgtcttcatcggactctagttgcgggtaagctttcttttccctctcttttacttaatatgaatgattttgccatgaatgcatgaacattatttcttatttggaatatgatttgattcttacattagattgtaatccattcagtattttgatttgtatggtagccttagaatgaataatgagtgatttatatatgaaaaagaactcaatttgacctttgttgtgattcatggctctttgagtcgcgaagaacacaaagaacatgtttgagttattgaaaaatcacatgttttgatccatgcacatgctggccggccaaggaggctttatttgaagcctggacggcaatgggtggctttcatggggtctggccagccatggggactgtgcccctaggctggctggtgaatgcctggaactagggttccttgcaaacctttaagctaggtcttgggatctagccagcctctaggacgtggaacccttgctagccaaggtcaaggctccaaggagcagccagtttttctctttggaccacatttacagtgttatagcgaccttggaggcatatacaaatgttgcattatgggtggtttctattggaaactctatataagggtagataatgagtccgttatagttaattgtgcaacttaggactctttgtgtgtctttacaatcgtgacgaagatgatactttgtcattggtgaaccttgtaccctttgtttttcctagaagatgtcattgagtgtgtaaagcccgcttagtttaatttggaaattagcagttaattatgattaattatgaaaattatttatagctatttaaataatttattatgctgttat

SEQ ID NO: 393880 - DNA, 1529 bp, Cannabis indica
gtacaacaactcaatatacaaataacttcaaatataaatgtattatatattgtcttaatgtaaacaacttatatataaataaaacttataagcatatataaaagtgagacttatataatcagtggatattttaggtaatataataaataagttgtaatattgagaaaaaataaagagttatatatattaatgaaaaaatctttcagtaaccgtaaaaaactttgttttatacataataatgaaaaccccctaaaatcatttatatagataatttgaccctcttaaaagagtaaataaaagaaaatagtctggcattttatctttagaacctgtataaatgaactaaattaatttaaaactgtagaaaataaaggcaaagattaattgataactcccaaaaataagaaaaataactaacgaaagattaaaataataatatatatgattatagaaatattttgaaagctattaaattaagctgctggaaaattactaaaaagagagatattctcacatattccatataaaacaaaattaaataaaagaaatattgcaaaataaatacacagaagaaacaaattacgaaacttacgctattaagaaattaagcttccaattccctttcttcaatctgaccgtaaggccaccactctccgactaccaataccactcagtcatatgaagcacaactccaaccaacactcatcatcgtcaaagtttgagacgatagaatttatattagaaatttaaaacatttaatggaccaaagatgcaaacactttaatacacaagacaaataacaaatcttaaaaacatacatagtaaaagaagaaaaacacagtaaggaaagagttttcattaagagagatgagcgccagcactgggaaaaggaatccattttatcatcatcgacaaccatctataaacatggctggacttgatgtcaagattaggaagttaggatgtttgttagttgttagttatgacagttgtctactgttataacggcctaattctcttttataccttggttaaatgtcggttagctattcagtatatgaaccattataattcattttctaattcaattagtaagaacataacagaggaataacagagtattaactctgcttctctcttcttcttctccaatatctccgtttctcatatggtatcaacagaaatcctagccaactcttcaatggcaaggccctccacacgctcccaggatggtgttcctccacctacaactgagcacaatccatcgaaatccattcccaattccacttccgcaccagcagccaacattccagttgttcctcgtcgaaatccaagctccagatctaggtctcaaaatgaggaagaacacgaactagtgtaatcttctcctactcctccagctgacaatgcaactgaacccactcgaaagtctattcttgatcgactggctcacgaagacatctccagcccgttctttctcagttcagccgaccatctaggcctcattcttgtttccaccgtcctcaatg

SEQ ID NO: 393881 - DNA, 521 bp, Cannabis indica
aaaagcatgaaatttgatggcataccaaccaaatttcgcagagagagtaatagatcgatatatgtatttcaaatctgtacatgtacctagctggccaaatataattcatggaaagtccacctcaacttcccatactcggatactcccttcccatatatgccttaccaattaattatatagatcagcagtaagattcatttcatcctcaaggtgtactatataaatatatgagtaaattacggcacaatcactaatacttttatttggctaacaattaatttctaaaatctaagcaaaatctcctaaaacccgcattctgttagtaattaatcactaatactttctttgtttaatttgggttcgtttgttttagtggagatgatgaaacttaggtggcgtttggttggaggtaatgaaatgaaatggaatggaaagaaaataattttcatttcattcctttgtttggttgcattttaaagtattagaatggcattccaatggaatgctctttccaccatttt

SEQ ID NO: 393882 - DNA, 1076 bp, Cannabis indica
caataatctaccgttttttctttaatttggtttttatttttgtagtgactaagaaacattgagactacaattagacttaatgcgtcatattcaaactacatttatagtaatatttccaagtatattaatagtaaatacagaaaatcaatatcagaaaaaaatttagtacacatgtgatttcgtatccaagagtttttactctataatcgcctctattgtagatttttaagaatatttataaatttttataaaattctaaatagttacagtgttaaaaataaagtttaaagtttaaacagtttcttactatacgtataaaaaaaataattacacatataacaaataattaaatatttttttataattaaaactatttagaatttttaaaaatttacaagtgattctaaataattacaacatcgattataaaataaaaattagacccaaaacctcttctgaatgccaaactcttttgcttttatctcttgctaaatattgggctcctaacgagggataaaagagtttttcttttgtttttttttaattaattaggttgttgtttaaaaaaaaaaaactaggttgttggtactttcattggatatttctagagattgtaactcttattgcctactaaggaagctttccctaagttctgttggtttcatttttgttaaagaggtggagcctcctgtttccactattaatgttcgttgtttagttttagttctataattaagtttttgaggttgataaaagaaatagtatttttcatcgtttagccattctttaccatagtatttgtagatatctattcttgcccgttcctcttcttgttcatctttcctcctttggtacatgttagtttatcatgatgatctcctcgtgtaatgaagttttgtatacatatataataaatgattcaatattcaccgtttttcttagctaacattatttatatcgaaagggttaataataggaagaaaaattagggtttccgatttctaaatttatacctatcagaggttgttcttttttttctctagcccttgtaacgccctaatgctaaggcacgctac

SEQ ID NO: 393883 - DNA, 1062 bp, Cannabis indica
tatataatataaaaaaaaattcttttatgtaaaggtaactaaatggtttcttatcaatactattagcaaccaagtaaaaaaaaaaataaaaaagtcaaaaaatgttagatttaactgatgtgacatgttggtagtaaatattattattgtatgttaagtataaaaaaaaatatatattgttgtaaattttccttatctttatgtgctaggatggaaatgaccccaaataaaataagttaaataaatgtttcttttttcaaaagtttaacaaaatagaaaaatataatgaattagataataaaaattatataaatactgtgaattttttaaaaaattaacatatcaataaagttatactatgtaaatttgttaatattttatataatttattataattacaatgaataaatatattattattaaatatatacattgtatatataataatatttgatatattatagcacaaaaaattaatatatcaacaaaaagattatttctttacaaattttaaatggtgatatttacttacgtagtagtttattattgggttgtttactataatttgtcgtacctttattcctcaatcttagtataatcaaccacctcaacactgcattcaacaacagacgtgtacaacttggaatacgttaactaatcaaatctcatcgcgtgactatcttctttcacatttttaactcacttttgaacgttgttattaggtattagtggtaccttgatgtagcgtcttcaggggtgaacccacatagagactaggaggcgaataaaatatatatatatatattttagttagttacaaaatatatttataattaaaagtaatatatttaagagtaatttgcgacataacctctttaagtggtcagaatttttgcaactaaccccaattctaaaattttggcagtaaaatcccctaaactcgtgttctgttagcagtttaatattttcatctattttaagccgttaactgccatggtggaatgtctacgtgtacacagtgtacacgtggcacaattttattggtccacgtaaataaatatt

SEQ ID NO: 393884 - DNA, 808 bp, Cannabis indica
aaaaaataaaccaaaatattctacactaatcgtataaccctcacatatataataaaaaaaaacatttacacctaaccataatactctatttttaatctctttctgtatatatttactaataattcatgatttttgtgataattaactgattattcagcataattctttaataattcatgaggtatatttgttatgtaacttcttttcttgagcaagtgcttatgtttcggtcttataaagctatattgatgaagagtgatcgtaatcaaagttactataattataacatttttttctcttaattgtatacagtatatcactcaattattctctaatcattaatttgtatcgatacatatatatgggaaatttttatatatatacattatatacattaatattacagaaaaaacgttaaatgaaaacaatccatgtgtatgccgtgacacgtcatcaagcttaccgtgattagcttcaataattttggaaccaccggcgatgaaggagacgcgcccacaattccatatttctcggccatctctgcgcgtggttctactgtttaaaacagaaagctataaataccgtaggaataatacacgaaaacgaaaaacagaaaccaaaccaaccttgaacgaaaaaacaccattgacggaaaaatacagatctcgacgaatctgaaaattagagaatcgatcatcatatctctcaaaactgttgctgtatacaacaagcaaatcatcgtctctctaattcgacctacaattcaatcgatcaataaacctatgagctgatcacaacaaacaaaaaa

SEQ ID NO: 393885 - DNA, 1114 bp, Cannabis indica
ttgaattctctcttcccagtcctcgcgtacaagagctcgatcttccttcactgcctacctacatctatctacatgttaaagctttgtaactttcttaaaacaaagacaccatcccattatacaaaatggcctctggtttgatcaaaaaggaatacacatatgcatagtatgcatagataacattatctacatttcaaagttttgccttttcctaaaacactcaactcattgaaaaatttgatcttgggtttatatattcacataacaaagaatgtatattttcatagccaaaagatatgtgtgtgagaaaaatagatataaacaatcatcaacccactaaacaaaagtgagaagtggtaacatcagcctcttatttcaacttttttttcaatttccacacccaaaaacatatgccaatttttttattttctttcttatcatcgttatagttacaacaccattctaataaatttttaaatagttttctgtaccaaaaacagaatttatgatattttagtttaatacgagtcattcaaatttgttttcgagattgtatactgtgaaatagttttacagctataataaataccgccagccatgcatatagatttaaaattgaggttgagaaagacattgaaattggaggttgcaattaccactcaaattgcatacaatttttacacataaagtgtattcaattgcatgttgcaaggtattaagtaaaattacataacatagatttatattattacctaagccaacactaacacatcacagataatcatcaaaaacacataataatatatgtaaatatacagatataattgcactaaaaaaacacatattgtgaatatacatatatacatgtacatataatacacatatacatgtacatttgtacaccttgtgaaaatacatatacacaaatatacagatataattatactaaaaaacacaccttgtgaatctgagtaccacagagcaacctatcaacttcttctggagtccaaaccaaaggcaaagactcctcttggtaaggcgtgacactaaaataaggagcccaaggggatgagtggccgaggcttctctcgtacatgatggccacagcgagacc

SEQ ID NO: 393886 - DNA, 1108 bp, Cannabis indica
gagaagagagagagagagagagagagagaaagaagagcaattaaaaaagaggtagtagtagtgatgacaaattggagaggttgttgtgtaggagatgagagccacatttatggcaaaagtagagagagaatggactactgccatccccactcccacattagctcttctctttctctctctttctttctctctcagagtgctgtgcagttttgctgagtcatgcttaatacacacaccttttccttttcaaagacttcatttttatttattcaaaacaaaaaagatttgatttttatttattcaaaacaaataaagttttcatttttatattgagttttctctttctctttctatttcatcaaccccaatgtttcgcgataaaataaagtataaacaattgggaaaagaatgaatgaatgaataaagtttgtttggtcaccgagaaaactacctgactgaacttaactgttatatattgaaacgttataaaataaatcatataactcataaaaattaaatatgaccaccgcccccaacatatgaaccatatactttctgtttggttcccgggaaactctgctttttttctttactatctcatacatacgttacaatttgttgtttagtataaagaaaagtgatggtgtttgttgttaagaagacaagtgtaaaataatatttcattcaatttactatttttaagttgtttttatctaaagctaatcaattacataaaataaatttatcattatttattctccaataaattcacaaataattaatcatccacaattaccaattctttactgtaaatagtaataataaaaaaaatgatataactcaaaatattaattaaaaatttgttacaaaaattaactaggttaaaaataataatattatgtgaattcaaaatatgaatatatgttatctaaatgaaagattgttgaattaaaaattttagtgtgaatgtgctatcataaaattgtgatataaatttaaatgattaattatgttatggatataaaaaagatattaaattgtcatgagtgtagatatcataaattaatttataatttgttgagcgatcaaattataaatacccaaaact

SEQ ID NO: 393887 - DNA, 974 bp, Cannabis indica
gtattttgcacatatttaataaacaaaattaagtgccaatgaaaaatataatatcaaataaataaataattttcacttgacatgtcaatttcttatcacaatgaattgacataagtttcatattaattaataacaaatatatagacaaagaagaaaaaatagtaatgacaatacaaaatatattggaaaatatacaattatttcaccatcttacataattactacaataattttgtatttatacaaaacaagtaaatattactttgaatctcggttaatttttggtcaaaataaaatttaataaattagaggtattatgaccaaggctgacccggaggtagaaatcagtcataagtaaaaaaaaaaaaattggactcttatcataaagataaatagtatttttaaaaattataaaaaatatgtattttttaaaaaatatttttttatttggacccctaaaataaatggaccctaatcgtggacctatcccgtcttagcctaaggccggccctgattatgactccaattggctacataatttctatctgatcgcgttgaaaattagtttcagattgattatattttatattatatattgagtttttttttttaaaaaaaaaagttatatatattgagttctggtgttattttttaccattttaaaaaatataaagtccattatttcatttaagaaaataaaaaatctaccaatgctttcacaaaatacaaaatttaaaatatagtatttattgatggtaaacttttctagtttttctaattaacgtgatttgaagggaaaataataataattaggtaaatgaaaataataataccctcaaaacttattagtcgttccttaaagaataattaacttttttagtccctgtacttatgacactatactatgatgccccttaatttataagtgtagttaaaaataccccctaaaatatatcagttggaatagtataatc

SEQ ID NO: 393888 - DNA, 994 bp, Cannabis indica
gtatatttatatatgaaaatagaggatattctacattcatttaagattgttcatgtatatatttaaagattcatattaatctaataatgcatcaatatattttccaaaaaaaaaaaaataatgcatcaataatgctatatgtggcacttgacactttaaagtcatctcttagcatttctcttacatttagggtattttagttgagagaaataaaaacacatgaataaattgtaaatgagaataaaaacaaaaataaaataaaataaaatttaaaatacacaaaaaataataaaaaaattattaaattttttctcatcttaaattagaataaatccttttattttaaaatagaagtattattccaccaaattcaatggtaaaatgacattataatacttaaaaatataaccaaacaaaaaatagaacaaaaatcaattcattttcatttcatttaattacctttaactaaaccccatctaaaataaaaggttgaaataatgctatacgagaccaaaaaaaaaagaaaaagaaaaaaactcaaggcaaacaaaagtgaatgaaaaagtttaatggaatacggcaataccactaaaacgacaactttatatgcaattggatattcattattcactcaataacataaaatgagaagaaaagacaacttcatactcaattggataatcaaatcaataaaccaaagtgagactaaaaaacacattggccactagctagctaacataagattatttattcattatttaaatgggagatcagaaatcaaatttttttataattatttagctctcatgttttgattaaacaatgatatagaaaagtccaaaattaatagacagatagatactaactttatgcaagcctaaaatatcgttttataaataccattttggaccctatgttttacaaaagttactaattagattctctgttttgttaaatgacaaaatggacactgtattttctaaaatagtacaaa

SEQ ID NO: 393889 - DNA, 594 bp, Cannabis indica
tatgacttgttacaataatttttaacacttttatcatgtttgacatttcctaagagaaaatatacatgaaagcgtgcactgcaactttcttttatttcttcattaaaattgaacaatcatgtacaaggttatgtgaacaaagaaggggattaacatacattcaaattttctccatctattatatataaaataaaattaatataaattaataaaaataaaataaaaatgaaaatgaactccatcaaattctagtacatacataccttaatagatcatcatggatgagcaactaaattattctcctttgatcaaaagaagcaaaagtgtagtttgaaatgttggtacgttcacttagtatttttttccctaaaatttacattttatactaattttgtgtgactattatagtatatcattaatgttagatctaactgattttttaagactcgtttgatactatgttcctagaggctctggtacttaagctgacgtggagacttcactcaaagaggagttggttaagttagttattttctaactaacttaacaatctcgtttcttgcaaccactgactttaggatcttgatcctaaga

SEQ ID NO: 393890 - DNA, 534 bp, Cannabis indica
aaattattaataataatataacttggtaaaaatgtatatttagttattcaatgtggatttaataaaaatttaactttaattttctttaaaaataaattgaaaatattttaaaatttaatttttattataaattaaaaaaactatatataaatagtgtattttctaataaaattctaaatctatcattttctcagtgagtcaacatgaacatgacataattttttacgggccaagttagggttaagaaaattagacgctgatcaaaaataaattgacacgcctgacacaaaatatagaagtaaatcaaataaaatataacacaaactcgacacgttttgccaccagtacttaagatcacatttattttcactttttcacaaatttttttttacctttttatagattttttcttttatttcacatgcgtataaaataaaagagtctcgagtgctgttctatttgaactttatttttcagcgtgtcaaattttctcgaatctctcaaaatttcacataatatcttaaataactacaa

SEQ ID NO: 393891 - DNA, 1129 bp, Cannabis indica
catacagtaatctttttttttcccttttttttttttaggctaggattcccacctaagcttacaattataagtaactcgaacatcatatctagtaggagcaccattcgaactatccctattgaaagaataaaaaagagaaacatatttcagaactccactgccttgacatgtcaccaagcttcctctctataacatcttcctaattacccactacagagtattttgacagttaaaatagtagatcgtggacatagaaatccctcttatgcatgtttctctaaagttcaaaaatgaaataattaatagaaagaccacaggaaatacagaagagcaagttgagaaacggaaaacattagtattaagacaaaacctctatcaaaattgccaggtcaaccaccaagcttgtgacatatcccaagacaaggccaatgacacctcttgcaactgatgatgatccaatgtctacatcaatctgcaaaatagacggttaagctgtcgttttctgcaatttagtatcccatagaaaaaaaggacaagtttgattgggaaaactggtgagacattaatcccacagcaaggaggcatgaaagtcattttacttcagcagcaaaagggccaaagtaaatgtttctgtaaaactcagaacttaacacttctctagttaatgtaaaaataatcaagaaataaataacacttcacgtaacatacctccataaaattgtcttgtttaaaatatttgcaagtgactgctttccccagtaagcaagcttttgtgcctacagcacgcttgaccatccaatatcccttaccattgattaagacattaaccgagtcaactctatgtagtaaaataaaaacatatctaaggcacaaacaccttggagatagttaactttatctgactagtacctctacaatacttggaatcagtttaaatcttgcatcgcggaacatgtcactaccatccacgaatttagccaacaaggaatttttattcagaggcctatcagcagcatagtaaagcaccagactgtagtttggttttgcagggacctgtaatataaaccagataaatatttaaaccatgatttctcagaagagatcttgttagcacaaaaaatccttaaaa

SEQ ID NO: 393892 - DNA, 664 bp, Cannabis indica
gtgggacaatgttctccaatacacatcactctatggctcttataagcacataaacgagtgttttagatgctacagacgttggtagaaaagctggaattaaaatccatttaagtcggaaaaatgcactccaggtgatatgtcgcccgatacttttttagcatacacaattttaaatttttgtaactccttcaacccaacttaattctcaacgtttttctactcatttgtgtaatgataattttgatttccatattcatttgtgtaatatctcacttaattatccacttaaaattgtgataaagtgttacaaattagttactaagttgtcctatttttatgttactttgaacatattttaccgtacatataatagatattaacctcacattatataattaatataacacaaatactacatacacacttaaatgctatattgctctaaaatcaaaaataaaaataaacaaaattatgaaaattgatatgaatttctctctatggttgaatcgcaatatctggactgaaaaactgaaataagaaggaagatgttaatgcaaaacatgggggcattgtttatttaatccaactctcaacaaaattaaggagataattgttgaccgagattttcggcaactattaaatataattataatattgagctgta

SEQ ID NO: 393893 - DNA, 1930 bp, Cannabis indica
tctctctctctctctcttgtacaaccccaaggggctctctgctcctctctctcactcgcctctaaggctatacctctctctcattagtgattttcctacttgatccatgctttgtaaccttatagagagctatatcagatcccacctatagtgatgtgaatagtattatctctaggtatcaatacaaccaaaaggggagtaggtcattaccctctaactaagggggtcgaacctcgataaaaatccatatcttatttactttattttacttgttgtgtaacacatggaaaacatcagattaatacgaccctactgtcggttggcccttttcagaggtcaatagtcttgtgctttaattgagagcgagttgatatcatatctgatcaaacaccatggttaacatgagaagaactctagttacaccatctacatcgtcaggccttcctcaagacccatgggttgcagatcctgatgtccatgttccaaccacaactggaattcccatgaacacagtagatgtggttaatcttgccaccatagtaggcaccacgaatctggacactacaattggccaggatgccataaacatcttggtagatctgaacaatttgcccctgcctttaagggaggaccctccacaggcgcctccaactgaaggaagaatccttgggggcacccccatgaacaaaaattgggtttcatccatgatactatgcaggagagacaagaccaagaattggcgagccccatgtggacttgggagaagatctcgagttagctagacttagagaggtcgtttgccaagctagcctaattgaagaaccatgcgatgttgattgcgatgtattcacttaagagagacgtaaattccttgaagaagcatgtgatgttgcttacgatgcacttactcaacagagacgcaaattcctaagatggatggatgacctagaatacatcctttgatctcgccaagcggagttacatggctgcaatagagaggctaacgatctgataaggtagttcaactaaaggagcagtgtaagaggccaggatctcgtcaaagatccacttcaaggaagactagttgatagattagggagggtctatcgataagctgaccaacttggcccctcagggagtaggacagatcctcccttgttagagggaggacaaaccttgcctcaaaggtctaacagggagaacaaccagatcctgacaaccagtggcatggggggccaaccaaggatctcaagctcagtaatagccccgctatccatcctgtggctagccaaccaccagcagaagttcccatggctagctagacgcctccaaaagtccctatggccaaccagagaggagcactccctccccgaggggaagagtcacccaaaaatcaattttccactgacaaggaatgagagcgtgtggaaacattcaaaataaaaatttgagaagtaaaattaatcactttagacagttggatccaccaaactccagtacttggtgtgatttacctcatgttaatgcacaaactccactagccaggcagagaagtgtgggcggccaggccctacctagcttacagttggctggccatgtacaagtacgaaactcagggctggctggccttgagtataccctctcctagggtatggccaactaggctttgggcaatccaaggctgcagctcgttcaagaagggccaatcaacgaggcctctacagcaacagattcttttacgcaagcacagttagatcagatacgagacatgctcaaaggcctagctggtccaaatccttcagagcttgagctagacaggacaaggggaccaccattctcgatatatataaatgccttgcccttgtctaaattcaagatgccgacttggaagatgtacacggggaaagaagatcccctagtacacctagaa

SEQ ID NO: 393894 - DNA, 755 bp, Cannabis indica
tacctcttagatacttggcacttaacaccttacaacacagtgaatgatcctcattaaggagagcccagccccacttagcccgcaacgcctaattgatttttaaagtcttcgaaaatccaagctcaccttggaatttaggaaggcacaaatgatcccaagcctctaaatagataccataattgccttgctcacaactccaccaaaagtccttaaccataccaaggcgagtttcttagacagctttgtggtttgcatagtgtaaactggtaaagaaggccaaccaattcgatcaaagtagcacggttaactttgtacaaagatttcaacttccacatgtgaagctacaagactaggttatccagaatgaagttaaaatctacatccttattgtgagtcctaaacaacagtagcctaggtaattaatgttaccaatggcgttgtcgaggccaagctcctactttatacctcgtttcataccctcaatagtattattgctgaagaaaatagaggttttaagtttatttattcattggccagaccaatcacaaaatttctccaaatactgtcaaacacccttagcttcctccatcgtggccctacctacaaggattagatcatcaacaaagaagagatgagatagtcgggatccattctagctcaacttaatacctctaatggatcaaatttccaaggcgttattaagaatactcgagaggatatcagcagcccagataaaaagtgttgggttttatgcc

SEQ ID NO: 393895 - DNA, 575 bp, Cannabis indica
aataataataataaattaaattaattaacgaagaaagacttacaagtaataatatatagaagaaaatcgtatcactcgaccaagaactataaatatatttatatatatatcatcattgatgatcatcaagttgttaattatagcaaattaactagctagggtttatcattaatctgagcataatgactgataaccaacaaccaattacaccccttcctaagggaaaccaatcatttgttcctcaaactgatcaaattgatcaaaattcttcttcaccaactacaatcatgccaaaaggttaccaatcattcaccatgcagaatccgtcgccgccgccacaagagacaccaactgcaaacttgggctcaccagtgattatggccaatccagctcagtccatgaccaccccatttgtcacctctggtagttttctattatatttttgaatttttaagagtatatatacatgtgggaattatttaatcaatactaatattgtattttttttttgtttgaaattatatttatatgattttggttctatacagtaaaattagtcataaataaagcacatt

SEQ ID NO: 393896 - DNA, 1152 bp, Cannabis indica
cgtgtctaatagaaaagtgatgcgcaacagtcttagctttttcctattaaatttcataatttttcgagatgtgtaaggtgagattttaagagaacactaacgagtgtaagagtaaggaaaaaaattgttaaaatttaccctaaacagataaatattttcaatttctgaattagggggttattttagccaaatttaacgcgaagccaatctttatattcacgtcttagtagtacgaattcaatgtgactagtgagaaaaaatattacgagatggatccgggccacatttcataaaggggtaccactatcagaaatttgagatttttattattttgattaaaatgattgttagtgcttgaaaattactttttcactcaaagtgtctaatagaaaagtgatgcacaacgatcttggctttatccatgtgaaatgtcacgatttttcaagatgtgtagggtgagtttttaagagaacactaacgagtgtaagagtaagggaaaaactttttaaaatttaccctcaaaagaagaatattttcaatttttgaattagggggttatttaaaccaaatttaacgcggaaacaattttcatattcatgtcttagtagtacaaattcattgtgactagattccgagacgggtccagaccgaatttcacaaagaggtaccactattaaaaatgtaagatatttactattcgataaaaataattgtaagtgcttaaaaattactttcctttcaaagtgtccaataggaaagtaatgcacaaccaatcattcaattttgcaaacaattttctcatgtaagactgattcatgactaatttattgtaattcaggagttaataaaaaaaaattatatagataatactctatttttaattttaaagtttatatttaaacgcttaaagcttttaaatttggttttaagtagtttaagttagttaaatagaataggaaaatttgattttctatacttagaaaatcttaaatttttttccctaaatacatacttaataatattggtaatatatgactacattcctaatatcccacaaatacccctcctatttgaaaaaaatcaaaaactgaaatcatccatggctgcctcccgaacctctctctcccatggctgcctcatcccgaccaccac

SEQ ID NO: 393897 - DNA, 1600 bp, Cannabis indica
tttctaattcattttgtaatagaaaaattacatgccgttttaataatataattaagcatgaatatttaattttacaaaaaatatatatctaatttttctattttttctattaaaataaaaataaaaatatctcaccttaaacaacatgcaaaacaaaatatttgacttattttagaaataagttaattatacatatattgatatataaataattaaattaatatatttattgtatttatatatcacgtaatacctattattaaattaatttagtataattagttaattaattatttaatttataaaaaaaataattcaaattaattatagttaaaatatttatttttttacacaagattaaatcttaagaaatatttagatacaacgagtgagacaatgggtgagaagtacaggtgagatacggtgatgataacgggtaagatacgataaaacaacaagtgagatatgatattgaatgatttgatataaaaataatgcattataggaaacactctaattttttcctacaccaacctatttaattttttttttttatcaagaaaaaaacttcattatcgaaccaagcaaatacaccctcaagtcccttccaaaaggaaagactcagctcacaacaattaattacaaatcaatctctcaagtgtaaccaactccattttggagcctttcctatttttgaacatgaacaatctatacttgacatccttctttatatccttaactaaactatttacagttttgagaaatttaagaagatacaattgtttctattcctccacaaatggtatattgttgcagccaagaacaccaccataattctccctatgaaatcggtctgcatacacccaatccacgtactccagctgccaaaattgttggaccaacctgaaaatcccagccacggaagcattcctacctgcacttgctgcgaaaaaatgtagcagaaaaataagtgttgatagctttctttagctaacccgcacactgcacagcttgtgttatccaccatgatctaaaacctcctcaattgatccctagttcgaagattcaaatgaaccacttgccacaaaataaagtcatgttttggaactatcaaactacaccaaataacattggtcgttgggtctattggctgctgcagggaagagttataaagctttgtcgctttcaatttatttccagaactagtagccacaatttctgcctaagaaaaatcatcccttaaccgacacaatttcttccaataccaacttttgtccaaactcaggttatacctccagaaattgatccctcttagatagacaacattaatccatttcacccacaagaggtcttttttgttcataagatcccaaacaaaatgagctagagagacctttttctatttggttccacctttaaaacctagaccaccaaaagctttaggaagacaaaccttttcccaacttgttgtgtgaattttaggacaattccccttcaacccccaaaggaaccttcgacaaagtttctcaatttcttttatcacactttgaggaagaaggaacaccctcatccaatagtttcttaggctaagcagagtaga

SEQ ID NO: 393898 - DNA, 1190 bp, Cannabis indica
tgtactgtgtgattgacccatttttttttaataactcgaccataagagtatgtttggtttgttatataggcgtgttattatagaattaaaatgacccattataatatttggtttggtttaaaaatgtcataggattacattgtaatggtgattatattatatattcaatatactaattcctattgttgtcactatttttgtaaagacaaaaaaaaaaaaatgatgatatattcactaactgacacaactcttaataaagttgatgtgatatgttagaaagtcttttaaataaagttgaagagataagacaagacaaatccgctgctaacggtttatgctttatttatgtctatcaatttattttcttccaaagcatttaggcgaataaaagataaacttcataagaacttataaataggactaagggattacattttaaagggacttttttctttctctcattggtattaagtctataaactgccaaattctagagagtaaacttgatcttgttcatcaatacaagtgactcattgattaaagtttattatctccctatccacttaaaaatctcatctcaaacatttttcaacactatcaaatccactcttcaatttttataattgtataatcagttggttgatgtaaaattacataacacttatttcactaagaaagttgtgctatgatgattacattggaaatgattatataaagaaaaagtaaaataactaacaacaaaccaaatatcatcgtaattaatttctagtattattcttattccatcacattgttattactattacgattatcattctattccataaactaaatatcacctacttatgttagctcactaggacgaacacttccaatctttttattataattggattataaatgtaatttttttttttaataacgttcattaatgaaagagatagttagattttatgatgattacaaataattttagttgcaatagttggcactttagccatacgaataatgttttgggcatacacccattttgtattttatgaacctcaaaattacaaaatccaatagcaaaaaaagagaaaattaccttttatatttttttttttatattgttctcttttatttttattctttttttttaaagtctattatttttactttttttttaaatattgtaccaattttacccc

SEQ ID NO: 393899 - DNA, 751 bp, Cannabis indica
gatctctaatgagatcctcgcctggtgagatcgaaagatgtgctcctagtcatccatccatctcaggaatttgcatctttgctgagcgagtgcgtcgcaatcagcagcgtgtggttctttaagggattcacatctctgcagagcaaacatattgaagtcagcaatgcatggttcttcaattaggccttcacagcctacaacttccctgagtctggccaactcaaggtcttttgccaagcccaggtgaggctcgctaattcttgatctcgtctctcctggatagtactgggggtgaaacccgattattgttcttggggggtgcccctaaggattcttccttcggtcggattcgccaatggtgggtctactcttggaggtatgggcctgcaacttggatccaccaggatgcttgtatcagccttattgtaacaccctaaataattaggcacgctacccaagtcacttattaagccctaatcccctaaacgggattactaataaaaatggcgcggaatttaaactttaataacaataggaatgaaaataaacttgtaatgccctaatcccaaaaaaaaatatttacaaaatattattacaagtccttttctttcagccggcctaagcggtaaaacagagtcaaaaaatacaacactggtagtgttgagttttgtgccctaaataaaacccatttcaatataatcagatttacttattaataaagatgagaaataacattttatgttgcatggtt

SEQ ID NO: 393900 - DNA, 627 bp, Cannabis indica
ccgtctctcctttctacgaacacatcttgtaaagcaatagcacagctttataaatgcgaagtatatttaattcattcccgatgtgggacttcttgatttttttccttttaaaataattgaaattattaaatttcggagtgcgtgcatgtttccttttagttataatttttttttaattataattaatacttttttaatttacaattttaaattatatagaagaataaggatgcgttagagtatttaaggtgttcataaaatactcaatctaatctaatttataaaacgcggatatatatatttgtacagattagattggattgaccaatctaaaattcgcacctatgcggatatatatatttgtatgtatattttttaaaaattatatatacaataaatatttgaatgtaaaaattaataattcaaaaatctaatatatataatataaatatatttcaaaacttagtagattaaatgtatattttattaatatttatatggaaaatataatcttaaataaaattaaacatttttttatatatacaatttttttctctttgaattttttattttttattttattatttaaatttgttgttagagacataaaacaacaacaatattttt

SEQ ID NO: 393901 - DNA, 492 bp, Cannabis indica
aaaaaccacacaatttcacttccaaacaatcaatcaacaaaaaaagggacagaaagagagttgaaaaattcattaatccttcaccatttttgttcatatcccatcattttactaaagttccaaaaaagaaaaaaatcaataactgagtttttagcacagacagtacttcattatgggtcacaaacctataaagttccactttcgaaaaaaaaatcatcaaaatgaataccaaattagacatttacagaattaaaagctaaaatttaccagcattgcagaggcggtctctacagtagtaccatcaacacgacgcatggtactggcatcggagtaaaactggtgaacatactccggctgttgctgaagcacttggtagtattgccccacaaagtacgttccaacctgaaacccataacaaccattagagacccaaaaacatattaacaaagatacacagagagagagagagaggaagaagaagaagaagaacct

SEQ ID NO: 393902 - DNA, 725 bp, Cannabis indica
tatacttaatttattttatgtttttggaaatatatataggaaatttagggggtctttcagtagcagctggtgggtggggtgctaactggattgtatttctgataacaaagttcaacattgggagtatatctgctactaagatcaacaatgtcggctttgctttcatctgtctttttcccatcgttggcgccatcattgccgactcttttgccggaaactttatcgtcatagccatctcttctatgatcgctttgctggtacgttattaacaattttaatggacaaagtttagtttagttattgcatgtcaaaacatatatgcagtaacagtcctttcactttcataaacgccttttgcacttatatattataaaatgaaagaaaacgtaattaaatctttttgtttgcaaagaaaacacagtcatatatatgataaggatatataattttacaaaggatttaattttttaattacaacatggttagcatgaaagccaaacaagtcagtaatatagaagcaatgtcctgaaagtgcatttaataatgcgtatatatgttttatattaaagtaaatatattcaaatccaaaggtgactttgtcgtcaacatatttttgtgtcttgccaaaaatttggtattacgctatgtgttggcaaaaaagattggcaaattaacattggtattaaaactttggccagcacaaaatgaaaagcgctgacaaaaat

SEQ ID NO: 393903 - DNA, 1331 bp, Cannabis indica
ctatcaccttcatctgcactctccacatctgtgaaattaacccgtttgataccaatcactgcatccattgattttgttttctggacatctacagtagaaacagggcctttcttacgaactttccacgccttcattgttgttggttgtcttccttgcaccttcgatcttgtttttgccatggcaacacctgagatagctgcaagaaccaggagctagagagaaaacttgatgccaattcgtctttacggtatatataaattaaaactaataaatattttatttaaataaatatataattcaaaaaaattattaaataataattaataatatgaataaatatttataaaccaatatgatatacatattcattttgaattagatgtttaggtttaaaaaagatctaataaccgattgagggagtctctcaaccacttggagagaatctctcaactactttgaatgaatatctcaaccaacttaaatatttttaactaacatttaaatttaaattcaaataaatatttatatttttaattaattagttaacccaaaaacaaatttaatggggacatccttacattagagacgcttatcactgtgtcttaccacagtataagtgacgccacacttttcttaacaagacaatggtggtgtctttttttagataacttttatcttttttcaaatttattttgttaataaatttaaacatatattatttattacaaaataaataatgactattttgacaaatcaaaaaagatttttctgaacatcaatatataacttctatccctacccttgaaaatattttaaggtagctattcgggaactatggacctataattctaaaactccaataaactagattacttattgaatctcataaatcaaataatcatgcttattaatttcatgattactccactataaatatagaattgaactcttggtaattatacaattatatttactcaattttattgttgtatccattgatataatcaattatagtgattaactctccttttgttagtttgtaattagttttagtcaaattactgttttaccctttaaattatttctttatccattagtaccagtaattcactagtgaaagtataattttgatcctacataaatttatgcacaactttttagttctagaattaacaattaaaggtaaccaacattcgatccattaggaaagttaggattctataataatagatcatgtttccagccatccatattattagattctcaaaatataaattgtataaatcatcttctttgaaaaacgttaacgagttaatcaaagaaattaataa

SEQ ID NO: 393904 - DNA, 1010 bp, Cannabis indica
aaaaataattggtaaaatggtctctaaaaaattatttttttagaactaattagggattttaggataacaaagttagagtaaaaagttaaattaatgttatgtttagggaaaaggaaataattgttaccaaaatatattggtcaactttctctccattcaaaaaaaaaaaaaaaaactttctctccaaacaaacaaaaaattgatatgaaattttaagtgtagttcaaaatttaaatgaaatgattaatttcctcaatacaaaggcacgtgcgcttcacgtgtttcagagcaaatcataaaaaagtggataatatatagttatatttatacaatattagtagttgagttattttttcattttattttttgagttattgataatgcaccataaaatatttattttctatgaaatatactaaggaagttctctctttaatttttaatgtgttatgtttcacatgtaattatattaaaaataatataaattatcattaacaacaaaaaaaaaaaaaaaagaataatataaattatgaaataagatttttttaagcaaaaggactactgtgttttttgttatttatttgtcaattcagccttaaattttttattttgcataatgttcactcttgagtttttgtatttaataaataatactgcaataattaggcctttctaattagttttttttctttttcaaaaaaaaataattttaaattttttatgaatagctttgatatatatatttttaatgtctgtataaaacaattcattcaaaagcccaaaaactataggaaagtgaatccataattttctcatgtgcatgctatgatataagttcttcacaacaattatataggcatatgaaaacttaagattaattaattattagagtacggctaattacaaccaacttttattataactacttagtcaatcttcatatttaaaattacaggatattttttttcaaattttttttcatagcagtatattataattacaatattatt

SEQ ID NO: 393905 - DNA, 845 bp, Cannabis indica
cccaatacttgggccggccctggatgtagctataggagatcagcaatctgttggtgctgcaactttcaagaacgatgatggggtcgtcacaagcatacacactactcacttgtagtataatgaccccttggctggtgaaatttcaactctttgctagggagccgaaactgcaaccacccgtgatctcaaaaactatcattttttaaaagcgattcagctggtgtgatgtctgcagttttaagtaaaagtcatgaaataccagccttgaatcacaatattcaggaattagttgtcaaattccatggtttagttagcaagcttaacatctgggaggctaattggataccaagaaagtacaattgtgtggcccatggtggctaaatgggcgatccgatcatgccaattcgggaatatcaatttttctaattttgacagctccttacttggttgcaaggcggatggttgatgcggcttttcccttttatattggtttttatgttttttcaatcacattgtctttgtttgctttcttttctttgactgtgtgtgttatagtgagatttctctcacctagaaactcgagaccagactcttatttagaggacacgtgtactcagatttccaatgaaagctgagacgtccgtgagagactcctcgaagtttaaacctcgcccaagatagagtcagcgagatactgcgagtacgaccaaagtctgatcgcataactataactcgtattatgcgggatgagagaatggatctaactcgcatgtatcaggatatgtgcgagtatcctctctatattcccgcataagcatagagtcgactctctataatgcgagttg

SEQ ID NO: 393906 - DNA, 1336 bp, Cannabis indica
agatactaagtgttcactttatttagttttagttacaacaagtatgtagactaaaaatacatttagtcacagaattgtaattttgtgactataccttttgtcacggatcttttagtcacaacataggaataataatttataattagtcacaaattttgttgtaactaaagtaagattttttgtagtgatttatatacccaaagcgagttcagggtgtgggatcgcgggtgactactacccaacccacattcgacccaggtatatagttttcaaactttcatgatagctttctaattactaaatattaaagttgccaatacttacaaagttgactattaatcttccctaatttattgcgtaataaaaactttttaatatgtagaatgtttgtttatattttaaagttaatatcttgctttttattttcattttgaattacattccattattttcttcttattattatttttttcaattttaataggtacccaataggtcctgatcatactcaatagggattctcctatcccgaatctattgaagattaattggggcggcaattgaatgggggtatacatggaaaatagagatagagttgagaggtgcattacccacttattacccattcaatttccatcagtactggtttgtttagctcactttttttagtttttaagagttttaattggaatattttcttataaattttggttagtttgtgccatttgttggttgttagttggtgccattttgtttttggctattttgttccatattatttggatatgttgcagtatgttgtagtttcgtttgcacgtggatacaacctcaaagagtgctattgaagattttcacatataagttttaaatcttacttttcaaatattttttaataattttgaaggaattttctttctatgttaatagtttcttataattttttgttaactaattggttgttgtcatttttttaaaactaggtaatttcaattagaatttgatttattaagtttgattaatctttcatatgtatggtgtactggttagtatatttctgccttggaagacttagctctaataattggacataccaaattagttttaatacaatagctagtgacatacagggaaataagaattctaagataagtttgtgttaaaatgataattgtgttttatccttagtttaaaatttacaatattatcattgtatagtgtgctaatccacttttatatctatttattttataggtagttttggtactattggttgcttacatcggatgactcttgaaggtggtctcaagttgttttgtctaaatttccgagataactt

SEQ ID NO: 393907 - DNA, 763 bp, Cannabis indica
tgttctagtttttggtgaattatactaagaagtttctgccgaaagtcattcctcctttagtggaaggaagttataaattaaattatgatttgatcgaaaagtatataaacaaaaaatacaactactaaaatagtatataatataaaaaaaattctattgttcacccttttgtttgtttcgttaagaagaattttagtaaaagttcatggtcgtacgctgtagtaagtacaccctttttttagggtactcgtataggatacatcctatatacttttagaaaattccaaaaaaacttgttaaagacaattctttaaagatgttataaatataacaaacactactattactgtgtataaaattaaaaaaaaaaaaatttaataaaatatcacaattaataatctttttattcttttcaaaaaaaaaaaacaatccttttatttaaattttgcatcccactggcgaaaattctaaggtccgccaccactgtcaatgggtgtattcttttcttgtttcatagtggattcacaagatattgatggtgtgcatgtatgtgtgttttgatatttaattacttttactaaaattcctttaccatggttccgcgcatgtgtgctttgatcattttgagtgcaggttcaaaatttagaacaataaattacaacaccctaaaatttccaatcgattacataaagtgacctcttgacaatgttatgttgcaactaattttttaactctcaaagttttcaccatgtgcctcttctct

SEQ ID NO: 393908 - DNA, 1337 bp, Cannabis indica
ttagttatgattttttgaagtctgaaaaaaaatatcaggctatggttggtctcatgcgcgcgcggaacaccatttcagatacacatggccgagaaaactcggacaacatgctgtttaagcacctcgtgtgccccatttagaccatgcatggaacctcattcccaacctttgacccccatccgcgcccaagggagtatgcaatgcatactcccatgttttgtctttttttgtatttgttttttcaacttttaaaaataagttttcaatgaaataaaattcaaattttgatagaattttgtgtaaaatattattttcagaataaaattaattttatttattttttaatcaatttaaattaattttagatattagtggactttgaatttgaaaaattaatttttccacaaacttgcctttatggttatttttgaaatttgattatttttatttgtcttattaattttaaaatataagatcagatatttacatattttatttaaaaatttgaaatgatcttattttgacattaaaatattaataaaactaaaagataatccacttaaaatttcaaatttgctaatcatatcaaatttttaaaatttgttattttaaaatattttttattaaattaaattatatgattataaaaatgttagtcttcacattttatcttattggatatttattttaattaaaaatatattattttggaaataacatgaaattttgaaaagtggttaattttggcttgaatggatattttagggttttccaaccataaaattttcaaaattaggatattttattttatttatttttattaaataaaattgataatatcctaaccttcaaaatatcatattttcaattttgtttattttgttaaatttattttattaaattgtaagattaaaaaaaaaaaaacaaaattatctcaattttcaaattaagatattctattatattatcttattagatatttaactaatttaaattatttaaataaacttcaaattttgaaaattagttggatatttgaatttcattttaaatttaaatatttaggagatttgttagattttaaatattttcaaatatttctaacaacctaaatttaaattctagttaagatattctttaaatatttaattttaaaatagaaatatcttaacctacttttcagatatttgttacgtggatattgtgcttgttttatttaactgtttattcaaaaacttttttttaacaaacttattatttatttgatctaaattactatgattaacttattggcagatctaatgatctaattttaatcatagtccaattgtcaatag

SEQ ID NO: 393909 - DNA, 498 bp, Cannabis indica
ataggtgtcagagactcaaaaatccatttttgttatggaggatcagtgttagcagcggtgacaatgaccgttgaaggtagctcacatcatgcggagggcagagatgctattggtagttgagattgacattaactacagcgatgttcatacccatgatttgcgttctttatttacgtattttccttatattaatgatcttattaattatattatttattcttaccatatttatttagttttttcttccaagaaaaaaccaaatctcaacacttttgattgggatttagtttttaattttatcctcaatttcttttttgtgtttaattactttcaatgtcatttttttcgttaaaaccttatcatgtgcatttattattattttatttacttttagcattaatctttcacacttttatataattaattttattatttatttttaatttattttaataacgatttttagttatactcatcattattaatttaaatttttta

SEQ ID NO: 393910 - DNA, 587 bp, Cannabis indica
aaaaaccctaatatttatctaatatatatttacatttgtaggagaacgaccatctgccctagacccccctcccgcgacttacctctctttgactagtgccctagaccctctcctagtccaatgacagtcgtcccagcttgttgaagtttctagccattgaagatagcaaaatagagaaaacagagaggaaaaagaggaagagtaaagagaaagcaaggactgaagaaagagtattattgattaacaatgagcgttacaacttatatagtagctctttacaattgattcaataattgaattcataacaaattgagctagctaattgacacgtgttaactaactctaacaaccttcaagtgtattaactgtctttaatacctccccctcaaactcataattgaatggtttttaattttggctttgtgtttgaactcaaaaaaactttttcttgatatggctttagttaagccatatgcgaactgatcataggtagagaggtgtttgatctaaacagttttattaagcaccttttctttgatgaaatacaagtcaagctcaatatgttttgtgttggatatttattttac

SEQ ID NO: 393911 - DNA, 1609 bp, Cannabis indica
caacatactgaaaataatgcacctctttaaaagtagtacattgatggataacactttaccactcaaacatgcaaggtatcctagacctagcttgagctaaacatttctatcttagatatgaaatagtaaataatcaacagagcgtcgagatacttacttgttgtgtgagtcggaaaggaaaggttgtcgtggaatatgtccaagaatgttgaacccagtcgactagacgatcgtagccggcttgagcgtcgaagtttctgtcagtttgggtgtggaacaattcgaggttcaacgactctgcttctggaaaatgggctgatcagaggtttaaaaagatttgaatcaggcagtcgaagacctcttccattcattgtttgagacgacgatgaagaagaagttttctggaaaatatgaggttatggcttgaaaattcgaaaatggggagtctgaaagtctgaagtgatgaaaaagaataaatgaattgggtgagcatatttatacctcggttagaatccttgcaatttgaaatggacggcccaggtttcttcttccaaaaagcacattttgatctgatggatgagaagttgaaaacctggcatttaaaacctgttcttgtcgtttattattcatcattgcacgcctcgagtaccgtacacattaaaggaggagtcatttcaattgtcttgccatcattgcaactcctcctaagaaacgtgcccctaacactcacgtgttgtcaacaattacattaaaggcgccgcatgcgtgccacgcccgtggttacttcactttatggcccttttacttcgtgacagctcacgggatgcaataataatcccaacaattaccacgtgtcaagaacttgtctccaagaaatgaaagagtactgcaagctcccagacctcagagagtcccaaaagtttaggggtaaatattatgtgtgttttttgagcacacgacacatgatatataaagaaagggattagcctcataatcccctaattaaaattccactacaatcttgttccgaagaagccgcgtggatccagtagcaagaaaagattgaaagatgcatggaagtccacttcgccctgtcctagcttctgagacgcggaaggcgcttagtctctcccagactcggagggatccaaatatggaagcttgacctactgatacccgaacggatactcaaagggcctaatgcgaatgtcgactgcccaggagtatcgcagacgtctacctttgatacaagccagttcaccaagtgacagttatgcttttttttaacgcaaaatcatatcttgccccctatgtctgagcatggtagtgcgcacacctccaccacctttttaatagacggatattataaacctttgcttttaaaggtgaaagctttgggcgacacgtggcctttacttttaaaggttaacctttgaacgacacatgtccatgtaatacaaaatagttcccattgtccagctaaagcatgcacagacacaatggttttcaagggacctaatagttagctctgactttgcatgttgtgacagtcagtagtcccgtgatccgtaaggggaaataccgggtaagctgtgcaatcccacaccgc

SEQ ID NO: 393912 - DNA, 1582 bp, Cannabis indica
ctaaaaaaaaaaaaaatactaactagttattttttttgtatttctcttaatatatattcatcactaattttaaataattttttgtattcacaattactacttcgccaagctctaataataacattggtctagctaattaatcatatcctttcatccttaatatttcttaatttataagtgttaaaatttaggaagaaggtgagtatttgataattaaggtaggtttattttaaaattaattgataataaaaatagtagtttatgcattctatgcatgctattatatttctactcattagtaattaatgtgaatctatttatgatacactcttcttagatttaaactttgaagtgtgagtacaagatcaaattgagaaatttgtaagtatacaaggtgggaaattcgaggatacaacacaaacgtttaattgcgggatgataatatgttagaatttaggataaaaatgcattaatttctatttcaaaattaattgacaataaaaaaaaagtagcttatacatcttatatataatattatatttctacatattagtaatataagactatttctaacaataaattaatgactatttaaaatttgtatccctcaaatattaaaactataaaatcgtgttcatagaaattttttatctattaaaacttttttattttagtcacataatttattgtgactaaaaattagattttttgtagtatgaagaaatttattttgtaatttgtaaaaataaaaaaaaaataattttttgaaaaataattttttatttattggtaattaataagaaaataatttttaaaaattatttacatgtacaggtgcatgtatataaaaataacattttaattacatcaatatattttgttaactgcataaattaaaatttaaaacttttaacacgatttaaaatatagaagttggcgaggtggaaaaatattcagaatagagcatgatatgaaaaaaaaaacttccataaataatttatttaaggaaggaaaattagaattgataggaattttgttaattattgttgttttgtttacgtgtggaggaataaagaaagtaataaagtgagatgagttgctcgtgtgtgttaagagaagtgggacccacgtgtgttattagaagtcaacataaaaagagagagaaagtcaataaattaaaaaacgtggggacctatttcaccttctaccatgtgatcctgttggtttgtcgggttttgtaatgaaaacaagaatcttccttttctttattaaaaaagaaaaaataatttattattttaattgacagactgactgacacgtggtggactccacccgttttcgctcgcggtttaccgttgttagtcagttaattcccgggatttccgcctcttgtctccttacttcttctaattacccaaaaccaaatggcaaatgctaagagatctctaagaacccgttaaatttagtgttacactatcatcaaatttagtgtcataaagtattaccactctaattacaacaccaaaaattatattaaaaaatatttttattattatattatttttttaataaaattaaaaaa

SEQ ID NO: 393913 - DNA, 770 bp, Cannabis indica
gtgaaaaaaatgataagatactacctcatatactttttcctttatattaatatatagaaatatagatttactctcactctatctctcaataagtttcgaaatctctctttcacgatctcatctcaacgaccaaaaacccctacttaagaaatttccaaaattcatattaactattacatgatggaaagtgttgataataattaattatttttttttttatttttcttttcaggttggggttatcttcccaagaaccttcttgagttggttttatagaaaattagatacattgaaagatgctttgacatttggtgctatttgtttcttgaattggtatgtcgtagctaaaaataataaaaataaggtcatcaaattgaagcctctacccaaacttttgatgcccaactataaaaaagaaagaggcaataatatatggaaagtttatagtacaacaaactcatcatcacaacacacgaaaaagtagattaaaaatccattattgttattgcttccttcctataagagggcatctccaaggagctcatcaaatttgatgttaaaaattatcttcactccaactacaacactaaaaattacactaaaaaattattctttattattatattaattttttaataaaataaaaaaataatattatattaattaactaaaaccactacaaactaaaatgcacctttctaaataaaatagtcacacgtgtaacagatagtttgaactttattttcagcttgttaaatttttctaaattt

SEQ ID NO: 393914 - DNA, 904 bp, Cannabis indica
ttaaacttttcacttgtggtaattgttgactcaaaaatctggacttacactcttaagccacacctgctcactagattagagagaatgaattataagttatatatataagagagacacaaggaagttatactagttcattccatgtattgcgatagtagtggcgctacgtctactttgagttttatttctcatgagatggattacaaaaaaaaatagctaagtctagatgctctcattttcagagagatgttctaaccttatgattatttttctaaacttaaaaaatgagctagtgaagctctcttggaggtcctattaaatgataataaaacaaaccaaaaaaaaagaaaaatcaatttagactatttttgaccatagttaatgatataacggtagaaattaacattgaaggttgattgtcaattttcggaacttgagtcgcgtcagttggactcgctccggataagttatagcttaaattcgtaactttcttggggtgaaatttagagctgataaattcagaattgtgattgaattatgatacataaattgataaatcattgaaatagcttcgaaacgcaagttgaatcgcatcaatcgaatcaatattgagtgagctatgactgttttactgaaggatgttctgggccaagcgcccaggttgacatgtgatgtcaacctatacattgggtgagtgggaaaatgtgtcgagaatgtgtattatgattcctaagtgatattttgacatcacttagcccaattctatattctggcaaagttggtcaccaattttcagagatgttgctattttgcggaaacgggagactcgaaacttccaccttttgagtaaatcaccttgtcggaaaagtgaaaatatgaagttgtgaatttgactcttctgact

SEQ ID NO: 393915 - DNA, 959 bp, Cannabis indica
tgatctctttcagaattttcccaatagtgagaaaggacaaaatagcctctgtgaaatcagttcccactatgttccagttatcctgataaaaagcactaccatacccatctgggcctggagccttgataccaggaattgaaaacaaagcctctcttacttcattataacaatacttaatttttacgttatcgtctaataataaatagattgcataaaaattatttattaaattatatgctataattaagtatgaaatgagtagtgacaagaagaaagaaaactaaccttctaataaaatctttattgttattattattattattattattagtcttttttttttgaatcaatattgaaacacttatttgcaaaatgggagtcaataattaatctatttgtaaagtatatatattcgacagaaaatagttttgattggatattgtacaaaatatttcagtgctcctccactttggctgcgcctgaaactcaaagtaataaagtttgttaaataattaatacataagaaagtaggctgttgatttaatcaataaaataaataaaagccaattactataaagttgtagctataaatattatttataattttatttttatttttatgaaaatttatataacatttcacataataactaataaaataatttaaattgtaattaacatccatataataactcacatagaaattactacaaaaactcaaattataaattaaaaaaaataaaaaataattaatttaatcaataaaataaagggataattgcggcaaaagtccccaaaaacttgaggttgatgccgattagtcctcaacctcaaaaattggcggtgaaaatacctaaggtcccaatttttgtttgtccgttagtccctttttctaacggacccgttttctaattcaaaataccacgtgtcgataactaattggtttaaattataatttt

SEQ ID NO: 393916 - DNA, 1356 bp, Cannabis indica
taaagatactgctatgaaaaaaaaattgaaaaaaaaatatttcgacatatgattttgaacgtaaaaattactaaaaaattgtaattaaaaattgtaattagcactcatataaaaaatggaatgtttagtttgggggggtggaatgaattattggtataacttaaaaagaactcaacagccaactacgcacgtacctaacctattggactttaatttttttttatcaccataagtctagtctagtctatatgtctcaatatgaacgaaataattaatggacacggtgatgcgtaattgagttagaccaaagaaaaatcaactcattttcttaaattctatattttaataatggtttttatgtaaaacctcttaaatgtttgagaaatctaacatctcaaatgtatttgagccattgaattaatgagaaaagtatgtttctggtatccaatggtcaatttatatacatgtcaaaagtaagtgtaatttatttgacccaaattggtgaccaactgagaatagtgtgttttatgtactacattaaatttaaatgacttaaaataatgagttaaattgttaaagttaaaatagacttaattttatcaaaactttccattcatgaagaacatagtgaagagatattgactgagtaacaatggcagcaacagtgaattttagaaaatctatatcgatatatctatataattctcttgctaagcaagatgacatgatatcctaattgagctttgtttatcattctttaattttttaattttttcatatgtttttataattttctttaatttttggttaccattaccctttaagtagaatgatttaattgaaaatattagtgacttctcaatttttttataactcccattctatatatactttaattattattagtaaaaaccatttaatattagtagtaactgttaaatattttccacattgaattgtttactttcactcttttcctacgtttttttttaattgaataaaacaaataaatatatctactattaatttaaaactgttgcccctgattttgtccaaaatacgtggaccaatcggattgagacacgtagactgaaggggcttaacgttgggataattcagctaagtctctttagtcaaaggggtcagcatctaacatgcctcccggagaaggcatgtgagtttcacatactcccggagagcaaagctacaacaaagcatctccgggaggtatcagatcctatctgaactgtcacctcgcatttaatgccgcatgggagaatgcatattgaaactgccatatgtcttaaagtctgacggcgtaaccccctttctgcagctactacgctatgattagta

SEQ ID NO: 393917 - DNA, 871 bp, Cannabis indica
agaaaattttggattttaccttttagtgactcacattacaggagactaataccaaaaatttagagtttaattatgcatgttattaaaaatcactcctaactcttaagtgacaaaaaatacgagtcactaaatagtgtcactaaaaggcaaaattgtagtagtggcgccttgaagcaaggcaggcctcaacttgaggcatgtaaaaagtgtgcataagcattcacttggctgtgaaaaggagaggcatacatctcaaatgacaaggcatttgggtttgttgtgaggcgtttagggaaaaagaggtgttcgcctctaacatttcattaaaattgagtctatttgagttctagaataaatgtccaaatcatttcaattttgaagaatttatacaaaatattatttttggtaaaagaaatttacttttatgttcaaatattttttttcacattttgcggtgttctataaaaataacacgaaaaaaaaattacatgaaagtaacaaaaaaataacatccaaataatatataaataacaaaaaaaaaaaaacaacaaaataataaaaatacaacataaatataacatgaaaacgtcaaaatactttattttctataaataaaagctttaaaaacaataaaaataatttaaattccatacaaccatattattatttttattttatttttgtgcatttacaaaataattcctttatttttgttttctcttcctacaacttaaaacacttaaaagaaatgaataattacaccacatactgaaatttctaacttttttatttttatgctgtgggtcgaattttttttccaaaatattgaatttttttttctaaaatattgtgtaagtttcatactatgtac

SEQ ID NO: 393918 - DNA, 1568 bp, Cannabis indica
tgtattctaattaatttttctcatcatttcagcctaaagaagatggtggcattgttaaggaggtggacagaagcaagaaaagtcacaaagtgagagaattaaaggctaatagtgaggaggttaaatcttctggtggaccagttggacaggttatatcttctcctaagtaccatatagtttcatgttatttaatgtcttcatgaaggtttattatcattgttatgacttgtcaaataaaacggtgctaataccagttttcctgttcaatgttttcttaacaggccataaaagttgcaatcatagtaggatttggagtacttgttctctttaccaggcagaaataacaggtgtatatatgtaagattgtccctgagttgttttctccaagaaaagtactgtgaagtgaaataggtactgaattttaatgacatacattgttttaatatgctatttgatttcatgtatctatgccttctaatttagggtcttattttctatgtttcaaataaaaatcaggcaatggtattgactattgattgagcatcggccatgtggttttcttattcaccttttgatatgaatttttttttttttctaaatgtattatttatgtccatgtgattaatttttcttgtatttcgaatttggaatcttcggttgtaagattaatctcacaactttacctattagcttaaatgatagctaaatgatgatttatgtcaaattttgatcatattaaaattgctctattctattcttcaaaatattttatcaaaagttcattgtttttttttattttatctaacatttttatataataccagcttttctttataatttattttatatcattaaaatattatatctttaaatactttattgattaaaataataataaaatagtgattaaaaaaaaaagaaaaaagaatattataatatttaatttggagaaagaaataaataaaattaattaaaatattttttagcttacatatgtcttccttccctacatttagttaagggttgagctaaaatagatgtggagctaaaatatctcaacctttagaccatcttccaaaaattgtgctatatttagcacaaaaaataattttgcggtaaatttacattaactttcaattttgtgctccaatacacaattgtaaaactttaaatttaaatttaatatctaatttaatatgtaatacaataaaaaaaaaataatataaatattttataatttaatgttatagttaaatatactaataaataatacaaatgatataaatacaaataaaaaaaaatagtgcatttattgtgatgtaaattttacatcatagcaaatgtggtgccaaatttggcacaagatttgctacgtgtcaaatttacatcacttttggcacaccattggaacacacttttttattaaatgagcaatattttagcttttcacaacttatttgcatctcaattaaaaatgctcttagaccatcattaatggttggtgtatgttgaccgagattttcggcaactaataaaatattataaaattattgagctgtaagaaagtg

SEQ ID NO: 393919 - DNA, 1283 bp, Cannabis indica
gaggcaccacacctgcaaggcctaatatcccggccaagggtgcacaacggccactacccctgtaatttgggacacctaacaccagacaaaggtacagagtgcaagaccgccatctacaacctgtagcatgcagaccatagatataaccttgtcccttgggaccacctttgtatgccaggccattagagccaataaataccccattctcagaagtgaaagggggttggaaaataattgcaacacttcactctaagaaatacaagcatttttcttcctccattgttgctctgaatatttcttcaagtttctatatttttatattttcatcttcattctatgtcttgtgtttgagtttcgatttttcaggcttaagttagttgacgagtgtcaattattgaagtgggaaaatttgaaggaattgtttttactcttatcttgaaaatcaaattttacacacactcaagccaaacttgttcttatttcttttagtatacttgcaattctctctagattcctaaattatatttcatctaattatagagagagttttttgtatattaccatgtaaaaattcattcattgtattgaggtgaggttgacatcgatattgaaaaataacttgggtataagtgaggttgataccaattttgtaaacaaccaaattaggtgagattgacacatcgataatctagtgaggttgataccccgttgaaaaaaactattaggtttgggaaagaccctaaggaaaaatccccctatttaaggactcgtcatacacgttaacttggcccattaattgaacttaatgctaggtccataactttaaagaccaaagatgtacggagcttgagttctcccaatccttgtaaaattaggagtttgtaatttctatccttaaactccttacattcaagtttactaattgattttacttgtgtttgtttatttactttgcattaaatttcaacctttgtataaaatgtattgttgatttttaaatttttaaatttttaaaattagtttaaatttacaattcaatctctctcttagaaacatatcttacgagaacaaagaattccataaacatagcttacacataaaaaaaaaaaagaaaaaaaaagccatgagagataggaaaaagttaaactactataaataaagattgaaaaccatagtcatacttcatctaattttcacttaaatataagtggtatatacactatatagtaacttttctctaaaatttatatttatactttaacaagaaaatttttacatttata

SEQ ID NO: 393920 - DNA, 586 bp, Cannabis indica
ttaattatttttatttttaattggtccaaattcagacttgatttttttaataacaaattagaagttattctttaataaagtatgtttagacaaatagagattctatatattatatatataagaaacatatagcgcttctagcgtgactgtatttttctaatgataattgaattataaaattgtattaaaataaaaaaaaattataatttttatatataatatgaataattgaaagtcagtatgatttcaaaattagtacatgtagtcgccactacatttaaaaatatttttatcaccgtatcttatttatagttgttactatataaatttattaaaaactataatttcaaaactgcagtactcttacttgtagttgccactacattcaaagtcaaagtcgttgtcatcaccgtatctcatatacggtatatacatcattcaaaatatccttatctatcctcttcttaataatctatttacacgttaattcactaaaaaaaaagatcacttttagtgacaactttttaatcacaaataaatacaaaaaaattacttgtgactaaaatataacatttagattcaagtt

SEQ ID NO: 393921 - DNA, 893 bp, Cannabis indica
gtatcttccttgtggataaaaataaggacatttctcgaataatttctccagaaagaagtcccaaagtgccccaattgagatacgtcaacctaggcacccatatggccttggggcatgcactgggcgctcaggtaggggtcaacatcttcaaaattggttttgttgatgctcaattttatttttggtgacaagtgctccacagatttctattttgtcaaatttgcacaggcagaacttagtaaacgaaatcggtgcccaggtggaaatgtcaacctaggcgcccaaagttctatatgggcttcttcgagatgttgatgatgaaaattaagtcatgtccttgcaatgttccctgattgatttgaggaattggggtccaagtatgtctctagaaacctaaaatctaaccgcagtgtgcctagatcgactatatgtcaacttggacgcccattaagacttttggtgcccaggttccgcttcaagtagacttaaatccaaagtctaaaacttggttggaacatgtctctcatgtatcttaggacaatttctaaatagattgcccataagaagttgataagaactaaaacttatgcgagatggggcacacgatgtcaacctgggtttccagcactgatgttgtacctaggttaagccctgggatgtcaacgtgacatccttagcttcatggttctttctttaagggtcattaggacatgttcacttgaattttgtcgaagtattgtagctagaaacgtcttcgcaggatcatattgcctacctgggtgcccaaccagggcaccatcacaatttccaatgcccaagttgaccaccattagtctcggtgttggggcctagggttttttcctcttgccatgtgtcaaaagtgtttttcatgt

SEQ ID NO: 393922 - DNA, 620 bp, Cannabis indica
cataacctaggacttagcctagcaaacccacaaggcatgaaggttaacattggtcaatatatttccaagaccgtatttaggttttaaacaatatttcacacataaattcaatacaacttaaacagtttaaaaaaggtaacagctagcgaaaccgtgagttgagctcgacactggccttgattgtacatatcttgacggtcttcaatgaacagcctggtggctctgatactaaaattgtaacgctcgtacttgaaaacttatttattttagatttacgtatatttaaacaattataaccaaataaaactatactaaaaatatttcatatgtcgggatcccgaattaaaaaccatttgtgaaaataagaatatcgtataaatatatatacttaattattattttttacaagtcataaggcgacaacggtagataattcaaaatacaatatgaccggaaccctctaggttgcactaccgcgaaatgcacaattcttgccgagctccaactcactattcctccactttagctatacccttacctacacaaggtagaaaactgatgattcgacaaactcagtaagatatgcatataaaaaatcacatataattgactcgtatcta

SEQ ID NO: 393923 - DNA, 653 bp, Cannabis indica
actttatatttgcatggtttgattaagtgtcagtgtaccgttctggatttgaataaataagatttcatacgtggtttgtgtaatttttatctttatttttgtgaaactaagatagtcttcttcatcagtccatatgttgtacttagattttgtttggagtttggtttactttatgatcattatattaaatataacaatttgtaattaaatattgatgttttatgaatgggaataagttattataataatattggtctctatgtatataaatataaacagtatatatggttggctataatttttatttgtatttgcatataatattgttgggttttaaagaccacaataaccctatacacttaatcacacattagcatactcggggtaatatttaacctttctaacccaaaacacagtaacatgtgtggatacaaacttcccacgatattctttcgatccaagtgaacgtacagtaccaaacacaaatgctaaagttcttttctttgacattctgagatgaatcagcttcgagatctcaaaaatcttaagggttagaaacaaacaatgaatcgaaacaataataatttaatagtgtaacatccccgcttcaagcctccattgggcccttacacccacggaatgaatggctctta

SEQ ID NO: 393924 - DNA, 1367 bp, Cannabis indica
attataagccccaattattcacttcatttatactccttatccaattttcttctctctttctttctctttcttttttccttaaaaacaaaaaatatgtgtatattttcaccttaattcccctaattcttttttatcaaattaattctcctaattttactaaaacagtatctattcttagatttttatcgaatcttgttattaatacggttgaatttgttaaaaacgacaaccttgtattttacttgaatggagatgtaaaatattcaagtaagtaacccttttttctttgggttacagtagcaatttcgggttaaaaatatcaactaagagtgaaagtgactagctcatgccaatatgccatactaataaaaaatttcaacaaaattatgttatgcaatcataaaaaagaaggtttgtttccttctttgatatatataaaaaaaataaaatataatggaattaatcacagaaaatttggtgtgtgtttgagaagttgccacgcttgaaagtgaaccaataatgatgcaacaaatcagagctagttaaagggttcacggagttgagaaaaaggcataataagcacatgataactctgaatctaccataaatatttaatgtattatttgcctctaactctaagcataagcatgacaagtttgaacgctttattaaattagtcaaacattatgattacataataactcatcattatcacacttaaattgtacaattaaatcaaacattcaatagataataataaaaacactctaaagtgtcatctcatgtaacctaagtacgtactttagttgttttgtagaaacactaatagtattttttttgcagcacaaatatttttttattattattttttatataaatcaagcataattaatacaaccaactctaaaagatttttacatcacatactgaaatttttaattttttttaccttttaactgtgtagaatttttttcaaaaatactgtattttgtgttaagttttcactgttgttccagggttattttttagttgttccactattatttaattgttctgttttgttgttttacgattattttataaaaagataatatttttgtaaaaaaattcatttaacagtaaaattgtaaatttttacctaatttctagtatttttgtaaaaacttcaaaaaaatagaaaaaaaattttatttacacctcaaaaatttttaaaaacaactcattgtaataaatttttaattatataaaatttatatatttaattgtactaagtttttttaatttttgtcacttccaatttatattcttaaaaaaaatatatctatcaaataaaaataaattattttttaaatattatgactaaaaaa

SEQ ID NO: 393925 - DNA, 516 bp, Cannabis indica
aatatatagtaatacataaatatgtaagttggctacaaaaatttttaattcacgattctttttaatatattttatattcacaaacaaaatatctatttatatattcatcttctaacaacttttaaaattatatacattattttatatatataactactatttatattttctaattattccattatactttatttaattagagatcattattattaaaaaatactacataaataactaataaatatatatgtactaaagagaaaatcttaatctacctacaccaaatctataaaaactctaaattcaattattttttattatcatccctctcttcacatataatagaatatgatttactatgtataaaagtgaaattatcaatatatatatattgttataaaataatataaagtagatgagaagaaagaaaaagaagataaagagagaaagagaaagtgaatgagaatttctgagttgtttattccaatgtggtgaacccctatttatacaaataca

SEQ ID NO: 393926 - DNA, 723 bp, Cannabis indica
gatagagtgaaaagggaaaccctctttggtttttatgattgagctaagaaaattgggcgcgatagagagaggaatttgaatattgagtaagggcaaagaatatcaagtgtagaatgaaggggaaacctctttggttttttatatagttgagctgggctaacaaaatagggcgccagatttgatttttgagtaacggctaggagatactctttatgattgtgctacccagttttattaacactctccatttattaacttttattttcattaaaaaaaagaataaataaataaataacttttattttatatataaaaaaatatatttaattatattagttttttatattttttatttaaatttatattcttaaaaattatacataacaaacaaaaataaattatatttaattatatgtaattataaaacttacaattatttttttgggtttctcttgtcacgattgcttctgattagtggcggtttcttgaatacactcttgtgttcttcaatagcataaatgtgatcacgagagacagataattttatgtaagggttatttgcggcaaaaccccctaaagtagggaggtttttacaactaacccccaattctaaaatttttgccgcaaaactccctaaactcaagttctgttagcacttagccctttccatccatttttgactgttaagtgccaggttggaatgtccacgtgtacacagtgtac

SEQ ID NO: 393927 - DNA, 1289 bp, Cannabis indica
taaacatattaaaccattagcatgtaaaattcatgcaacatcaatcacttcaaattccttatattgataactaatcagattgtaaagagttttatttagggcataaacccacactttgctcaaagtcttacggtgttcgcttaccctgaccattcatttcctattactgctgaatagttacactatatccctttctgggttcaaatttatggcattccctttcgatgcaaatcctttaagcttgccaagcttattgctatgggtttgggggacttaatccaagtcgatgaggataccattaaggaaggtactgggccttacctccgagggtgttttcttttggatgttaacaagcctcttagaagaggtattaacatttgattcttaaaaataggcagggagttcactaaatggcttgatttcaaatacaaaagacttcctgattttggtttttattgtggaaaattagatcatactcgtaaatactgtcaagcttacctccaaaagtgtgatgaaaaccttgtccccccacctagtccatataacattctccttaggggaaaggagaaatctagagacaaacctggcctttttgactaccctcatccccctgctatctctgtttctgagatgcacccctaattgccccatcaaggaactatgaacccctttcttatgtagcccctcagtttcacagccctcctaaactccactatggggcaaggatcttatattgatgtccctccaaactcaaatgttatcatgatgcccactcctgtcaaccccaatttcactgaatcggctccactccaaactgatgctagcaacaccaatctttatcttggtgtcacttcctctcctctggtctcaattcacactgattctgtggtgacttttgatactcttgggtttcaaaaccctaaactcatgatggctgcccattcccttgttgatgccatcccttcccttgatctgggaaggtccaatgttgagacggtttcccccgaacctgacccgtcagtcaaaagaagggtttaacttatgcttcgggtgttaaacggccaaccttttactctcaccaagctcatggtggaggctctctccgatcccaacttaaacgggctaggtcgggcgagagagattctgaatcttcatctgctactgctaatcttgaacaggcgggtgatgtagagcaacacccgcccagaaaaatgaatctcttaagttagaatgctcgagggctggggaatcctcgagcattcaatcagctttcccttttggttcggact

SEQ ID NO: 393928 - DNA, 503 bp, Cannabis indica
ccaattttgtagtttcagtggtcgacataacagggttaatttcaacttctttcagctcttcgaccagacctaacatttgtatttggttcctcaacggtggggatccatatcttcgtccccgccgttgggtcggacccctatgttgcaattgtcttgccttttctcgagctttggtctattgtttcttctttttttgccttatttaaagtaaggttgtagcattcctgtggagtcctttgattgccttttagacaacctactccatttttggttggaaatttgacgcacaggtggtaaattgaggttacttccttcaaatcatataagactgcttagcctaacatgacattaaatgcagaaggtacattaattaccaaaaactgtgccatgattgtattgacatttggagctttccctactgtgcgcagaaggggagtgtgtcccagaagatctatactttggttggagcaacccactttgtaattttgccattttctcatttt

SEQ ID NO: 393929 - DNA, 720 bp, Cannabis indica
ttatcataccacttttagatcggattataatgaaattttattttgataaaaatcaatttaggatcctatttatatcattttagaaaatacgggatctattttatcatttaataaaataaaaatataattaataacttttacaaaacataaagcctaaaattataattacccattaaaatatgttaatgaaaaagaaaataaggctacactacatttataaatttttgtgtaaataaataccacattcttttactagacttacataattttttaattaaagaactatttttacttaattaacctcaataattaaaaaaaaaaattattctcaggttgttaaaacacattaaaaaaacatttgtcgagttggaataagacaacagctgagaactacagtcttcttaaaattgactaaagtaaaaagaataaataaataaatctattcaaaaataaaaagaaaaggaataaataaataaataatttacaaacgcaataacgacggccaagagagccgagccggaagcccctgcaagttccccggcatgaactcgacccgacccgatcatagctttgttttcattgtttctttttgggaaacttacaaaaataccgaaattttagttaatttttacaaaaatactgttacacggatttttttttcaaaaatactgtgtttttataaaataccagtaaaacacaaagcagtataactcaaaacaa

SEQ ID NO: 393930 - DNA, 1604 bp, Cannabis indica
atttcaaggtgtttgaattttattaaaaaaatttgtgagtaaattattttaattaatttgaacatttagctttaaaaaacttattttggctcaaaataattttaaagtaaaaattgactgtttattctttatatatccagttttatttattcactataaaactttttttaagaaaattagaataaaattatgaatggtataatttagaaatcactaacgtcaattcaagctaattatatgtccacgcgcgtccaaggaagcttataaatatttgattaaattacataaatatcataaaataatatgttatactaattccacaatcttaattaatttataaatatggttcaaaatgtcctcgttgacttcatcattatttttcgtgcctataatttgactacatagttaaaaaaagtaaaaccaataactttagtacttacactacgaatcaagataattttcttttttcaaaattcaacatgtttccttgtaccaatttaatttaagaaaatgatcattagtttccaaaaacattcaaattattaattagagaaacaaagttagatcacagatacatgcatacgtaatcgtatacgtatatatatattctttgtaaataattatatttctatcgttgtttcagtttaaataacaaattaaattagtttaatttttatactaaattagttacaattattattctcatacatgctaatgaaactatttatgaaattcatcacaaatattaaataaaaatgtaaaacatgtaaaagttaatcaaaccttgatcaattattagtacgtgtctagtaatgcaagcaacaaaaaaagccggcatagttaaaaattcaaattatattatatatatttatataaactacacttcacaaagtcatccaatccaattacaacctaataatcaaattctaatcgatccaatagaatcggatatccaatcataattggatcagattggatttaattttgaaaatccaatcggatcagatcgattggttgttggatgtgacatctaatccaatggataaccgacaaaaccaatccaattatcatccaattatatttatatattattaaaatacatttataattttatatatttaatatattttatttaaaaagtatgtattaattgatctaatatacatttaacacatgagattaaaaaaatcttaaatttgaaatattaattctcatattcctaaacgctaataaaattatcaatgcgtattgaataagttctaatttttgacagttttattatgagatcatgagaattaagtttgactaaactaatgtttaatatgtatgttggattattaggttttaaattatattttttatatatatttttcttttaataaatcatgatggtagctaaatagattggataaatccaatttaatctaatagaaaaccagtcaatgcatccaattgttggaatcgatccaatccaatacatccattagatcggatcggatcggatcggatgacttaattcgattggattggatcggatgacaaaattcaacatctaataaataattgaattgaatcggttgagtccaaatctattggatgtgatc

SEQ ID NO: 393931 - DNA, 524 bp, Cannabis indica
ctaaaattaaataattaataaatctaaaattccctatataattaagtctttttttagcaatatcgagaagctacttctcgcatgatatatttaaaaaaaacaaaacacttactacctaacaaataaataaattgtcatttttgtctcaatagacttcctctctttctctttctctctctatatataatatattatataaatagatatatataaattttgctgatcagtgttgttggaaaatttacggtataacaacctgatcaatgttttattttttcttcaacacatatttgtaatcattccctgcttccgaatctatcaatggattaggcatataaaatttataaagggtaaataccattttagactgtgttttgcaaaagttacagattagaccctgtgttttgttaaatgacaaaatagatcttgtattttttaaaatagtaaaaataggaccctgagcttaatttttgataactttttttttaatacaaccaacttgaagacaatgcttaatacgaaca

SEQ ID NO: 393932 - DNA, 1133 bp, Cannabis indica
gagagagagagagagcacgaaccatcccaccaaaaacttgtacacttggggaataaattagaacacagccatgcccacttccacacagaagtgcacaaaatagctcctaagcagaagttgtgctcccatctcaatatgggcccagtttcagacgacaaagttgtctgcacagttgcatggggattcccttaaatcagagagtctgttccaaaacaaacctagaatatttatgaggctctggtgatctttgtacacctagagagctccgtaattcttgaatttgttcctatactgatccatctcctaaggagatgaattatacactactactagagttgtaacttttacttgcttcaaaacttttactttattaacttgaatagcttcagccatggtgggaaatagaaaagagcaaaaagaaaaggccaagttgttagatacccacactaaagaagatagcaagggtatgggagtgtcctcccctaacactacttgtagaggtccccattagaccctacatctgaaaataaaattctcgaaaattatgttccaagatggtcagattgggaacactaaattaagacaaaaagctacgagatgtgccatctggaaccataaggattctagacaggagaattaagtttagcaatgcttagtgctaaattttagttatttcagttcactggtaaaggcataaggtagcagaacctaacaatgtctacaagaaataagcacaaaaaatattcgtatttgaacaaaatgttcaaagtatggcctaaatcctattgatctacctagggtaagcatgcaatcatcaagaaagaaaaaataaaactttaatgctacttagaattttagaaaatacaaaaattacttacttgatgaagaacttagagaaagatgaggatttggagagggaatacaaacatcgtgcgatggcctccgaaagatttttgatgaaaaaggttcgttaatgcgcacaagcctggtatgaagggagaaagctttgttaatgagtgcttgatctccgcttgaagatcaatggtttcgatggtgtagaagaatcaataattaagactaggggtggtgcttctcggtattctctctcacgagtttgaagaagaagattaaaa

SEQ ID NO: 393933 - DNA, 621 bp, Cannabis indica
ttttttttttttttgctaaaagtcatgagaaattatattgttgtgaattgtgatgatacttcaaatttgttttgtggagatagtgtaaagttcttgtaactcttgaattaaaaacattatactaatgagatgaaacatgagaataatacattaaatgtagtatcataaaaacaaattaggtattttttttagaaaataattatattttttaataaataatagttaaaatataaaatatagtatttcaaaaaaaattttgagcctttttgttaaagagatttttgaacttaggtggagagccttagatgtgagcccctactgctccacctttgagctaacccacactaatagagttgcttatagttttgctaaaagcattttgttcttttttggataattatttcagtagaaaaatatttatactaagtttatgtctatcattgtagatgattgttcttctttatgaagttcttttccactaaaaaaatattatacttaacttttatttaataatataatttgtatcatatattctttttaggggaattacttcgtatattattttttaacttttttttcttcaaatttacggtttgagtttctaaaatgattgcaacgcta

SEQ ID NO: 393934 - DNA, 701 bp, Cannabis indica
aaattagttatttatttgcaactggaactagttaaacttaaatatttatgccacaaattactttatatatattttatattttgtgagactaattagtggattagctagctagtatgcattattgcaattgatcgtactgtaactttcgaccatgacaataataatgaatgtgatatagatttataatatataattaataattaataattaataattaattagatgtgtgtttttaatttaatttttgttcgccaaatctttcctgttttagtatgtttgttcaagttgatatttgtttaatattaattatatatgtaaatatttataatattttggaaaagggatttcattcaaattgaaagaaaactacaacacaagattaggcaagtctgcacagggcctgtgcatagagaagaatatcatcaaaccacacagggaaaaatacatcaattaaagccttctaccccaaagtgagttggaaaatttccagccctcttaacatgagaaaaaccaataaaagaacaaccttttactagcctacgcacatcatttaggatgtctaaatgttaccataatcacggagaggagcaaccacggttgtgttgagtatttttagccaacgacacgaagtcaagaaaataacaattttgttataaaataatataaaataatataaagtagacgagaagaaagaagaagaa

SEQ ID NO: 393935 - DNA, 532 bp, Cannabis indica
tcccttttggtccaaggtgaggaagtaccaaggagagtagtgaggagactttccttttcggttcaaggtgagaatgtaccaaggagagtggtgaggagactttccttttcggtccaaggtgacgaggtaccaaggagatgcctccttggtctgagacgccatgaggaggtgaggagctccgtttaggctgagacagggacacacaagtctctaagtaaggtctccaaaatggtgttgagatgatatgacctcccgtatctaaacaaaaactaatactactcgccttgaattttttgagggaaaacacatatatatattgattttttatggaaatatatatacagggccgacccaaacatatggcagcttgagtcattgcgtaggatcttctatattaaaagatccttatttttttttatcatccatttatctatagtataataaatactttttttgataatatatagtatacataataattaattgttcataagaacaaatatgcactaaaaaaaataataaaacatgatga

SEQ ID NO: 393936 - DNA, 619 bp, Cannabis indica
ataaaatgataaattttgtaaatccattttcagtaacaagaattttttttttattgtaatgaattattctttaatttgcaattttattattttcagtaattaattaattaatgcctttttttattaaggctaaataagtagcctatttgtatacactaaacttttttatgtatatatagatagtgttatatgtttttatgaagcatatattatgaataacaagaaagaaataagttaaaatatgaggggtcctatttaaaaataatatatgggttgatcgatgatataacaaaatcacataaatatgtataaatattttagtataaaaactaaaaatgtatttatcactattacactaatttcaattactggaatgcattggaggacctacgtactaaagtcaagaggggacaatataattgcctcctcaaatctaatgattgttttgcaatttaatttttttattaatgtcttacacatatgtcttaattagtttgtaaaaaatagttattttaaaataaatatagatttgtccttactatacatacataccctctaatttctttgggttaattagtaatttttttccctaaattttgatatgtaccaaatcgtgtcc

SEQ ID NO: 393937 - DNA, 616 bp, Cannabis indica
ataattagttaaaaaaaacctaattaacttacaattaataattaattagagtaaaaatttctaaagttatttataatttgtcatatttattatatatatagaatgacagcagttataatcataattaggtaattattatattagctagttaagctcaattatttagtccacatttccatttaaagttaattaatcatggcattagaaatggcagactcctaattataattactcttgattactacactaaacaaaccctaaaaatattgattataatcgtagggttttttttctgaaagatatatatagtagtaattagtatatatattatgtatatatatatatatatataataacatcatgtttacgtagatgtgtatttaggtgccccaatattattattgatacaaaatattatagtaataaggacattattctaaaatttaaacatgcagatgaataaactaacttaaaattaatcacatctaattaattaagaaataattatatataaattaattttaacagccctaaaaatttattaaaaacatgctaacccataaaatttagttaatattaattttgcatttcttatttttattttttactaaaaaat

SEQ ID NO: 393938 - DNA, 1535 bp, Cannabis indica
gcaactactgaaactgacacttctgctaaagtgggccattaggcccaaaacccttcattgtcaagtttcagtaagatacacatcattttgtcttagcatatttgtagctaaactccaaacttttaactattttttacacttaggtcccccaatcttaattttttatatttaaatccttgatattttgaaaattagctttgattgtccttttcactattctatccaatgttttatcttgagagacttgagtttttgtggtaaaaatttagaacttaatacatatttttgcatttaggtcttggtgttaattgtttttgaaatttaattaataattttatggtgctcaccaggccggactggtttgccagctttgagcgaaaaattaaaattaggttttttatttaaaataaaattaaaaaaattactaatcaatacttcataaattcagtttttttttaaaaaaaaacttcatatagacaaaaattttaaaattatgtgtattgaaaccacaagtttttatcaatttttgtttatgtgcatgttcattgttatgaatgtttattatatatattgtatacattagatataaatatttagttaaaaatgggacattttaatataagggactttgtgcaatagtccaagctgcctaatgtttaaaccgaccctaacatacaaccaaagaaggcggttaaggccaaaagaatgagtagcgcgacaagaagctaatgacaatgtttgcaaaactacgagtagaaaccttagaataatttcaaaagaagaattgctactccatgaaagagttcctaagacaagttgagggatttatgaagcccaattaggtaagtgaatgtttgagcctctcttcacttaatgtactaacatggttcaatgacaaaataacatatttattcatcgtgatagaagtttaaaatgtcatactattgatcatctcctatttaaggaaagaaataaaagaaagagactcgaccatatattttacctctttcatagtgatgtgcattaaacaacactaatttgtggagacatcttaaagattagatcaaaatcttaactaggagaggatgtctcaactaatatgatcaaacaaatcaacatgggcactcttgaggtgataagatgaagtggtcattatgtcaataattgtacccaattattactctataaaaaaaatatagtgggctttttattacttatgtaattaagaatgggttaactattttaggcccatacaaaatttgataatcaaaagtatttttttcatatataaaaatttgttttcacttctaaaatatgaggcaattgggagaattttatttgcaccacacaaaataataaatacactttaatattttaaaaaattaaactttaagtaattttaaaaaatcacttttaatattttttaattttttttctcatattattatatgttaattttaatacttattttaattttattttcttactttttttaaatcatgtctaattattttattttttctaataaaatttca

SEQ ID NO: 393939 - DNA, 470 bp, Cannabis indica
agagagagagagttaaattgggtgttattttttttagatgtgtaaaatgggtataagggaacaagttaagtgtagattggtataattttatttgggggtattttttttagaaatgctaaagggtactcatggtacctaacacccctataatgtttattaattttattttcataaagattaaaaagaatcactaactaagtataaaatatcatatcattgaggtactagatactttagtaccatgccctatttttttttgtttgttagtgtggtctctttaatgtacagtttataaaatttccctcacaaatataacttggtagttggtacacattttggctatataacactattattggctcattggctttctattttcctttattactttcggcacaaattctgtgctctttctcgacgtaatatggtcgagaacaggggtggacccacattgtagcgagggggggggg

SEQ ID NO: 393940 - DNA, 1500 bp, Cannabis indica
gtcaccatattcttttgttgcaaggtctacaatccaccgaaattcagatgaccatagagaaaatgccatagccacgatgcatatttcaattttgttgataggcacgaatgagtggtattgtggagataaagtgagaacattcgattcgccgtcatgttaacttaagcaatcaagcccaaatttgcatttttaattcaacatactctatctttgatagaaattccgtaccccttttctttaagttgacctacgctaagtagatcggttttcatattcgaaacataaataacattagaaatagtgtaggtagaattttctttagtttggatagttacccgtccttttttcattacaaaaattgtggagttgtcaccaaacttgacggtggtgcaaaatgatttgtccatctcagaaaataatttcttatatcgagatatgtggttgctgcaagtatccaaataccacatatttttttgagtttcttctttgacatgacacaccatcaagagtgatatttcttctttttttttttttttacaaagttagttctttctccactttgtctattcaaattagtacaacattcatatttataatgtccgtacctatgacatatgtagcattccacattagactttggtgactttggtctatttgattggtgatctcctcgtcctcttccatgagagtcatgtgaataactatcttggttttggtattgctgctgggttccacggtcatttccacctctgtctcaacctcagcctttgcttccacctcgtcctctatctcctcttggctttgaattattatctattgaggattttaaggcttgctcctccttctccttctcctgctggttgagtttgtgctcatgaactaataaagaaccttgcaattcgtcagctgaaagttcattaatattatgagcttcttcttccaaacaaacaacataattaaattttggcgtcatggtttgtagtattttttcaacgacggtcatgtcctctatcttgtcactgtggatccgtatcttgttcacaatcaccattgtccgagtgagatactctgacaccaattctcccgtcttcatttgaagtgtttcgaacttcatatgaagtgattgaagttgctgcctctttgcctgtgtaaagtcttaatattttctcttcatataatcccaaatatgcttggaagtgtctttataaataatggtctccgagatcgtgcgattaattgcttggaaaagatgattctttgccttgagatctttcaaccgttgtgcttctagctctgctctttgtctatctgccactattgtgatgactgctggtttagcaactccttcgaagacaacttgccaatacttcttggatctcagaaaattctccatcaacatgctccaatgatcatattgttggattttgtgccctaaataaaacccatttcaatataatcagatttacttattaacaaagatcagaaataacattttatgtt

SEQ ID NO: 393941 - DNA, 1187 bp, Cannabis indica
ctatttctattgttgattacttattgttgctagaaatttcctatcaggaaactcatttgaggtataaaggagagaggcatagatacaaatgaagtttttcttttttacttttattgtggtggatactatttagaaggttaaaaatgataaaatatacaataattgtgttcatagtattgtccatcatattagctaaattgccttttgttttgcagtatattcttctctcttctatcacaacctatgagatgacttccttttttctttgattgactagattaaaatcaattgtgatgtcgcagtcgagttgaagtctagaaatcattgtgttgaaattctttgttttttgaacactgctttgatgtttcaacactcttttgttctttttgaatcgaattgtagttatgtaaatgcgggtacagggattattaggatattgtctcttgtttcaaatattcgtaattattttagtcagtttttagttgtaattttgttaaaatagttagaaatataatagtatggctcataatataattaatattactacatgggtacttaatttaaacattattgtttgaccagtttggtttttctaatgaatcactttattctcaaaaaaagaataattgtagatatgtgcttaggaaacttgtctagtacaatatctaaaaagagatgtattagtgtatttttttttttaaattcatgtcaaagcacttagggggcgtttggtatgaggtgtttaaaataatctgattataggaaatattatgaaggagaatatgattatagggaaatgtgtaaactgtgtttggctgtgtagggtaatatgtaatcatattactgttaattaaattacactgtttggttgagtacaggaatcttatatatattattttgaaaaattaaaataaaaatattttttttattatatctatttaatgttaattacatataaaaataaaatagttatttattaaagaaatatatttattaattagtaaacattaaattttattgttattttttattaattaaaatgatcatttctatatattttatcactatgtttatttatttttgtttcgaatatgttattttatgttacatcatccgcataaaatttttatataataaatatatatatgtgattgctaataatttaaaaataactacagttaaaaaaa

SEQ ID NO: 393942 - DNA, 718 bp, Cannabis indica
aatcaacgccggagcgagcttatacccttgttgtaagctcggccgtagcgtatcctgactcatcatttccatggagcctaaacctttcatgtttgatttctcgggaaaatgttcttggatttggattgggctttttttatgtttaattttttattattatttaagattttgggtttttgcttcgatttgagattctggttctaaatttgtgttggccaaaatttttagaacctcatcctttttggtatattcctcaaccgatttttgaaataatcagggagctttaattcttctccaaccgggctccaatgcgaaaaggattcaactaactaaaaattaccaatcaacccagatcagaaaccaaaattttccaagaaaatcctataatatttttcgtttgatcaaacagtacagctaccaaagtccgacccatgtcgaatcagatcatgctacacaacaacttttcgaaccgaaggcaacccttgttaagaacccaatactcctcatcaaaaaacacctggctggccgaggtcgctggcggcacgacagccaaatgggccgccgtttgctgctgctgcctatgtgggctcatgaaccttctgttcctcgccgccgtcgtaatctcatttgtgcttgcctggtacgacgacaatgaggatgagaaggagagaaagagggctgggaggagaggggtgtatgtatatatgtatatagaaaa

SEQ ID NO: 393943 - DNA, 622 bp, Cannabis indica
atgtgaattgaccaccatgggaccccaaatcaattaattcaggtcttgtaactattcggcggagatcaaaggagtatcgagtcgcattcctccagttagaatagttgagattttcgtgatccgcaagggtgtcattgaggtcaccaataagcacgtatggattcgtagtgttcaacaataaatcaccaattctattccaaaaagcctctttgccagaaaaacttggagggccgtaaacccccagtaaatttcgcagagtacctggcgggtcagattcaatgatcacatttattaaattcttgtcatcacttaggaccctacatttaaccccacttctccaatagagaccaaatcccccttccattccaataggaggaatgtaagttcctttaatgaaatgcagcttcaggcaaattctatgaaatttctcctcggctaatcttgtttcaaacagaataatcacgtcgggatttgattgacggatcagcgccgtcagctgtcgaactgccccaaatttcctaagtctgcaacaattctaagctaagatcttcattaggtatttggagacttttgtgggcaagtctccatagccccaaagcaaaaataatgcttggtagtctcc

SEQ ID NO: 393944 - DNA, 994 bp, Cannabis indica
tttatttaacataactattttgattatatattcttctactctactactattactactacgtacttttcatgtttaccatacattcatctaactagatatttatcacataatctcatatatttattttgagtttaatattgttttagttatggaaattataagtaaatataaataagtttaattaagagtatttatttttaatatagattatttttttttatttcgttatttatcttttaattatagaaaattattttatatactattttttattattattttttttaaaatatacagtttagttgctccaataatttttatttggaatgctacgtatatttttgtaaaataataaaaaaaaaaaaaaacttacttaattataataccagaccgggctaagggagccggatggtcatacagcccgccagatttttttttttttttaactttatatgtaaaaatttattttaaaaaaaaagtaaaattttttatatattttcatatgtattggccctgatttgtgagctggctccaccattaccagtaatgtatagttttataatatcagtaatgttatagttttagaattaatacatctaattaaggagagttaagatgattagattacttatccaataattaaagactactatagagacagttgactgaataaataatagtataggtagtaaaaataaaataatgttgttataattatgagggttatttactttgctacctgtaaagaataataagtaattaatgtaaaagatatccgtacataacttagagtgtggctaacttcatatataggtagccacaccagaaatattggagctggagctataataattaagctctcaacaaatgctaaaagagtattatttggtctctagtattttcgtacgtgtcaatattattattgatacaattaaatattatatttttcataatttaatataataatttttaaaaaatatcaataatcaatcac

SEQ ID NO: 393945 - DNA, 1258 bp, Cannabis indica
aaaaaaaaaaaaaaattgatgaatcaactaattatactagctagggctatactaatatattaacctaataaaccttcattaattagtggtgcaattttctttcaaaaaattaaaaaaaaatagtggtgtaatgtaaacacaaacttcttattttatttatatatggtggacccaaacattttaaactatgtccaaactatccaaagtaatttttctatgatttttcaatttgatttatttgttcaagatgttcgtaatttacttttagttttctaatatattgagttgtgttttgttagacgattagcaaataagttggctcattgcttggcaagagactattgtttctctacagcttgtgtgcttcagttggaggattgttccgctgaattacgttctattattttgaaaaaaatttctaattaataaagcttttgatcttattcaaaaaaaaaaaaattatataaaatatataaaaaaattatattcacaccctactaaaaatatatacaatcgcttcagtattaaaaaaaggatttttgttaataaatatgatttttttacagttttacaacttaagctttttatttacattttataaatttaatttttcaaatataagattttaaaaaataaaattacaaaaatacgattttttccaaaacattttatgtaggaaacaactgaaaaacaacaaaaaatataacatgacattaaatgcactgcaatatacaaatcaattataaataaactaaaaaaaaccacactcacaatatcaaaaaccttaccaatatatttaaaatttgtaaaaataaactaaaaatatatatcacaagaattacacataaactatgttagagtttatgtcttgaaaataaatatttaatggaagaatatatgaaatacaaatatattataaatgaatatattagttatagaaataaaattaataaatattataaaattctatattcatatagagaatgtatgatcttgtaaggaagtggcatgtgattttgattcgaatcacatgtaagcagggacgtagggactttagcccatatgtagggcttatgtcctcactcaaatatatacatcaaaattttcacatgtagatatatacatataataattcacttcatttaatttattaaagcctaattcacaaaagctctcactgagtatcttaatcatgattcatgagcctaccctcattctaatcaagtccattttaaaagtagcccaatacaaataataa

SEQ ID NO: 393946 - DNA, 1788 bp, Cannabis indica
aaaaagaatttgaatttattattttgcagatcatgtggtgtgtatttggccagagagtgtaaataaataaatttaaacagataccttaatttcattggatttggaagtatatatacgacggaggtcagttacttactatataaactaatcatgaattcatgaaagtagctaggagtgttcattaaccacatttaatatttttaaacctatttaaattcgatccagttatataataatgttaaattttactatccgatccgtatcaattaatttcaatcatctaatcgatccaacatttgatgaatgttagattggattaggatctatctattggatgtatttcttgtatatttattggttcattttgagtttatccaatatttaagtctagtatttattggatcggatcagatccatgcaccttccaagtatcagattgacgatctaaattttgcatcattttcgtcttcatcaaatacggggagataggtactttcgaggaagatatagcacttcttgggtgctggaaacaaggcccaatgcccaagtagacattttatcaacctgggccgatttcgatgatatttttcaagaactctttcgagcatcttctatcttcaaaaaaaaattgagattcaactatttatgaggaccaaacagaacttctgaagtgccataattgggacccaacgcccagattgacacctggcactggcccaacccaggttaacatttcacactaggcccaatgcccaagttgacatattgtcaacttgggctgtttccaatcaaattcatgaaaaagtgttccaggattttttttccattatcaaaaataatgaagattcaagcaaacttaggaagaaaaccacaaacccgatcccctagaaatagggcccagcacccaggttgacatggtgttgggcctagtgtccaggttgacaatcaacttggtgtgctacttttgattgctcaatgccaaatttgattagaccaatgaatacaaaatatggtcaaaaatggggtaggagacctcgtcctcaagttcaagaaccttggaagtattaaaacaagattccaggagcttgggaatgagtacccaatgcccagattgaaaaatatcctggtgcgctgggttctgcttatctaattctgattttgtttcgaccgttcactgagtttctcacaataactaagatccatgaagttagagaagtcaaaattaataccttgcatttctcatatccaacatgggaaactcactcggaaatgaagaggttcgagtctctcaattctgtagaacagcaacatcttcgagaactggtaaccagcttcgcctgaacatagaaacagactaaataatgtcaaaatatcaaataggcatcttaaagtacatctcctagacgtttttacacttacccaacatctaggttgatgtcatatgtcaacctgggcgatgggtcatgtactgccttcagtaaaatagtcataactcacttaatattgatctgatttacgctattaaacttgcattctgaagctaattcaattctttatcaagtcatgtctcgtactccaattgcaattctaaagctatcaacaccaaattttacccctaaaggagttataaaaataaggtccaggttacccgcagcgagtcacactaggctccaaaaaatggccatcaccaccagaagctaattcttactgttagatcatcatttacggttaaaaatatctaatttgtatttttttttccttttttgtgggcctcctttacctataaaa

SEQ ID NO: 393947 - DNA, 857 bp, Cannabis indica
atcaaattatcaaaactgttagcttttttgttaattttgaaaacttcacacttttttttctttcatttaacaaaacttgtcacatatttttctcttttttaaaaaatataaatatcaacactttactcattatttgactttcaatttcataaattaactattattactatatgtttcttaaaactttacacaatatattagttaatcttttttccaaattactaatatgttatttacaatagtcactctatattgaacattatttattttaaaattacacataaaaataaaattaaatcctaaaataaaactaatatttacgtgcctcggcacgtaacttctacctagtatatatatatatatatatatataaaaatatagatttgacaggtgacccttagcattttttttgggtttacattattgtataatgagagaaaaaaaaaaatcaacacaagagtttgacattttaaagaatgaaaatttggaaaaaaaaaaatcttattttgttatatatttaaaatgatatattatagaaatataaataaaattagagataataagattttggtaattggattaatattatgtgtgtgattaaagtcagtaaaaaaattagagagactaatagtaatatatgtgcataagatatatttatatacgaaaaaaaaaataatatcacatcattctgaaattggaatcatctaataatagctagtacaatctatatttactataataatagcatttttgagtgcttcaaacccctgaaataagaaagctgtaacgtccccgctttaagctttcattgggcccttacacccacggactaatggctcttatacacgagtacgtca

SEQ ID NO: 393948 - DNA, 728 bp, Cannabis indica
acgaccagctacaagatccttgttaaaatatttgattgtttgttgaaaaaatatcccaacaatactgaaatacctcaattcataaatttgtgctccttattcaaatgaggttgcattggaggttgagtcacgagtttcaacgacttgtcccacaaagtatttattgcgagattcattaattatactaagagatttataatttaacttgtttattaaatagttcaaaaaataggtataacatatacagtttttttttttaaaaaaaatatataaataggtgtatattagattgaattaattatttttacatatgaattaatatctcatttatataagtgtgaattttaaattttctaatgcaattcaatatgtataagtatgaatatccattatttgtgaattgtattaaattaaatcatgtgaattgaaatgataatgagaatcagcgaggtactactaaaaatattacttaattttttatgttaatgaaaatgtattaaataagggtacgtgagtacttttatttttatataagtggtgtaatagtaattacatatgaataaagatgtaatccttatttatgtaaatgacatggtgtaagtgattatattgtaagagaagtgttaattataaccttttattataagtttttagttgacttttatacttaaaattatatgttggaatatttttttttatttttttatagtggtattcgttatagttac

SEQ ID NO: 393949 - DNA, 804 bp, Cannabis indica
tataagttgtcactaatttaataatataatcacaacatattgtgactaatatttttagcctcgtttattttatttattattattatttttagtgtatataaatacctgtaaatggatcgatctttggatgagctgtgaatgaatgtgtcaatctcttgtgataatcaaactgcccaagtgtttgaaaatctccatcttccaacactttaatgatatctacaaacaaaaatggttaaacatgattaagtcaattaattaattataaataaaagatgttcttaattaattaagcataatattaagtgcaagaaattaacttaggtaaaaaaagtttacatggtttgtctgcttctgacagtgctaaaagttttccatgatgatatataagagctgtattagctatacattatgaaaaatatatagttaatcactatttattagtaactaaaacaaattctatgaatactagtctttgttagattgagggttataaatatattgggattattagaaaaaaaaaaatatatatatatatatatagttgtattgaattaaaatatttctacagttacaaaaaatacggtcttttgatgtatttttatgttacactccttttatttgtattgattttttgttatacttttatgtaaaatttttttgttatatttttcataattttatagaatatcctaaaaaaaagctttaaatataaaagtgtaaattttttttaccaaaaataaccgtaattttccctataatatattgggatcctaccttttggacaacaagatttgattggattat

SEQ ID NO: 393950 - DNA, 1662 bp, Cannabis indica
tgatgatttaatggtgaaattgaatctggaggttggtcgttgatttctggagcttgagtcacgtttgcgggactcactttgggtaagttgtagttgaaatttgtaactctcttagaggaaaaaatttggacttgaataaattaagaattgatatttgagtgtgagacataactcgatagagcattgaaatagcttcagaactcaagttgtttcacgtcaatcgaatcattattgagtgagttgtggtcgttttactaaaggttgttctgatattaacaaccaagttgatatatgatgtcaacctggacgttgggccaagggaaaaaaatgttgaggattgatttttttgagacctaagtgatactttgacatcatttagctactttctatgttttggtgaagatgttcaccaattctcagagatcttgttgttttgtagaatcgagagactcgatactgtccggtccgtgacttagaaattttgccaaaaaagtgaaaatatgaagttatgaatttgacttgtctaacttcatagctttagtttaccatgaaaaactagatgaactctcaagacaaatcagaattggataagtagaacccagtgcaccaagtcatacgacatcatagacgttgggtgctctttctagagcttccaagatgtcgttctgatacttccaaggttcttgaaatcaaggacgatgtcttctaccccattttcaaccatgctagagaaaatacttggaatagaatttgcatttggatgattgaaaccagtgcaacaggttgattgtcaacttgggtgctgggctcaactttcatgccatctacattctcgttttctccccgagtttacttgtatcttcgttttttttatgatgaaaaaaattcccaaacatttttggggatatgattggaaaaaatccaggttgacaaaatgtcaacttgggcgctaggtctagcttttggccatcagatgactctactttattctcagaagaagttgtatcttaatctttgacaaaaatagagaatatgcccacaatacttctcggaaaaactccttggaaatatttcaacctgagcactgggcctagcaccaagtgtcaacatgggcactaagtcccccttctggcctccaacttgatttgtttcttccttgaaagcacttgtttcctcgtttttgatgaagatgaagaaaatgctcgggacatctcttaagtttgatgcttagaagtgccccgggtttacaaaatgtcaacctgggtgcttggtgtcaacctggcacctagtgcttagagtgctcaaaaataaaaatgctctgaatcttattctaatgcctcaaatatgttcgtgacatgtctaattcatgtcctagtacaaattttgacacatttacactaagaccgtcccaaaaattgaaaccctagttgggttgtcaaccaacgtgctaggtgaaaccctaggcacccgggtttccttccaaggtgttgtttcgtgtattttcagctctagggccttgaacttggatgcttcatgtgttcatcatacagaaattgaaagatagtaaattggaaacaacttggcaggatccaaagacccatttcggagttctctaagtcaacctgggcatagggctagggacccctcccaggtcgactacta

SEQ ID NO: 393951 - DNA, 1186 bp, Cannabis indica
gagttggggaaaaggttatactcaatgtcgaatttcgtagcaagccacctaaacttgtctgcatctactttagctatcacaataggttccttcaaagcagcaagtgcaggggcagctatatccaactgcagcaaaaataagatgtataataaatagttttcatcacatcattcattctcatcaaaaacataatcaaatgctaatcaaacacaaaacaataatgcccaaaaaaatccaacctaatgtcaactccatactccagacaaagaaggaaatttaatttaatatttccacaaaacctgtatttgccagggatagaatttagcgattcaacaaaaacaatctaaacttttacatattgaattcggtgtagttgttcttctcgaaatcataaattcaaacaaatgatgattaatatattatatatatatatgtataaaatataactagatctagaataattgtttcaaattcaagtcctatgctagtcaaatttaaatgaatcgctaatctaaataacacaggagataaaaagtgaagctttatcaaataaaattgagggagagagaaagaggaacctggggggaaagacgtttgcaatggccacaccagggagcgtagaagtcgaccaatacacagtcgaaggcggcaatggcggaatcgaagtttgaatcgtccaactccaaaacctttccatcaacgacccacttctctgccgaggatgacgatgcttgaacagtgatttcgagtgagaacagcaccagcagcaagagtggaattgacaccctcttctccatctctctctttctctcttcagtattcagttttctgttgttgtatttgtacttttcgcgctggccctcagtacctcaaaagttttacgtattttagtttctctactttttttttttgttgttgaatatttagtgtgtactttgattaggttttttatattttaatttttttttgagagaaaattcacggattttattgaataagatgagaataaagaatctatatctatctatatatctattctatataaagtgtgtctatataacagaatttttgatttaggagaaatttggtgactttttatttagactaattagcaatttttcctccgaactttgacatgtactaaatcatgctcttgcactttttttggccgttaaaaattttccct

SEQ ID NO: 393952 - DNA, 2725 bp, Cannabis indica
attattccttgactggcgacattatcgcctataaatccacatatatttaccatgcaagtttttaactttgcactttccagtcccattttcttcaatggatccttataaaggatattcactaaacttccattaaccactaacaccctctttattcttttgttggcgagctggatcgtaatcacgagcgggttgacttgagggtactttacatgtgttgtgtcttcctccgagaatacaattcgaggttcctcagtctcagctttctttgacagttctagaatgaaagctaaattctcattctagatttccttgacatatctcttttgggcattgttactttttccagcgagatgtggccctcccgagataaccaaaatatcctccccttcaataggtggaggttgtaatctttggttgcctgggttattaggcagatttggctagttttgtcgattgtattatttctttacatattgctgaaagtaaccgcgcgagataaggctttctatctagtctttcaattgacggcattcattcattgtatgcccaatgtccttgtgaaatctatagaattttgttgcatcctatttgtgcctcgcatgtctcatgggcttagggttgcaaaatgcaaccctttgttcatgtgcgagaaagatattttctcgagtttcattaagctcggtataaacagtgtaaattggcatgtacttatcgtgcttctttgttttttcttatccttggctgattccttagaatcatcttttgtctttctactagagcctcctagattgtccgccttcatcaagacagtgcttgcttggatagtgttgggtttacttcctgagctagtctttatcaatttcatctagttgcttacttcccctttttgtagaaacacctgagctctttcattgaactcattgatattttttacagggtgaccctgtaagtcattccacagcttgcctccagctgttgagagatcagtcgtaatccctgcttgaatagcagtaagctgtataatgtcattcaagttcctaactctagtagcggctgtactaagtcggctcaagtatgccttgagtgactcacctggctgctgctttaccttagaaggaagatgcttcaagtcgcctatctcttgctaccttaaattgtttcttgaaatctttagacagttgttcccaagaggtaattgagtgatgggtgaatttattgaaccagctgctcgctgccctagtcagtgaggtggggaataagatacaacgtaagttattcatgacattattcgctcgtattattgtattaaagttgttgaggtgagcggacagatatgcagtcccattgtatgacgagacgttagggtttttaaatccctaggggaattcagcgctcataatgtttggatggaaaggttcgagctcctcatcggagtcataatcaggcgattttccatctttgtatttctaaaaatttgttttccaactcgttgatttgcaattggattggatcctcttgctgttggttagaattaagttacttgcgtaaatcgggcttcttctgattccattggtcacgaagatctagctgtcttcgatcgtaattacttgttgaccttgtgattgagtaacaattagatcggccactcctagtatgactcatgctttctccatcattacagcatcgaggtatatcccctcctcaagcaaatcggctatgatcttgagatcaagtacgtctcaagctagaacttccctcgtcatgtacatggcttctcctttgataaggggtttatacatgcccctactagggtttgtatgcatccagccctatcagattaagaaggacgttggtggtgtctcggtggcaacccacttttcctaggttgagtcccaagatttttctcattaccacgagggatttcatgttccctagtcttgggttatcttctgcttgcatttctacgggaagactctggaaaatcattgtattcattcccctaggttgtgaatccccagggtttccgaggcagttcttgacgaggtgcctgatcatttggttgttcatcttcaagaatatccccaatttgcctaggtttctcctcctaggtgttttgggggtcttcttgaaccgtctcttgcttcctggttctcaagccctaagttctacctcgcggccttctcactccctgatcatgttggtattgtgtgttgttttcctgtgtcgccttggctgcggctgcctccctttccaactcagcgttttgtttgtttgcctcatccaaatgtcactggagttaaagattttcaaattcaaccaatggcacgtatctggtgggatcttaggcatccttactcctaggtacataaccaccagcttcagtattggtttcctcattcccagtttctagattttgaacgtgttgttcgtgaattgggtgccctttgtgagcccataggctctttcccaggacgacgagtagtttctttaggatgagtgttatcgttttccccattatcagccatggagaagaatttcttctttagataggagggatttttctgagcttttatcacgtaggctctcaatgaaagcaccaaattgtaaacgtagatttttgttaacgattatgagcctattttcgtaatagatttagcacaaaaattattagagatctatgaaagaatagcagaaatagaaataacaccaggtttttacgtggttt

SEQ ID NO: 393953 - DNA, 576 bp, Cannabis indica
atatatttttaaaaaattaatatgtcctaaatctattttaataatttttattagctaatttattacatttggtcattttgttattttttttttaaaataaaatttgctaacttaattttcaaatttagaatcattttacatctcaacccttacacaaattgacccaatccaattataatctatcaatcatgtcaaaaattgagcaagattggatcagatttgatggcatggtattttttaaaatctaatacttgatcggtgggttgcagagctggccctagctaggctaaggcgaacccatacttagggtccatccatcttatacgccaaataaaaaaatattttaaaatatttttaatgatttttaaaatatcatttattcttatattaagggcccaatttctttttctaagatcattttgactcaagagaggccttggtgggttgttagatgagatatattcaatgaatccaattccttcaatatacaataatcatccaattatatttaaggattatttcataaatacacaaaaattacaaaaatacagtttcatagaattttaaatattttta

SEQ ID NO: 393954 - DNA, 1586 bp, Cannabis indica
ttactaattagccttaaataaataaaggttcaaaagttttgagtttttaagcgatataaaataagtgatttttttagtgttatacgtactcaatatttgtaaaattgtaatttttttttttattttttctatacagattccgttttgaatttattaaaagaaaatttaaaaataactgacgctacacgtttctgttcaatccaatgatatagaatctatttgccctgtttaaaataataacagagtatgtactgatgaaactttagaaaaattacagttttacaaacattgcatacttatgtcgctaaaaaaattaattagatttataccacttacaaaccctattttaggtacttatgcccttcgtagccatcactattctcaatcggaaactataccagtatctccatctttcttgagattatagttcttcaatattggacagtcccttctcagatgagtggtcttgttacacacaaaacatattttcttgaacttagaattctagttgcctttaatcgaattgttctgacccttgttttttcctctgatcaacaatccatcaccaacaccttcttcttaatgttatgattttctcttcaattcctttgacattaatgcattctgaatttcctcctctaatgtcaatgaatccttaccatatatcatggtatccacaaaatgctcataactctccgtgggaagagaattcagtactatgattacttgatcttcgtcctctgtgatcccaatattttctagatcgagtatcaccttattgaaattatcaagatgatcttcaatactcttttctgctgtcatcttataaaaatactactttttttcaaaattaacctgttagccaatgactttgtcatatatagaatctctagtttcaaccatactccagctacaaaatcttctttaattaggcacctcctaaaacactgtcttagaggcttaatatgagggcactatgagccttttcaagaatgtcgattttctcttccggagtcaatccctctgatagatttctttctccaagtaaagcagcttgtaaaccttattaaacaagcatatcctcgccacaatccaaaatcatttttctctgtaaacttctctagatcaaacttagcattccttatttcttcttggatcgatcttcaagaatcttaaaacctttaaatccaattcttaatctccaagctctgataccacctgtaagaaaactgcatatgatctcatacagcaagaacacacttgaaaatattccatagaaccaaaggcacaaccacaaacccgatgttggataaattcccatactattgtcccataaatgaagttacaaggaaaaataaaatagacctctttataaagcctcaacagaccattataactcatagagttgtcggttctgttttcctaggcttaggtcttttatttctttacaataaaaggaagcaaataaatatctcaagactctaacaaactctcagctattcaaggcaaaatatctcaacagaatatagtcttttctcagatcagaaacaaacacagccagcaacaacatcaacattataaataga

SEQ ID NO: 393955 - DNA, 1546 bp, Cannabis indica
agtactgtacaagactcaacttcgaaacagcaagatgctaggttctctcaatgattatttgctcaagatcaaagggattgttgatcttcttaccacgattggtcacaaacaaacgccgcaagatcgtattgaagctaccttcaatagattaccagctgagtgcgatgtatttgtcacctctgttactacaaggaaagatgtctacattatagcagagatcgaagttttgtaaatggctaaattggctcgcattgacaaacacacaaagaatcttgatatttcgaaagttaaagccaatctttctaactcaagattcaatagtttcagtccatataattaatcatccaccgtactcagctccaattgttccaccaggattcagtcgtggtggtctcctcgcactgattgttttacaaggtatcctatgtctcgaggtggtcctaatccaaccaaaagtggtacctttggtcaacgtggtggctattcaaactctggacgtggccaaaccctgttaaaaaagctttcgcgattgatttttatctctaatttttgtcctccttgattgcctgttcaaaactattgaagtgcacttcttatatagccaaaaaaaatagttaaaaaagataaaaaaaatgctaaaaaaaacctatttttcttatgactagaaggggcgggctgcggcccatgatttccatatgcctaggtgtgcccctttttatttggacatagtgagttttctgctacgtcgaatgatcgtattttggtcataactctcttgatattgctcataattagacgattaaagatgttccggaaagaggaaagagagatctagaacttttatggtttggtattttccaaaatctaatcaaaacatagtcgaattcaggcttgaagtttcaattttatttttttttgcacaattttctctatcttattgattatctttttctgagatctttttatttttttttccatcttattcctttaatattttctaatcttcttctattttaaatctgcaaaaataaaagataaaaagcgtaaaattgctccaaacaagagtagaactaaattaaaaacacactaaaaattaacttaaaaataatactaaaaacaacctaacacctgtatcaaacttttctcttgatgtcttctgtgattcagattgagcatctgatccagatgacaggcgttcaacttctagctagtgcatctattttggtagaaatcttgttgcttgaaaatctcaaaaacaagtcaccacaccaggtcctcctctgaagcagaattttgaagccttgccaatgctgttgctgaagtcacttgggttcaatttctacttcatgaactacaagttcctcaagttattgttccctctgtgtgctgtgacaaccagagcacaattctcattgctgcaaatcctatacttcatgctcgtaccaaacacatagagattgatctctactttgttcgaaaagaaagtcctacaacaaacatatcaaatgccaaaacatgttccagctactgctcagattcatgattg

SEQ ID NO: 393956 - DNA, 1408 bp, Cannabis indica
atggtcaatagcaccaaccattatgatctttcttaatcatttggtaagtcttgtggcaaggtgcatgggcacctagacacaagttgataatatatgatttgttgtatgcttttcttactgagtctattagctcatacattctacttttatgtgtaggtaaagtgaaggcggaagcttaaccgaagtgagatccgagcccgagtgatgattgtacatgccaggatggcacgacctaaagtgttcagtcttgggacatcttggggctatattttgttgtcgttgagcaacaagttttaaaatattttcaaaaagtttgtaaaggtttaagcatgggatccggaatagtgtaaatatataaacatatttatacttataaaggttattaacttcacccaaagtttcaatttgacacacttttcaagaaaacacctttgattaacaaaggaggcccgttaattagcaaatcactgtagtgtgcctaagtattagggcattataattttggtattagagtttccaggttgtctactgaggatcgccaagacatgtacaatcattatcagagaaaggcttgattcaagattcagtatgcatttatttgtaaagtaattattataattaaccaagcatgttagaatgtgtaatagtttataattatttatctgaatggattgtcctaaaatccataagtgcggtagtaagattgcaaattcggttgttgcctgaccagactgacttactgattggcctgcttgtcccatagaatggacacttggtgttatatggagagtcagaataatgtggtcagggctagtaacggttggaaagaatggagtataaattaatcctataaccgaggtgaaggccattggagtatttttggcaaaagtgatgattatctgccacagactctgttagatttggagcagagaatcgtagagatggatgctataattcaacgacatgacgaggaaattcaaatgttgaaataacaaaggtctcctgtagtacctttacctcacatgccaatcgattccgttccaaaattacaagcagagcaaagtgtggctagtaattaggaagattactcaaatggtcagtagaactgagccagttcgacattaggtacaagccaagatcggcaattaagggacaggcccttgctgatttcatactcaagttgccaaatgacgaggtagccataatcacagaagagcgagttgaccctgaagtatcaacaggcgaagggtggactttgaatgttgatgggacatccaataaagaaggatcggggtggaataattctcataagtcccaataaattcaaggtacatgctgcctttagattttagtttcttgcatctaacaacaaagccgaatatgaggctttaatcgcaggattaaagct

SEQ ID NO: 393957 - DNA, 627 bp, Cannabis indica
tactccagtaccaaaagttctaacgagtttcacctgataaagtcatttatcccgagaatcctgactgccacccgatatatgtgacaaatctgccacgttcatcatgagaatcccaactactcaatccatgtggcgaatgcgggttggtcggcaggtctaatagctggattctatttcaccccatactactgttttccatgggaatattgcttcattttgctggttactttgttcatgattattatatatattttttcaaaaaaattaataataataaacttcaaagtaataaatgatgcccttaaaaagtttaataaataaaaaaataaatgaagttgttgttgataattttaaaagggtttaatgatgtggtttgagtacaatatgacttgtcattatgggagtacgaacactttacctaactttagctgacaacttagacatttacctctattcatgtacaacttttcatcattttggttctctaattttttttaaataaaaaaactctaattagtaaccgttgattctaactagaaaagctcttcgttacaaaactatataataatcacttattaaatatggtcaaaactctttcaaaaaatatatatatttatatggtcaaaa

SEQ ID NO: 393958 - DNA, 748 bp, Cannabis indica
ccatgcttgctattgctaactcctgactccaacagtcaaatgtgttaaagagaaaaagaaaaaaaagatcagaactttcccgagaaagtgaaaaggaaaacagtagagaaaatggggatagcggcaggtattggagtaatcctaccattcccattctactattggttatggagttatccacaaacatgggtagacttgtgtgggaaagctcgagacccatcaaaagtgatggctttggtctctcatttcatcaagctaatccagttcatctctctcttctcagtctcaaccctttcatggcctccacctctctacttttggccccttattgcatttggccagtttctcaatttcaggtctgtgaaaaataactaaactctgtatttctttttccatttttaaaaagggtttttctttttcaataatggtgttgtttatctttaatgcttttctttgttcttttaagaaaagtcttaattggggttgtgagattagattgttaattagtgaaagctactagctttaatgatgtcttgaactttgttgtgatacacatcagtatgctgatgctgttcaattcatgtctgatcttgtttgattctttcattgaatcattaacaagttaattcaaagtcaccattaattgttcaacactagaaaattaatgggttgttgtccctatcaattagacatgtggggatcctctctatttattaaagacttgaatttttgggatatatattggggt

SEQ ID NO: 393959 - DNA, 679 bp, Cannabis indica
ttcatgacctagactaatacaaaaattactacgtgataatttacttaatatttaacaaccaagtacttaacaaaattttaaaaatatgacttaaatattatgccgcataattaacttatgtatttatttgtaactaaaatttaaacttaaatatttatactgtaaatttatactgacaaattacccttaaaaaaatctctaacaaaatgaaaatactatgttaaatcactataaggccatcctcagatggatggtataaaatttagacgaaaaaaatgcaatactaaattcactcttttaacttgagatattgagtaactaatctcacattctactttaaattaaaatattttttttaaaatatgtgcaatcccgtaccaaattgtgctaacggtatctcatataaaatggtgttggaaattttaagtgtatactttctctctaaggttgagatgtaaaatggctttaaatttggtaactaagttagtaaatgtccactttttaaaaaaattaaaaaaaattgtcaaatctaataaattagctaataaaaattataaaaataaatttatcacatatttttttaaaaaaaatatatataataataaaaattaagttacataattttttttagtattgcatattattatatggtaacaaaaataaataaatatattagatc

SEQ ID NO: 393960 - DNA, 1092 bp, Cannabis indica
gatgatcctaataatattctacttccatcacgttcttaattctcaaaagtcagaatccaaactccatgtttgacacattaattaatttggtttgaccaaaattttgtggttctagttccaaagcgtgatccatacttttgtgtaattcacatgatgagcattaaaatatatccaaagccgcctctaatatataccagttggagggagcaaacgctggtctaacacatcctttaagagccattctctattgtcaccttttcctttttatatatgaccgcgtaagaaatactttttatttttctaaaaattctataccaaattaccgtattgaaaatagagttgaatttttttttcatctgtatagaactgactattttgaactatgttttcaacggcataatttatttgttataattacaatctacattactatacagttatgatttcttaagtattgaatactaaaaattgtccctacactaaatgcaacaatgcaaaagtgatagtctttatctaagaagaaattccttaaaatcataacatacataatcagtcaacagttggactattattagcctataaattcttagagagatgtgaattatttagagtaaaccattgctctttagggaaataccaaattgtcttgaaaagtttggaaatttgtaattcttactttgatatcaataaaatgcatattctctaattatgtgaagaagagaattggatcaatggtaatgcgaagattcattactatcaatacataattagtcaactcactgttcaatgacacatggtagtgttgtgtaggattggtggagagcaattatatatagaagacagaaagtactttctttgacaagtaattaaaacaagttaattaaagaaaatgaaaaaagaagagaaccggtcagacaactgttcgaccaccccagctagtgaaccagctgagaacgatcctctacagccgtgataatccgaagaagatctgaccgttaatcacgctctgatcggacagtcatgattcatccaccaggtttggtttcctgtctcctttgaactcaaggaaacagaggtacgagcctatagaac

SEQ ID NO: 393961 - DNA, 1429 bp, Cannabis indica
ttggataaaatatgagaagagctttttttgatttaaaaagagctttttagagaagcaatgactcaccaacttttttaggaaggacttctaaaaaaatacgggaagctatttttttagttaaatgaatcttttataatacctaagttatcttttttttcttaaaagaaaataattaaatttttagatttttctatttttttcttctctattgttacgttagaggtttctttttttagtaaaacattaaaatttcatcgtttgttaattaatgtaacaaacaaatactctcttgcaaaaataatggtgatggcatcattaacttggagttaatccatcgagactcaccaaattatctctattctattcttcttcacaaacccattggcacacttatatatttttattttattttttaagtatttattttttttaaacaagaaaaagaattatattattattattattaacaaatttgatatatattatatgtaagagcttttatattttactaccaaacacttataaaagctctttaaatggagaagaagttcttttaaaattaaaatccaaacactaaatgaaaagactcaaactttaacttctctttttcttactgtctaaaagtaaaagtataagttatgtctaaataaagctcatatataagatatagtcttattggagcttccttaaataagaaccaaatacaattgaataagcatcagattttagtagcaaaaattataccaaaatattgtctttttctttcttcttttctttttatatcttttcactagttttggtgtaaataataccatttcttggctaaatttcttttaacaagactaagtgttgttgatattacatattatttttctgatatattttttaaataggaagtttattattcaactgataatatattttactaatatattaattctcaatatttgttacaattaattttttttctttttacttttttgtaatttgatagtatcttttatataaagttattatttttttttttatgtaagttaggctattaattattggataaatattattttggactctatattttgcaaaaattacagattagacctttattttgtaaaataataaattggaccctatattttctaaaataatactctgaactaattttttgtcaaaataaaatttaataataacctaatatagaggtgttatgacaaaactggtcacgttttctacatcttttcgtgttacaaattgtcttcaagttagttatactaaaaaaaattgttgaaaaattgaactcagggtcctatttgtactattttagaaaatacagagtcttttagtccgttcatcatgctcaaatctatcagaattcttctctccatagctgctgcttttgattttaaaatctggcaaatggatgtcaaga

SEQ ID NO: 393962 - DNA, 625 bp, Cannabis indica
tattgccacgtcaaggtgcaagaaacaggattgtgtagtgacttttttggaaaccaaatataatcagagagtaaaaaagataagagataatagataataaatagatagatttttacgtggttcaggcgttaaagatccttagtccacgagtctattgtttgacctctttggggaaatgtttatgagattataagatggttacaacaaagactactctgcttctcttaagagagagctttgttagaatttttgtagagtaattgtaagtgaaaaaccgttctcccccttctttaggaaaaataggactatttataggcacacattggtaaagggcataccctttacccacctagggtttcatgttggaattaattttaccaggatcttagatctactcacaagtatgttgatttaacaacctaaatatgaacttctaaaacgataaacaaaaaaacacataaaagttaagaataacttacagtgatggcagcaaaattaagtgtctccttccactcagatctctaaccctttattcctgtctgcagcagagtataatcaagatctgagcgtgaatgtccttcaattggatgtgatccttcacagtcttccaatctatgattgaggt

SEQ ID NO: 393963 - DNA, 1165 bp, Cannabis indica
gttaattataatctcttattataattttttaatcaatcccaacgtttaaaattacatatcgaaacatattttttttcatagtggtattggtatgattacaatattattcctgtaaatttttgaaagattctaaataatttatagtaccgaaaatagagtttctaatattccaaaattaacaaaacgaattaaaaaaaaaattaaatgtatttttaatactataaactattttagatttttttaaaaatttacataaatgatgttgtaagtagaccgaacaccgccataaaaaaatattagcatgtactttcaaatacgaaaattaactcaatcagagattataataaaaagttgacgatactaatctcttattattatataagcatctattttttatatatacaaaaagaaactcttagaaaagaaatatatatttttgaagtgtaattgtgatccttaacaaatttgactaaaaaatgttatattctctggaaaaatttaaatgatatttattttctttaatttttttattgaaacacttttaaattttgttttttttggcacgcattttaatatgtaataatagtcaaatgtacacacttattgttttggctattgcgatagagtgtaataataaaattaaggtattttttttttatttttatttttatactttaaatataattttttttttacgaaattttacatagaaactcttattgtaactagtgctgcaacctaaattgcaataaaaaatcgtataaaaactctattgcaattagcgctgcaaccactttaaaaactcaaaccgtaaattttaaaaaaaagttaaaaaaaataatatataaagtgattcccctaaaattaatagttgaaagtataatttatcttatatcattttctttattttaatattagattttaggacaatttgatttaataatacttatcatcataatgtagagatatatgtctactaagtaagaatagtaagttgaaaatatttagattcccaccccctaaaaaaatttactacacaattagaagtcttatatacactaaaatcacaaaattaccctaaacatgattttatttattaatttatattgttgctcctaaaaatcgcccaatatacgtggaccagtcaggaagggactacgtggat

SEQ ID NO: 393964 - DNA, 766 bp, Cannabis indica
agtatatttgaatggatgcgcaagaagtatgtcaatgacaatgagggcatgcaaagccttaagaaatcaaaatggggtttttttgcaggaaagctcgaagtttttgttttgaatgtaaaaatggtggaaaaatggttctttttttggttttataccttgagtttgatcgccgtcagattaaaagaattgagatccaatagataggaacaagagagaattgggaaaagatgtgtcaataaatgctaatgatgtgcctcgaaaccatgaactgccaaaatcaaaaccatgaaatttttcaaattaggataagacgaatataatctttgtaataatttaaaaagtaatttttaaggggaaattgttataccaaaaatttggctgtactttagaaagtgacacgggtcaatctcgtggagtataaaccaacaaatataacaacgattgtatcattaaatgcaaaatgaaataactcattaaatatagaattaatagagtatattcataactcgttgactgtatagttctaggcacaaggatacacaaactataaattcctatgttgatgagagaccatcttccttggaaggcataatcctgagaaaactgcgtgtaatctataccgagacatacacctcgctacatataaggaattattggtgagaaaaatcagcgcttgaaacacttagcgtataatccacataataataactaagtgtaacaacttagaaacatgaaggacatgattgtccagtctgtgaggccttat

SEQ ID NO: 393965 - DNA, 1378 bp, Cannabis indica
agaaaaactcactgaggacacacaccaagcaaccaacttacaaaactttaaattaaaaattgaaggcttccatcacacgatctaagaaaccccattccatgcaatcataggccttggacatatttaacttcatgcccataaaccccacaccagagcatttcttattaaaagaatgcataatttcctgtgcaatcaagctattctcagcaatctaacgacctggcataaaagcagtcttttattcttaataatgaccaccctaatagtggctgctaagagtaggacttataaagtatgaaacaatggtataagatcatgaaatcggaatgaccttgactctcgcctaaacaggacaacgtcaaattctcttttcgatcgaataaaaggttgctagaatagtatccattttagatgagctgactactctattcaatgaatgatatctttgactctcgcctaaatgggacattgtatcagcttattagaaaccttggaaaataattgaatatgttttatttttttgtatttttgcgaacatatttttttacttgttatttttttaatttgtgtatgaatttatttgaaccaagtaatttatttctgtttattgatatttgtagtgtcaaaatgaacgaccatcaccccaatcctcaactattatatgcctttgcaaataaactctatagtgcaaagatgtctcctagtcaaagcgtcacttcacacttacttttgatgaactaaattcagaaagcaaacttgctgggaattgttttatcaaaagagaaatgggttcagttcatattcaacagcctttcacctgagtataacaaatttgttgtatcttacatgatcaacaactttaactcgtctgcctggataagctagaagttgaaatgcgtgcttatgagcgaactcgtcactgtcaaggagagctcgctctagagttgcagataagggcagaaggaaagctgaagatattgaggatgatacctccgacaatgatgcttcttcgagttcaattttaagagctagaattcaaattgaactggcaatagagacaatcaaagaacaactagcaaatgtattcttctatgttctcactgtggagagaaaggacattttaaagcaacatgtcccaaacttctgaaccataagaacgaaggtaacgcttttgttttcgaatcatgtgttttagagaatgacaaatccatttggattattgattctggatctactaaccatgttcgctcttcattgcagctgcttgaaacttgggattacttaaatccaggggagttgaagctcaaaattgggaatgacaaattaatatcggtccaagctagagaaaaagctcacctcaagtttcagaataaatttt

SEQ ID NO: 393966 - DNA, 661 bp, Cannabis indica
aaagctaagcggtctttacacatgcttaaaccagctcaaacaactccaaaccaacctcagaaaacataactaaactcaaataattcctacagttacctaactcagaaattgcatgaaaacctaacctcaaaaactagaaaattcaaagaaaaagaaggaaaactagcttaccaagagttgttgccttcaatccttatgagttcaagcaaaaaaccctctgaattgctaagaaattgtatgaaaaactcaagcttctatgattctaggtgtggccaacccaagagagagagaaaaaagtttaaaattctaattttttttctaatttccttcctaataaaataatggaaataatttatttttaatcagcttaaataaaataaaaactaaggattattactaatcaaaaatcttactagagacaaaacaagggtaaattaccaatttaccctctttcttcaccttgaagtaactttgccatttagggatattttggtcaaatctaataatcatgaaaaattctgacataccatatgtctatctataatgcctcgctatttctaaagtactaaaccataataaagtgactctgtaggccatacgttgcattccactgttaccaggcataaaatataaaaattatgaaatttcacatagaacataa

SEQ ID NO: 393967 - DNA, 918 bp, Cannabis indica
ggtacttatgccgctaaaaataaacattgagattatgccacttacaaacttaaaactttagatacttataccgctatttaaccttttttaatatataataaataagaaatataatttttatacaagtaaatttattatattctaatctaaaaagtattttcaaaaagttggcatgcaccaactttaactgtagcttttctataaatttttaataagttgtttttgaattgtttactaaatattttttatcacagctttttcaaaaaataacttttaatttttccaaaaaagtgtgtcaaatgggctttattcttttagaattctttcagttaatgttttattgttatttcttttttcttcatttttgggtgtaataaataataaatctcatatttcaataaatacactttttttttttcaaaaataaaaaatatgaaagaattacatcattaaatgcatgttttcttgaaaaggaattaaatacatgtttcaatatatatttagattattattttggaaaatttagattaaaatttaaaagcagagcagattaaatttaataagtacgatttagttatgtttttaataattagtgcaatgcaaaataaaatacattcctaataatacacacataccaaaaatcacatgacttttaatctttactacatatgtattctttttttacatgagactttacaatatatacttatgaagaatactaacatttttccatatcataaaagatatgatgatatggtaaaagcacgaaacatatgttggacagcacaaaacgtgaaaacgtaattactttattattataaaagtaattacaccaagacttgaatacttttactagactacaatacaccaaacactcacgctcttttattttatcactagatacctttcctacacact

SEQ ID NO: 393968 - DNA, 1630 bp, Cannabis indica
agtaatttttataaatatgatttttagtatattttgtattttgacttttattatttataatttttttttatagatttttgaacattttgagataaattgtatattcttcacttttctccccacaggattgcaacttcaaatgttgtgattgtctctctgagtagtaccaaatatattttgtaatttttaaaaatacgaacagaaattttaaatcaaaagcaaagacatgtgtgaatataataccctctaatacattattcattagagttagggctgaaaataagtgtgtatacgaaatgacaccttctgcaaaatttttaatgtatgcttgcttttataaaaatcatgttacttgcaagttagataaaaaaaaaataataaaaaaatcaaaaaatagacacataattttcaatcttaatttttttttttgtaagtaaatgacaacaaagctgaagtcttacacgtggctcattaagaagttttttttttctatagtagaagtaagtgataaagaggacatgttcatacttatatatatagagagagcaactcagtgggacaggtggcagcaatttaagcagttatgaaataagcagctgagaaggatgacatccaaaaatatatagagagagatatagcaaaagagtgttactttgatcctatattgatatgttgttatttcgagaatttgaaaaaattttgacaacttctttttatataaatgacagtgtatatattatccttatgttatatctcatcaaattttaaataatttataatattgaattaaaatatagtacaagaaagctagtcaacagctcctctatatatttaaaacaagcacacaagtaactaacaatttaaactatattctcaatagcgtaaattagttaatattttctataaaagtattataatgtatactattatataaattaaaaaaaaaaagaaattataaatttcaataaaaacacccttacacgaatagagataaaaggtagtgtccctactatataataatagaattttctcaaattagttatatattaaacttaatttgtttaaattttattaatgtaggaaaactttaacttaattattagaactttcatagttattatttgtttcatatgaagcctccttgtctcagaaaccgattggatctcctattagtcatttactaaaaattattattaatttattaattattttttacttaattattactttttattttattataacattcttttgattaattttttttatatcttataactatttaaaaagtaatatatatatatatattagatagatgttacgtgtcaagtcacgtatgttaattttattttatttttaatatcataattttaaaattaataatattcaatgtagtgataatcattgaaatttaaaagcataatagtgatttaaataaaaacaaaaattactattatattttgtaatagtaattaaaaaaattattattcatcctaaatttatcttcagaattaatgaaaaatgctcatctagttaaactatcaaaacattcaaatttaatttaaaataatattaaaatttaactaattctaaatatcaaaatttgaaaataattttaataaaaaaataa

SEQ ID NO: 393969 - DNA, 500 bp, Cannabis indica
ttaaacacttttggcatttctgcagtgtgtgtatagcatataaacaaagatagtcttttactttctatcatggtatcagcagaatagaaaccctagcctcccttccttcatcttattcatgttccatggctccaagaacccgaaactccatggccgctgcctctgtcaccgagcccaccaccatctccggccacaacatctccttcgccgaagccattgtcgccgacgtcgaagcttcacccgccctacctccgactgctcctatctcgtcggtcacgatcggagctccttctccaacgtccgatcctcccacttctggtgtttttggctctggtcacgttgcgatctccccattagtggaacgatcggaccaccctccacagctccagttggctcccactcgacaccggcgccatctttctcggcttcaccctatcacaacccgcttccgactttttctgccaccatcattgtaacgccctaatgctaaggcacgctac

SEQ ID NO: 393970 - DNA, 990 bp, Cannabis indica
ggaataatgtgacacgtggcgagaatagaagtcattagatggacaaggaattcttaaatactcttctcgaaatatactaggcggaggtccttttagtagccttcaggtgctggacaaaacatatgtcgagctctgccaagcaaccaaggagttatcatgcaggataaatgtctgatcagtgactctcacaaaagaaagtatccaaattcattccttcaaccgaattcctcatgaataagtcaatcaacccgcttataattgcgaaattgcaagaatcagggatatatgaagaattcatgagattgacttaatcaatattaattatttattatgtaacaaaatgtaatattagcgacatcctttttcttataaatagtggatcaaaatcactatttggagaggggctaggctttcataagagctatcacgctgtcgaaatcactgtaaaagttaggcactaataagaaattcgctggaccaggttcatgtgatcttgcttgtttctaaaaacatacaactaaaaggggagtaagctatcgatttttgggagaaacttctataatctttatgtgtcatttataatttttgctattttttattccaaatatgcgtaattgttgtctatttgatttcgcgttgttaattaaaaataaagccaataataattttttttaagaattattattataaattatttttaattatcatttgcaagactcttgatgtaaagtaccactaatattaggaatgttcattggactatatttaatgtttttaagcctatttagatccgatacacttatatattagatattatataaattttactattcgatccgatctaataatttcaatcacctattggatgttggattggatgggttctatccattgaatgtattttatatatatttattagtttaatttgagtttattcaatattttagacctattattttttggatcggatcagatatatctaatatttta

SEQ ID NO: 393971 - DNA, 649 bp, Cannabis indica
gggaatcacagaaaatttatcattcgacagaagcaagttaataatagcttctttatcaccatcccttccatagacatcagattcttccaccaaaggagcacatactctttttggaagcttatgatttttcacacgttccaaaccaagatccttattgtccatcagaagcttcaatttctcaagtgtctcctctatctcaggttttatgttcttatcaaaagaagttaaaggagttgatgagatgagtctcacgagtgcctgacaagtattatgcattagattaaaattgatagacaaagagtgaggaattgtgttaatattctgatagattgaaaatgacttatacaataaacactctaataattcaagtaaatagtgtagaatattctcttactaatctaatgacaaagcaaatcataataaataagagaaatccaatccattgatttattagtaccttactagtacaactacatcctctgtgagattcaccttcaagctcgtttcgccatgcttctgagtcgatcctgtaaaccaagtcgtctgcatcataaatgacatccttgagatcatcaagccacttccttactcttgggtctttgatgagcttctcctcagcatcaatgagcagcagatcagcagaggacag

SEQ ID NO: 393972 - DNA, 632 bp, Cannabis indica
aattaaaaaaaaaaattaatctgcacctaatttaaataatactagtttttaaataaggtataatatattgtaagaaactaccataaaaggttgggacggggcagaaaaatattgtgaggggccaatatgtaaaaaaaataataataaaggactattaaatatttttaataaaaaaaaataaaaaaaataaaaaaaattgtctagcaccctctactttatcatgatgagatattactaattaaaaatatttttaaattaagtattaaacctcaggtaatttaatttaataattacgaaaaaatattactaattattcccaatgtcctacttcaacgtcaagatagtactagatatcatagctgtctaacacatacaagtggtcggttagtatgcatatataatttagttatattataaagtatgaaaacgacatatttataacactaatattcattttgaaagtatttgcaaaaacaagagaataaacaaataggaactaaagaaaaaggtagataatcactttaggctagttcaagtggccatagatgagtttgtgttggaagtttctatattcgagtctcaaataaaatatagatgttatatataaacgcttaaatgaaaaaaaaaaaaaa

SEQ ID NO: 393973 - DNA, 1299 bp, Cannabis indica
ttaaaataaagaaataatgtaaaacatcgatcgatgtagtatatttttattttgattcttcaaataatttaaataatctgtaaattagaataagaataagagtgctctaaaagctgtcacttaagcatgcatccatatatatgaaaatctaatttagaaatcctctatgtgaatacatgcacaaatatattagctatgtagtgatcttaaaaataataattaataataacaaataagtgaatacatttgacattattatatgttattaagagattattggttttggtcagataaaaggggttcttctaaatcaacttgatgacttcccttctccaaaaattgatcatcatcatcatcaatatgttgttccctctgatcatgaagactagtatttttgtgtagattgggatcaaagtccttggctttgccccataacaagatatataaaccaatgatgacaccaattccacctaccaatctgtagtgatataatcaaacatataataaataattaattaatcattcttcactaaaaataatttgatgaataaattaaatataaattactaaattaccctccagtataaatcttctcttgaagaaatatagcagccaaaatggtgactataatagtgcataaaggattgaacatagcagagaagaggggacctctttgagatatgacccatgcttgaacaaagaatgagaccccagatcctactattccctgtgctcatgtacatatcaaattccacaattattattattattacatacattatttgaagctctatatatatacatatcatttattgtaaatgaattacttactgagaaaaaagaacagccaagttccatagcagtggtgagcttccaagcctccatatctttctctataaaaagtgttattattgctgattgtattgtggccatgaaacacatccaagctgataaggaaaggtggtcaggatagcttgctgaggcaggaacctattttataatttatatataaaaatcacattacattagattagattgtaatattttagccatgacacttagtttatatttaagggtggtttttattggaccacattcaatatttttaagcttattcagatcccatctaattatatattagatgttagattttactatctgattcgatccaattaatttatttagtcatccaatcaatccaacgtccattagatgttggattggatccgttctatcaattggatgtatttcatatatatttattggcttaatgtgggtttatcttatatttcagaccta

SEQ ID NO: 393974 - DNA, 578 bp, Cannabis indica
aggacttttaaattaaaaaatgatttttcatttcttatccaaacactagtataagaatttttttttttaattctaaaaattttaaaaaaaaaattaatacttatagaaactaagtgaaacaagactatataatattgtgcataaaattgtaaattgattttatattttcttaattgtcaaaatattttaacaattaatatgatataaatattaatggaatatatcacttataaatactagataattactttccgagctcttcactcattttgtactaagagtaaattctatctaaaaagataaatgtaaaagtcatcagtggtgcttagcacccttctacgtatcaatatagctattggtcaactaagtatcaggtctcatataattttataataatttttaaggaatatcgttagctaatcgcaaattgacacgtcttaaaagtgctaggcaccactgatgctcaataggattgctcatctaaaaagataaagagaagtgaagctcaattaattactcaatccgcatatactatacactcgatttattattagcaaatcgattatatatatatatat

SEQ ID NO: 393975 - DNA, 622 bp, Cannabis indica
ctcctccataactacgtcttaattcattttgagctcccccacacacatatataatttgtaatttgtatggtgtttgttatatatacttgatgcatgtgagtgctactttctaagtatttatgatcatttgaggctttttcttattatctataaatatatacagtgtttcttagattgatattaatattgttaggcaatttagttatcaaaataatattatgaattaaatattatttatttttgttaattttgtgactttgatttgttctttttgtttaagaaacttatcttaccgagaagaaatagaaatttaactatttttgaaaaacttgatttgtttctttctctataaatgttaatttagattttattatgtatatagcaaattaaatcatttttatttggtaggtattaaagagcaaatcatgatcttggtcatttttgcaaattagagatttttttaggaaagttttagggagctttgaaaacatgtttgtgtttgtctctagggtttttatgttctatatatataggacttagagagtagtcaaatattttttatatcttcatatctatctttgtgagaagagtgtttcatttgtaaaaaaaaacctagagtgtt

SEQ ID NO: 393976 - DNA, 849 bp, Cannabis indica
  modified_base (80)..(80): a, c, t, g, unknown or other
gtaaacaaaaaaacaaataatacaaaaacaaaacttaaaaaaaaaaataaaataataacaagaaaaacaaaaaattaaanactatagaatataaaagtacaacactaaaaaaacaacaaaaaattatattttatgtaaataaataaactagtaaaaatatttaaaatttcattacaagttattttttgttaagttttttttttttttaaatttattccctcttttttgtatatatataaggtaagatggatcccaatttattcaaaaatcattgccataattatttttacatttcatttcatcatcatattgataggatcgagtgtttaattaattacatatatatatattatatattaatgaataattaacattatggtcgatcttttatcttcttcttcaacacatgcaagctgactttagtaaccaaattcaaagagatatatatatacacataaatatatgaaaacaatatttccttattgaaataaagttagaacaataaagctgaccatatggttctaacagcgtttttttttttttaattaatttggtcatgaatgaatatatataaataaccaataaattaaagaaaaacagaaaaagcaatggattatgtcaggtcaatgcttcatcatttccctagaggatttgatgatcattgatcgatccattgccttgtaaaaaaaccatgctaatatatatatatctacagtagaacctctattcaagaatacacttggaccaagtaaattatattctaattgggaggttataactaaatagagttacactagaaaaaaaaaattaaaaaaccaaaaaatatcaatgtaataataataataataa

SEQ ID NO: 393977 - DNA, 598 bp, Cannabis indica
ccatggctcgatgtaagctctccaagagtctagatgtgaactttggatccctatcaaaaactttggactttgagacaacatgaacaaaaactatttctctaacgtatagttttccataccgatcaatggagaaatttgtctgaataggtaaaaagtgcgctgactttgtaaacatgtcaaccattacccacacagagtcgtagtgtcccatagtcctaggtaatccaactacgaagtccatggcaaagtctttctatttccattctagaaggtttagtggctgctgaaaccatgcaagcctttgatgttcagctttcacttgctaacaagttaaacacttcgcaacatactttggtatattgttcttcattccaagccaccggtacattgacttaagatcttgatttttgttgtccccagatgactagaataacgagtcgtatgagactcattcagaatttccctcttaatatagccattcataacacaaacacaattcataaattgtaacatcacattactatccacttcaaaatcattagtcttcccaactgaaatcttgtctcgagacttcaataacacggtagtgcaattgagt

SEQ ID NO: 393978 - DNA, 950 bp, Cannabis indica
ttgcatttctaattaattatttgatacccggctaagctcatataaataagtgatttagtggttgattgggggaatgagcgtagagtggaaagaaaatccaaaaagagcaaaagtacaagtgccccttcatacccggtttgttgcagttgcagatgagatgagatcattcatgagaatagagtaaaggggtaaaaagaaaacagcccacttcatattgatattgttaaagcttggaggcctacatgtttctttctgggtctcatctcatcttcatttttatattattaggtaagctactattttcggtatcccaatctgggaccctctcccccctaaccctcctcgtgaaatgtttcttccaatccaaactattttttcctctcttttttctttcaccactttgtgtctcacaactaaatcatatttttttggctaaacgccacaaaataataatttatttgactttagccaccttttaaataaaaagagagttatttgcattaagaagagactgaagtacttttaaattttatttcatatagatttgacttttgtaagctagaaaagcatgctaaataatccataagagaagacattgggtaatccattatggcatgcaaacataaggtaaatttgagaataaggacaaataggattgttagattgaatcccctcaaaaaacaaaaaaaaaaaaaggattgttagattgaactttcaatacattaattatgaatctatgatacaagggtttgacaaggataaaattccaaatatcgtactttaaaccaggtgaaccaccgacctctccatcattcttactttttagcctattctgattaatatttgaatttttttgaaatttaaaatgaagttacaatttttcagaatttttaccgttaaactaataacatttgatttttttttttttcgaaatataaatatatatatat

SEQ ID NO: 393979 - DNA, 804 bp, Cannabis indica
ttgccgcaaatttccctatataaatcttagttcactatattacataaaaaagttatagcacaatcttagtttaatatatttggatcctccttgtagtcacttttgttttttaaaaaaaaaattcaaggttttacatatattatatatatatatattaataaataactatatatataattatgtacgtagtgattggtttaaatttatagaagttattaggatttattttttagttaatttttttagaaattactacaaatatatagtgtatagtaccaattttaggtgtaaattgataaagaaaaactatcacgataataagaaataaatcaaatattttaaaaaaataactaactagaatattataagttaaaaagtaaaaaaatacaattattaattattacgtgtcttcttaaatttatacaactattatcatagattaaaaaaaatgataaaatttttgacatagtatattttttttttcacaaaagtgttaaaatatataatacttgaataaaaaaactattacaatcaaatattactttaaattagcttagttggcgagaaaattatttattatttgaaggtaaaagtgttaaaattaatattgtgtcaaaatttaaacaatatttttaaaaaaatttctaaaagaaaaagacatgttttaaatttttccctagatctctaaatatcttgagatttttctgttctcctgagatttttttttatatgtcttgtgatgtattttttagtgagtttactcttaaggttattaaggttttcatggttacatttttattgtaa

SEQ ID NO: 393980 - DNA, 1299 bp, Cannabis indica
cattacctccaatcaaataccacataaaatttgtttgtgagattggaatgtcactgccttttcctttaagacaagtgaagattgagattagagttggggtctaaattaatcaaatagtatatttattggtttttcacgatattaattacaaacacatgtgggatgcattaaaagatagaacattattaaggtactgatattttcaatgtggtctatggaactcgaattccatgagtatagtatagagtttgtatatttggtgaagaaatgaatgtttggaattgaacaaacatatcgaacaatgtattgttttcttttaacaaaagaaaagcacaattcatttcaaaccttttaataggtagacaactctttgtccctccactacacaaagaccacattttataaatagccaaacagaacttctggaagttaaagtgaaatacataaataaacaactgaaatgtattagagtatgtttaatagaatccaatgcttgcttcgttttctattttatttaaagtaatttgcggtgaaacctttttatgttttaatttttatacatttaactctctttactgtttttttttaacaaaatctgcttatgttttaatttttatacacttaacccccttatgttttctttgtggaaaaactcctatatgtttatttttctttacaaatttgacacgctaattaaatattaccgtaaaatatcaactggatgaccactatatacacatgcgtatatgtaatagtaaaacctcgaagtcgatacaatagtaatccagttagtgtttaacggtaatatctaactaaaacaataaatttgcaaagaaaaataaacttaaggaggtttcgcaaccaaaataaaagataaaaaagttaagtgtataaaaattaaaacataagggggttttgccacaaaaatataaaaaataagggagttaagtgtataaaaactaaaacataaaggggttttgccacaaaaaaaaatataaaggagttaaatgtataaaaattaaaatataagaagatttcgccgcaaattactcttttttatcttctccaattgtccttggatggagaaaattgctacatgagcttaaagaaataaagttgaactaaaataattacatatctattatggtttgtatttttcaaaaagagagaataaatggtaaatatttggatccaaaaaattacacaatatttatcaatttaattgattatacttaagggaaatttgattttctatacttacatatacctaatattttatttttaaactaatacatatca

SEQ ID NO: 393981 - DNA, 633 bp, Cannabis indica
gtttttatgttccggcctaatttctacaatggtcatgtctcttgaagtgagaaacaccgatccttcccttatataaggggtaatacatgacctgggaagggaatccaaaaatcaacacttagagtgcaagaactttgacatttttattccttgcattcaagagtttattcttgactttgcaactctgattaataaaatacaagggaagtaggctttcactgacaactgaggttgaatctctttaatttatggtgttctttattagcatttattatgattttgaataatttctcatttattacgattctgcgttaatttactaaaaatctagtcaacacagagtatgatcatgcatgggacaaggcacacttgtgccaagggccaaaaagaaatgtcaaaatgcacatatttttagtatttttaaaaatataaatttttctttttaaatggacctaataaattttataggagttcttacaaaaatattcatcttttttgttatttttacatttttgatgtcatacttttatttattttttttatatttttactgcactaagttctcaaaaatattgtatttcaataaaataaaataaacaactaaggcaactataaaacaattatagaacacct

SEQ ID NO: 393982 - DNA, 863 bp, Cannabis indica
aaagaaaagaaaagaaagttataatgatttctgagatatagatagatgatagatattgcgtgtaggaaatatgtttgacaaatgaagctggcttttgggttcgatacataacatataaatacatggaaatggaatattgtgaactatttacaaaaacatgaccgttcacgcacgcttcaatcggatgagaaaaagtaaaactaggagtcttctttttcttttacttggtgttctacatgttataaattattgttgtggcaatggaacataaattttaaagagaattagagccatgcaaattcgtaatctatcattctatttgttgttggagaaattttgacaacactaaataaagataaaaaaaaataattatttaataaaagagcacgaatacttaacctaaattgtcgagtattcaaatgagactatacagacaaattgggaaaactagtaaacacaatgaacacgaagaagtatagtggttcagtcagatcacggtatacttagtccactgttggaaagatttctgtcttgttcttattcatattcatgaatcactcctttatatacaaagcaagtgttcatttgattacacagaacttaattattgaatcattttacattgaatattagcattaaatttaagaaaatgtaaatagaataaataaagaacagtttcaatccgttttactaaatacaacaacgtacgcgaccttcatagtgtgaattgtctattcatatactcgcacaagctcgcaggcttagggtgtgttcttgtgaacaccagactaatgagtctcgtgttaagatatatgcgtcctaatcgagtcacatatatgttggatattattttaccaggatct

SEQ ID NO: 393983 - DNA, 710 bp, Cannabis indica
gggatattgtcgttaatagttttgataaaagaaaattgtatttaaaccaagatagatatagagagtaactatatggggaaagtgttttgtctataagcttaaatttgaatttattgttttcaatttaataatgtttttggaagagctataaatgtttaataatataataataattttcttcattataattaatgatgaaaacccaattttttatatttatattgttgtgttgactgtataataacatggctgactttatgaggcattgaaaataaagaaatagtagtatgtagatatattaagatggataagggtgtatatgtgaaagaaataagaaagagaagggtaaaatggaaaagaaaagaagatacaggagtcgcaatctttgaaaagtggagattattggtggatcatgtgataaccctaacaaactatcttgtgaatgtgatcatataactccaatccctttcccaaccccatcaactatattatattctatacatttttatttttttatttttaattagtttattatattatatattattaattataatcaaaatatcaacataccaatgcacaatttcatgttgtatatataccatcatatacgagtaattatatgtatacatgatatgtttaggtgcatattttactctttttttttattttattttttttattttaagcgttttatatattacaaccat

SEQ ID NO: 393984 - DNA, 880 bp, Cannabis indica
atatggatattattttattaaattgaattgttcatattatacaatcttgtaacttttaaatataaattaacaaatttttttagtaatttatgaaatagttgattcatttaatttttagttacttattcattaactaggtgtttctctttttaaagttaatctctatattttttatatattaaaatgatatccttaaaaaatatgtcgcgtataatttttaaatttaaataatgattattagtaggccaaaaaaacctttttaaaattattataagagagagagagaaggagagaaaattaatattacaatttacccattttctaagaataatagtttaattataccttcatttatagaaacatattaaataataaaaaaaacaggataaaagattaaggattgacaatgtgtactaatgcctatttgagcaatacaaatcgatattgagagtactatttaaatgttcagggttatttgagtaaataaatagaaattgtaattttcttatatatataaatgtaaccacttttataggaggatatagtattattataaattttgaggctaatgttgtgttttttctatcttcaccgatggacacaaaaatactgcataaattgttcatactgcacctaaatatgcaatttaacttattgtactagtcttacatattgtttcttaaaatgtatacatatatctatattttttcctttgatgtgtaattgatggttttaataattaatgttaccaaaagaattgatatattgtaggcaatatagtaattgatgctgcattaagtttcctgaattatgaagctgatatctctcacttcaacacaactctcattacttgtaacgccctaatgctaaggcacgctac

SEQ ID NO: 393985 - DNA, 768 bp, Cannabis indica
accacagcaaaagctttatggtttgtaagcaaatggagcattcagacttgtttaattccgattagttccgagtgtgacttggttgattggttcttctctactgattttcttacctcaatggatggtgaggaaaagagagagtttctctctttcgttgccattttttgtgagtctatttggtgggccatgaacaagaaattccataagaatattgtgctgcatacttttttgttgttaaaagaaatttctcaaagggttcttcaagtggtgtcaattagccggatggcttcttttcgagatgcccctgtgctgaacggggctggttgcggccaacttccctctcctgagcataaaaccagaccagttttttacacatcttttgtttctggtttaggtgttggggtcgttgttattttctatgatcagggttggctgaccacactcaaaacagaggtgtttgctgttacttcagctcttgaagttaagactcgtgcaggtatctaggcagttaacctgtttattatatctaaaacaaatggtcaagttcacccaaaaaaaagtattcaatggatttgcatactgtaccacttccacatggtaattcactactttagcaatgaactatatacagtagaacctctattcaagaatagacttgggaccaagcaaattatattctaattgagaggttataactaaatagagttataccagaaaaaaaaacttaaaatactaaaaataatcagtaacaataataacaataaataa

SEQ ID NO: 393986 - DNA, 1141 bp, Cannabis indica
atttttttttttgtattgttggaacctttgaacaaacacaaacggctcaaaagccacaagagccctgcccagcagggaaaaaaaaaaccacaaagcagagacacagcttcctacatgaaagcaaacgaaaggaaaaaacaagctgcaaaaaacagcagacaacaagaaaccaaaggaaaaactgaactaaaacagaaaggaaaaactgaactaaaacagaactacaacgtaagactaacaaaaactagagaagactaatcagtagaatgaccatctgcagaaatcgtctgcaggaaatcatcaaaagtggtcaaatccaaaactccaaagatgttgtttcgatttgcctattgagccacggagtgggctacaccattgcacgaatgaggggtccaaataacatcatgaatgttgaaattccccgatagttcgatgaacctttttaccttatcttgtatattgaagtgcaggttttggatgtcggtagcgctggttttcaaagcgctgactgcatttagcgagtcgctctggaagatgacattcttgtaaccgaatttgactgttgctgccgccccctctaaaatagcagagatctctccaggcagcgggtcgcagtgattcgatttgaatgtgatgacgcttagtatagtaccagttgtatccctgaacacagcagcccccgatgcttgggaatgaccaatgccgatatctgagttgcaagcaatccatccttggggagggggattccattgagcattgggaggatcggaaggctctttgattgcagataattccatgaatctgcagttaatgtgctcaatgtgcaaagacaaagggattggctggtgtccatggagactaaaacatagtatttagttacaagttgtcactgatttagttttagtcacaacaaatattgtgactaaaaacatatttaatcacaacaaattgtaatttttgtaactaatacttttagttacggacattttaattagtcacaacacaataatgataatttataattaatcacaactttttttttatctttagtcacaaattttataaggagttcattccttaattaattttaagaataattatctttttaccccctatacttatgacactatactattatgcc

SEQ ID NO: 393987 - DNA, 2237 bp, Cannabis indica
caattcactttttgataatgaattagtaacaagttgccaataagaaaaagtttgcttttcaattctctttttgatattggactcaaaaacagagtttatcaaggcttctttcgaaacctaaataggagggcttaacctataattaatgctattattattgctgttctgatttattttacctaatttatgttaagaactacttatggagcctacaacatggggctggtagagtgggagattttgattttttttttagtgtcctaaatgttggtggttttattcttagctctccatagttggcggtgtgcctctccctccttaaagaagaagatatgtaagatcttttatttctggtggactgctgctcttggtttttctggttttattcttatcatttgacaaataatactattaaaattttatatcatttatttaacatgtaatgaatgatataaaaatatcaaactaaaaatcactaacgaaggttgttttgggctatctttgattagatctatcatgtttttttaattgaatgatttctcattaaagacacaaagcaaaagataaggcactatacttttgtcatatttatggagaaggcaagtttaacaagattgtgagctaaatagttcgcagaacataaaagagaaacttaaaaacattgacactcttctgtaagatatggataacacgttgacaaaccgatttgacctccacgttgttgaaaccaaggcgcgcacagagaggtaggccgtggagggctgccatagcttatgctactggtggggaaagggatcccagagctggaatagctgcaaaagccaaacaattacccactgatcatgcaacagagccccataccccacatgccgatttgcacctcaaaatcccgtatcaacatttagtttcaactgtaacgtcctaatctatagggacaccatgtgtgtggttttataaaatagtttagtaataatagattaattaatttataaaatctatgaacatattgaaacctttaccaaagtaaaatcctagtaatgaacaatataacaacactaaaactttgttctggagatccctgcaataaaagttttacaaaaagactatatacagtaataagtcaaaatacacaacagatacaatcaaaataacttttggaaactcggtacacaaaccggaaggatcaatatgtacattcactggagaagaccatcacctcatggttgctctaacttttccttgcccttacctgtatcacagaacactcgtgaatcacaatggctcaacaagaaaagtaataaaaggaatagatataataattaattatctattttgctatcataaaataataaataataatatttcaaagattttataatataatcaaacatatgtataagaatgagaagtaaccatcttattacatcacattgcttaatcagacaagtcgatgcttaaatctagtatccatatattgtattgcctaatcagacgtgccataacctgacactcccatatattgcattgcctaatcaagcgagcccatgccataacctggcatccatatatcacattgcctaatcaggcgagcccacatatcacattgtctaatcaggaaagcccatgccataacctggtgttataccttaaatttggctagaacatcagaggaagacacatgtcaagctgggaagaatatgaactcagacacgtaatcataattacatttgaggaggaattactcgttaaaagcataattaacagagtatatttacaactcagatgactgaaaagtcttatgcgagataaagatatacaaactgttgccttgcgcatcaacgagaaaccatgtaacttcaggtgtataagacaaggcactaacctcgattacgtggatgagatatatgaatgtgaagacacgtagcgtataatatgcagtatacaaactaagtataacagacgggtgaaccaaagcaagtgatagcgagtcgtccacctcgccataggaagacatgcacacgaaaaagattacctcgtcaccaaaaattgcgattgtcagatagggtgttatgttcccagagtaaaagcgacgagatttacattatcaaccttgggaagaaataggaaaagctccagctcgctaccaaggttataacagtgaaaacttaacacagtacacagtatgaaacttacacaatatttttaaaaaaattccaccccacaataaaaagaaaaaa

SEQ ID NO: 393988 - DNA, 887 bp, Cannabis indica
gaaggtttgcaggtagacataatatataataaagaaaaattatttgacatgaattttcatcttcttttatgcatctctaatcgttttctatgttatcacaaaattaaggagaaactccctcctacagattccagacttagaccggatcaacgacatgtagaaaatggagaatatgagaaggcaaatgctgagaaacaacgtttagagaaaaggcaaaggatggtatgtatgcatgcgacttatttgtttgatttgtttttgaaaaactaataagaaactttgggtattagtctatagttctacaccctctaaaagattattttggtagacttttatttgcttcggtatccaaaacagttatatattccaattgttttttttttcataaatatgtacgttgtacttatttaagatcacatgtaaatttttagaaaatttcaattagtttatagtagagaaaataaggttcaaatattgcgcgtgagtattgatttttcctatacacgtgtttagcaatcatttgaacttttatttttgcaactgtaaattatttagaattttctgaagatatacaaatgaacttaaataactgcaccatacaaaatcataaaaaactgtactgaaaacctctcttgattttacaaaatagaaaatagtaaattcccttttagatagtgtaccacacatacttgtagaaacttttcttcatctaattttgtaaaatatggcatggtaaaatagcatttttgagctactccacattcggtctagagactattttataaaaaagaattatcaaagatgacgtctcactacaaaaaaaagtatttttagtgacaatcttttagtcacaacattaattttttttgtaactaaatgtaactttt

SEQ ID NO: 393989 - DNA, 621 bp, Cannabis indica
tattttttattttcattttttttgtctaacgtattcttttcaatatttttgctcacatactcggacatggatcccagactcgaacatggtcttggatcccagactaggatcccgaactcggattcaaaattggacctggacccggacccgaactccagaactagaacttgaaccccaaacccaaacccagaacctagacctagaacccagacttggaccccaaacccaaactctggaccggacccagacctagacaagaacccaaacttggagcaagaatcggacaccgacccgagcccagtcctcgaaccccaaacctagacccgaccccaaactcgacccctggccctgacctggacccgacccggacccagatcccagacccagacctctgaaccagaacccaaaccccagacccaaactatggaccagacctcggagcttgacccaagcccggacacgacctcgatccgaacctgacctcgactaggatccagacccggccttatccctagacgttaaacacaactacgaaaccgaccctgtaccacaaaactggtttggggttcatgtttgggtttgggttcgggtcgaggtccgagtctaagtctgggtctaggg

SEQ ID NO: 393990 - DNA, 952 bp, Cannabis indica
aataatatattttttaaaaataactgggatgttttgtgttggttatgcacaaacgctaaatttgataattttgtgttggtgctcaacaaacgcaaatgctctggaaaccaacgctaaacctgtgtctgcacataactaacgctaaaattgacttagtaattatttgcatcagtggtgtaatattttcatccccatattcgacacaaaatgtaatatttttagtagtgttcgacatgtgacggttttgaataaattaacataagacttacaagaaacgtgatcttaggaactattgccgctattttttgaggttgtggacttatcttcatcaaagtgaattttttggaacttttgccacaattttccctattttaaaatacaatgtgtgtctcgatatgatgtgttataaattcctaatgtcttgttaggaaaaataattagtaattacagagaaaaataataatttttagtaattatatacggtgtaattacaatcaatgattacgtagtcagacaaacatgttaattaccttcaattaacccaatttcgatgtcaaacacacagttactattctaataatgaatattggcaattttactcctaagctttcgacaatactaattctgtcccttaaaatatacggcttattaaaaatcctcttgaacttttatgtttaaagaaatttagtttttttgttaggtttcgtcctattattccgtttaaatactgatgtgtctttgtaaattagtaactttactccctaatttttgacaactataaaatcgtacccctcaaaataaaaatgagaacgattcaacattttttttagtaaatctaaaaaatcatttgaatataaaaataactttaagtataagcattagaaatattatttattaaacaattattagtatattaaacatatatttaaaatttaattttaatgtaaaaact

SEQ ID NO: 393991 - DNA, 1204 bp, Cannabis indica
aactcatatatgtatcttactttttatttcctttatataaatatctttataatcaatacaaacatcttattaatatttattatataaattttatatttttttataagactttatatccttaattgagtaaaaagtacacattttaagacctaaactagtaaagatgaaatatatttttttttatataataatatttgatgtatgtcgtttgctgtatcaaatttattaatttttttttcagcactttgaattatttcagtataaaaataagtacgggtcaaactcacaagaactatgattattcaattattcaacaattaatgataagagttaataaaaagagttttaagattaagattaaaatatgagaaataaaaataaaacaaacaaattaatattgagattatgatatgagaaactagttaaaggttattcgtcagtctcaacaatcattcctagttcttattaaagaatgtaattttcagtttccaatcaaactattaatcctgcaaataacgctgaagcactcaattatcacaatctccctattgtatgtaatcaaggtgaagcgctcaataattaactcttttacctaagcagtaaatccacaaaatatgtaatttatttaacttagataaaactttgagatttatggagataaactaatctaggcaacaaatcaataagcatataatccatttaacctaagttcttcttcatcacaaataaaaattataatttgtcaaaaacactgagaatcctaaactattaggtgaatagtaatcgtaagatgacagtaaattaaaatataaaacctaagttagcggcagtctaaacaagattaaaataataaccgtgacattaaacataggagaatagaagtaatttgatatataatagaaactagaaattaacattcaataatgaaactaaaaattcatgtctcgggttttgaaataatccttaactagaagaaaactactcaaaactagacattacaaccaaaatcataatatttagtaaaagtagaaggagaagaaaagaactagaatgaaaaatacttcgaagtcgatctctgtctcttccttgctctctttctgagtttctctctctaatttgtagttttagaatctctgctaattaagagtttttgagttttctttagctctgaaaaccttctaaaaacactaataataatgtgttt

SEQ ID NO: 393992 - DNA, 1650 bp, Cannabis indica
atatatataaatatatataccagatgaagcagatttgagtgcatccgttgccctagaagcttctccccagtcattttttataatcttattttcagattttcctgtgccaacactgatacatgtaaatgtaatgatataatcagcaataatcagattagctatctctaatttaattaattaaatcaaggagaacattatttttatttacaattacaatgcatacaatacaagtatataaatatgtatatatataccattgtgtggtttattataccctaaaacctttggtttgcattagctggaattaattcagagatcgaaacacaataatatggtagtcacctaataaagatctcttggtctaactgtcatgtcagatatatgatctatgtgatctgaagtgtactctccccttataaaatgttcttcttctacatccaaatattttaatacattcaaataatttgctaaatttatgtcattgcaattaatataaaattaaataatgtgctttcccatcataaaaattcaacttcaaccgaagtcttttttctaacagcacttttcaatactcctaattaccactagaccaccccttgaaattgaatccttgaactgtggcatgtatgatctctgtaagaatgtgtaattaattaagtgtcaaaactagtgtaggaattttacttggtgaaattccaagtttaacctacaccactcaagaaaacttgtcaaaacgacagggacaaagttgtcccagaaaattcaatttaaaaccaatcaacgacaacaaaaacttggtcgtttctttcctgcacgacaatgaagcttgtcgttttcactcacacgacaaatcgtttaaaccaaacgatttgtcgttctggattgaacaaaactaagttcaatcagagctaaccctagctcatttgcaccttcgaacattcgagagtttctcaaactctctctctttctctctgccttctctctggttctcaaaccctagaaccagagatccttctcgatctattgatcgatcttacccagaaaccttcccagaaacaacccaaaacacacacacacaaatatcaaacatagatcattaggttagggttagaaaatgaacaccagagattatagaggttcgccctaaatcaggggtacatcctctttgagctcgccttgaagatcgacctcagatctttcactatgaagcatgaatattacaacaggtaagaaatccaagtcacagatcgactggtatttctaggtttttctctcttgtgttttctgtgtttatttctctcttgtttttctggtttctcacactaactcttttctgtttcttgtgcatgtacttgaaaaacatctggagctgaagaactttctcagatctggtaacctagggctttttgcttctggtatatatttttctctcttctcttctgttccttttatagttgtagttctagggttgatcacagaactaggagttagttacaacttcggttgtaactaacaactagttcttgatccactagaggcgaagccacctaggatctgatttctgttgtattctgtttgcttttatttgtaattttcacttcatctgtaaaactgtaataataaaggttacagtgaggtctaattttaaca

SEQ ID NO: 393993 - DNA, 887 bp, Cannabis indica
aaatttggtaaaaaaaatatatgaattactaaaatacggagggataccatgataaatacagtgttcatttttctttaaaccaaaaagtacaaatttgtaacaatataacatatttatacaaatttgtaactaaagtatacaagtttgtaccgtattttaaaattttgtcaataatattttatcaactaaatataacgaactaatacaaggtgttacaaaattgttataaactagtattcctaaatttataatatatatattattttttttactgtaaattatgaattgccctttcctcaaaaactattgaaaggaatgtaatttttccttttaatttttaatattatctttaccaaaaatatatgtatatagctacaaccacatacttaattttcaactatacacttttagtttgaacaatattctcatttttgttaggatttaaattttagatattaattagtaactgaaaattttatttggaaaatagtagagaaaaaatggaagaaaatatttttcacaaatttataaagatatattctaatattttttatatataattataattatttaagttttataaaaatccaaaaatgaaattttcgaaatttactattttttttagttccaaacaaaactttatggttcaaaaagaaaatcaactgtacactttcgaacgaacactattctcaattttcttatagtttcgatagtagctcaaatcatctgaaatttagtaaagaagaataaagaaagaataattagtaatttttatctttgaattttttaacaatactgtattctaatatatacggcttgttaagaatcccatgaacttttacatttacaaaatttagtttattaggttctgtcccattatttcgttt

SEQ ID NO: 393994 - DNA, 980 bp, Cannabis indica
aaaaaaaaaaaaatacttcaaaacaattttcatcaccataactcacttggtcactactatatttaaaattaatgtcattacattatctgacttgtagtcatcattcaaatcacttgtagtaaaaaaagattaaggagagaattaaaagtaaaataaagtaaaataaaaaaaaattaaaaaattaagaagacaataaatagagaaatttttgccgccttataccaattaattacctaatatttaattttttactaataaattaattaatatcaaatataattattttaagttaattaattattataatatacattttattgataaccatttaaatttttagtttattttaccataattaattgacataataatattatttaaaatatttattcaatatatctataactataaatatgtgttttgaattctaatttattagatatttatttatcataaaatattattttaattatatataatattaaagattaatgtcgtaaaataatgagagacacataaatttgagattcttgaccaaataatttattagaaatttaaataacttaaaaaataaaaccaaatatgaaaatgcttgtgtaaattttcatatattttatttttatatagatgaattttggtatttcatcaaagtcaccactcacgtcatgtcgttttaggccaattacatttttagttttaggccaattatatttttagttgggaaatttacattgtatactaacttttgctattttcttataaaattactgctaggcggtattttttatatttttactgtgtttttttataagtttcatactgcagtatactgtgttaagttttcactggtattattttatttttactgtgcttttttataagtttcttagtgttttactggtgttctactgttgttttgagttgttatgctttatgttttactggtgttttataaaaacacagtatttttgaaaagattt

SEQ ID NO: 393995 - DNA, 2941 bp, Cannabis indica
ttttattattttttgaaaactttaattttttttacaatctaacatatgtaaactgtaataaagtttttatttattcaataattaattactaatctaaccttctttaaaaacgtaaacttattttaataatgtagatagcttaagatatttaacaccgcgcaatgtagatagcttaagatatttaacaccgcccaacgcgcgacttttgtttcctagttgtatgaataaaatacactttgaaaaaagaaattttatttgctcccaataaagttataagtacactagaatattaaaaaaataattaatttaaattaatttttaaaaatcactattaatattttttttagaatttttttttcatattattttcttttcatcaaactttatataatttttttgtcttaaaatttataatatattttattttttattttataagtatatttttaagaatatgataagaggaaaaaaattaatataaattaaacatatgtatatttatataaaataaaaaatattaaaatgatctgtaaaaaaaaaaaaaaaaaaagggaaaaaacctttttagatcccgtgttttgcaaaagttatcgatttgaccctgtgttttgttaatgataactgtattttccaaaatggtaaaaatatgatcatgagcttaatttttgataatttttttaatataaccaacttgaagacaattcataatacgaacagatacagaaaatgtaaacagttttgtcatattacttttagatcggattataattcaattttattttgacaaaaaatcaatttagagtcttctttgtactattttagaaaatagaaggttcattttatcatttaacaaaatagaatatgcaatttgtaatttttgtaaaacacactttaaaatagtatttaactaaaaaaaaatatatataatattttgtaattaatatctaaagtcaaaaccacgactatccccctgtacttgattttttttctctctttttatatattagtaaaaacaaaaaaaaaaacgatagaaaaccatgtgcggcggtggtaactcaaattggattgagtggtaaacaaaacaagaatgggcaaattaaaataaagaaattaagagtctccgaaaggttgtaaactgtaaagagtaaagactaataaagagggaccgccgcgtccgacctaagccctcccctttccctttgagccaaacctcttgttttttggtgtcctgaaaggtcaactaattattaatttcttatattaagaagaaaaataatattaatttcttattaataactctatttttccaaattcttaggaaagctcccactattgggacccactatctgcttcactaatataattgtatttttaaaaaaatttatatataaattaataaaatagtaaagggaatctagggaaagaatcaggccaccttgtccccacctaagcttttacactttaaaactctttggcatattttttttcttaataaaaaatgtattccaagacactttttttttttataattgtatttgttatcccaatttttgcactctgaagtggcatcacatgatgggaacacgtggaatcgactctaggcacctactcgcaagaaacaggccaaacagggcacctcatacatcagctcggacgagggcctctagaccgagcagtgagcaaaccgagcagcacgcaaacacttagcaaattcagctttcacatcgtgagtcatcaaggaaatccctataactttgggatcagattacagagatatggcaagctgtccaaatcccacgattagtgtattctttatttactatgcaatctttctgcttatatcaattttaactagaagggaaatacttcttctccaagcttatagccctataaatagtgattcatattcactgggcaaaaggggcgagagattttatctaagaattcatattcagagatacttttgtaagagctttaaggaaaggaaccattttccttgttattaacttaatacaaataacgagaattaggctattaccaaactgctcgaggctgaacctctataaaattcttgtgtctttatttgctttattatatttcattcgtattaaactacttgtcgcttataaaattagactcactgtagttggctaaaagcgaggtcaacattttggtgctttcattgagagcagaatcaaggatcgctctttattcaaaatttaatcacaagtacgatggtggtacagactcgtaggggcgtggttgatcaagcaaatccacaagtagtggatcctacactgaagaacccgggaaacccaagggttctgccagcgataaatcccggacagccaccaactgcgggtcacggtgtgacgactcctgtggatgaaatcgcgcctggtgtgcaagagactgggaataccagttcagcaactgaccagggcattcatagcacagccgtttcgcctgctaccaatgttcaaacaaccattggagatgacactgagatccataacctccgtgctgctcttggaatcatgcagggtcataccaacatcctacatcatgatcaggaggaactccgtgctgcggtaaatctcgtgtttgaagagcagaggcacatgtttgctgaatggagggacaaagagttggaaacgttaagggctcaacaagaagtcattgacgatggcagtctgcaagccattgtgctgatacgaaaagcctatcaaactggcgggcagcagcccgcgaatgtcatccccttgggcgaaatagacgaagatccaacgatgaatacctcctagactataaatggtcagccgtcaaatccccagtcacaggttccacctgtgggccaagtggtaggcaggtagaccttgtctagtaattcatcgggagaagtcatacccaataactctaaccaagttaatggtgtcggtca

SEQ ID NO: 393996 - DNA, 1343 bp, Cannabis indica
aaaaattacccagaaaattaaattaatatcgctaaaaccaaatggagtgacaaagatgcaattaatagcataaggatcataacctagaaaaatgaaaaagatcagaggaaagaagatgtgtcacttactgttgaaagttgaatttttgtacgataaaaagctatgaaactgaggacgggatgaatggcgcgacaacctttttgaattcatgaggtcgaacagtatatccgaatggatggcaagaagtatatcaatgacaatgagggcatgcaaagcttcagaaatcaaaatggttttttgcaagaaaaagctcaaaattttttgaaatggtggaaaattggttccggtttagttttatactttgagatggattaccgtcaaattaaaataacagagatctaacagataggaacaagagagaattggaaaagatgggtcattaaatgctaatgatgtgcctcaaaatcatgaaccgccaaattcagaagcatgcaatttttcaaattgaattaaatagtcccttttattaaaaaaaaaaagaaatttttaaggggcaattattatacccgaaattcggctgtaattcagagagtgacacgtgtcaatcaagtggaatatgaacctacagatataataatgattatatcattaaattcaaaatagaataactcattaaatatagaattaatagagtatattcataactcgctgactgtatagtcttaggtgagacatggatacacagactatcaattcatgtattgacgagagaccatcttgcctcagaaggcataatcctgagggaactacaaacaatgcatagtgagacatctacctcgctacatgtaacgaagtattggcgaggcaaatcagctgttgaaacacttaaagtataatccacattataataactaagtgtaacaacttggaaaaatgcagaacatgattgtccagtctacgaggccttatggtcaaagagcagttcttaagtttgctcagtacactggtgctcatgccattgcttgaaggcatatgaataaaccaagtcattattggtcatctatgtacaaagcaagatgcctctagcaagatgctcctatccacatcagcgtcaaccgcctagaagataggagtgataacggttatgcggttttctagtgttatctacacgtgtttaaatggagcgtgatcgaagcccacattttgtaaaaatagttatgtaattcaaattcaaatgtaaataactaccaaccgatatcctataaataggggcagaaaaaaagaacgaaaaaatctttgagaggaaaagatcactgattgtaatagttgttgggttttatgcc

SEQ ID NO: 393997 - DNA, 1442 bp, Cannabis indica
gatattgatgggtggaaaaggttgcggaaattggagattcctccgaaagtgttgtactttttgtggcgtgccatttcgggttgtttgccaactaaagtacaattgcagactaaacatgttcatgtggatcttctttgtcctttctgccttaactcagttgagactatctctcatgtgcttatggaatgtcggtttgcacaatcttgctggaacttggcaagtccgactgtgatttatggggttcctattgattttggcagctggtttatgggagttcttgaaactcaatctattgaagttggtgttgatgctgctatggttagctggtctatatggaatgctcgtaatgatgtcctttggaagcaaaagaattgcacagcagcatgtgttttattctcggcccgaaacgttctgcaatagtggtctgctgctcatgctcaaaagtcaggccctttgttggtttttggttcgtcttctagtgtggagcagtggcagcgaccggtctccaactacattaaagtaaatgtggatggtgctatccttgaggcagagcataaatatggttttggttgtgtgcctcgggacacaaatgggaggttgcttcaggggatttctagcagccgattgggagatgtaggccctgaaattgctgaggtgatcggagtgaaagaagcgttgagttggatcaagcgtaatgggtggtctgaggtggagattgagtcggatgcgcttgtggtggtgcaggctgttcttggctcagtttcgatgccatctcaatttggttacttggttcaagattgtcgctactttactttcttctctcaatagtgtgtctttaaattttgttaaacggtctgcaaatagagttgctcattgagttgctagagcgtcttgtttaagcccaaatcgtatttttaaggagcataatgttccgtttgatcttttgactattgttgatgcggaatgttactgaataaaataaatcaacttttgctcaaaaaaaaaaaatactacggagagataaattctaagtataaaagaggagagtgagatacacatgtggatagtacatgaaagtgaaactcacacgcgagtaaggagagtaaagagatttactgacgcgcgcagaactacagcgtcaaaatgtggcagggaatttgcggctgccacgtgacagtttggatgaagtgaacttgggtgtgtaggattgttttttctcaatgcaacagttatgcaaaaataactaattagcaacacaaaaataacttaacaacaatcaaacttcaaaacaagtttattaaatattaacatattacattaacacaattaaaatttataaatatataacacaacaacactgtacaagaactactaattgaatatataaaaaaatatttgcaaattcattgcaataatataaaaaattttgaaacacataaact

SEQ ID NO: 393998 - DNA, 754 bp, Cannabis indica
cttttctctattttagtggaatgactattctattttaaaaaagaaggaaagataattccaatgtaacaaaagaaaaaaattaatgatttttttattaattttttttatacattttaaattttattccattttattcttatttttattcctattcttatattttccttcattccaatcaaacacaacctaaaagtgttctctcaatatttcttcctataaaaaagatcgttattactttaagttatatgttgtagcatttccgatttatccattaattttttaaattaagatttaagaataaatgagtgggtcttacgttgtattttttatcgccgttacatttgatatctggtacttgtctttttccttgtttgagagtgcatcactttacgtatattattattattaaaaaacctttaaaatttaaaatgagtttacaatgtaaattgttataaaaaaataaataaatagaatttatctctttaaactaaatttttttttattgtttttcaaaatttttcgataaattatgagaatatatatttttaaagttaatatttatatatttaatggcaataaattatattttaaatagcttcaagttattaaataaatcattatactgtaactatacttataacttatagtaaaatctgttagaaataattggggtcacatatataaaatgtgtgttgggtcatcaaataaataagtcaaatttatgtggtctattttggaataaagtttatgactt

SEQ ID NO: 393999 - DNA, 1719 bp, Cannabis indica
cctggggtaattttaggatgggtgacctcttgagaagttttcccaggaagcatgcaagtgaggacaaatcacgctgaaaacactcgtgttggtctgtagggccagtcatcaatccatgaagcagccagagtgacgtactcgtgtacaagagccatcattccgtgggtgtaaggacccaatggaggcttgaagcgggagcgttacagtagcagttttttgtagtgaggattcaaagttagggagagtagttattttttttttttagtaaggacgagaggcgagaaagaaaatttaaaaagaaaaaacggtgttcttggtgggatttaaatctttgacatctatcatatatgcaatctagtttaattattacactaaagctaatattatatttataaatatatatcattttttattacaaatatacaaatattactaaaatatacgtatatacatttttttcctgattttttttcatggggggcaactgcccccccccccccccccacttcaatgaaggttcgcccttgcctcccaaggattagatagaagcaaaaaattgtttaagatcgaaactcattaaatttgttgtctcctgcttttgatgctacaataagttgtcatagcatatgtttgttgtttttagttaatttctaattttttctttaattgtcattttgtgttatttcacattaataatattgaaacgaatctattcttgaagtatgttaattcagaaaactattcttattaatatgtattatatattaaaagatatctaaacttaaatgatatgaagaagatattgaaaaaaaaaaaaagaaaaccgatgtgttgtaaaagtttgatgtaaaataataaaataaatattgttttgttgagatcctagaacatgctctcttcagatgtcctgctgcccagaaggtatggaaactaactgattttaatgcttttatttctacacactcttcacttagctgtatggatttattatatcttgctgccactgaatttattattggacattatcatctctttgtttgtttgctgtggaagctctggaactgcaggaacatttggcttcatgagggtctatccctctccccagactagatcattcgtgaagcctccacctactttgagcaatacaagaactgcaccacgcagaacccaacaccttcaccagctcaggaggatcattccatacttcatgattgccgcacatcgtctccaacattccatcatcgcctcttcgtggacgctgcccaagattcccagctcctcaaaatgggcttcggcatgaccatccactccaatacacgtgacgttctcatcaatttagccaagcctagaagtggaatcactacaccattacttatggaagctcaagcacttcattcagctttagtttggtgccatgaacactctttttatccggacagtattgtttcagattgtaatgtgttagtcaattacatttgtaaaaatgatactcataatctgcaccttaacccatttgtcactgagattaaaagcttgctctcttatttccctattatatctcttagctacatccccagaggggcaaatcatgctgcccattgtctagctaagacagctttaggtttagagcaggaagctttctggataaacccttctatccaatcttctctgtaacatgtatcttgtacttcatgctcttcttaatggatacaggttatt

SEQ ID NO: 394000 - DNA, 959 bp, Cannabis indica
cattttttttaaaaaaagtaaatgatttggaaattagataatatagccactctttgcatgactattttaattttttttaaaattataattaaaattaaaaataggacctttttttttattttacacttcaaaatagtcttttttgtatttttatggaattctacatagaaacttctatttcaactagcactgtaacttaaattgtaacaaaaaatcgtatagaaacttctatttcaattagcgctgcaactattttagaaacccaaactgtaaatttaaaaaaaaaaattaaaaaaatattatgtaggataattctccttaaaaataactatataataaataataactcacttcaaataaaaaaataattccaatatataatattaatgaaatgatatcatattatatgcaattaagcaatattatccacacttaaattatatgcaaggaagggtttaaaataaaataaaataaaataaaattatatgcatcaaaatagtacatatacaagtaaattttctaatcaataatatattttagatatgacttattattttgaattaatatttttgtccctaaattttttatattatctagttgtgttctttatcatattttatttaattttattatgaaatgagtaacgcgatagataatagttaataaatagatgcaaaataaatatttttattctagagttttttacggctaaactctttcaactatcactctatttgcacttaataatatatttttaagttcaaattttgacagtaaaatcctccaaactattaaattgttagcaaatttaagatatcatttattttctacagttaactactaacataaactgtttatgtgtatactattgtatacgtgacacatttatattggtacactaatattattatttaaaaaatataaaagttatttcaaattttattatattttttattttt

SEQ ID NO: 394001 - DNA, 995 bp, Cannabis indica
ttgatatttcgtcgatattttccaatattcgttttgtccaaaaatggaaaaatatctccgatatttccatgaaagtatctgagataatattgttcgttttttatttagaaaaagaaaaaagaaaaagaaaggaacaatcaagaaatgttaactcatgaatgcgatttagtgatagtgattatttatgtggctatgggatttttttattatccttgttcccaattttagtatgaagtttgtacaagtaattggatcacaatttaccatttatggagaaacatgggtagagaatatcatcaaggacttgatcccctgtccatttcaaacatttattcatgttcaaaattacatgcagatatatattcaaacttggtatcaatattttctacattaattagattgtacttttgaacctctttcaagttaatattgatgtttcttattgaaaatgaatgtcaaatattatcatatttataagttagtgtaatcaaaacgatattataatatctaattaatagatttatatttattatttaattaatttgttctataagtctattattaattttcatattttttgttaaatatatgtatagatgttttcatcaacatcaatattttcttccttactcatattcaatagtcttgcttattgttgtaaaagacctatttatttatttaattattcaaacacataaagaaatacttaattctacgtacatgcagttctgtttgatgtgtacctaggctgctaactctttcaaacacactacgctataaatatatatacatatatataaatttttatatatagatgatacatatcgtaacaaaaaactctattacagttacaaaaataataaatattcaattttattttttttttgttaataataatacttaaattatatttttagaacttaatagttaatattaaattattatctacatctcattttcttattagtatattttaattaatttttttaaagaaa

SEQ ID NO: 394002 - DNA, 760 bp, Cannabis indica
gtaaaaacttgacacacttggacaaggcggcctatcagcatctcacctcccttgagaaattggaaattataaactgtcctacactccaatgcttgccaaaagaactacccgcttctctttctgatctacgcattaagaattgtgaattgctaacaccacgagtcgagagggataggggggaggactggccaactattgctcacatttcaaatataattgtggatgatgagaaaatataggtattactcttttctcttctcagtcctacttgtttgaaagctttattcaataatgaatcaatgtcttcaattccttttctgttttaggttgtgttatgttgtgttgtatgtacaacactcctaggtttcagcagagtgagattgcttagaaacttctcaactctcttgattgactttgatttttccatattgaccaatgccattaatgttcatgtttacatttgctttcttaatctttgttttggatatgaaactgaattaagaattattaacttaatacttgtggagagaagtataataaaatgtgcatgaattcaattgttcatgatgttctttgaaaagtcatgttagttgaagaagccccttgaaagtattcttaaggttgtctctgcaaaattcaaacatcaaagaaacaaaactaagagcaagaagttgatctgaattttactaacatgacagcttgtatggttcatttttctgcagagatgtgtggatggcaaagaagctttggttagcatttt

SEQ ID NO: 394003 - DNA, 979 bp, Cannabis indica
aagcacccactgccacagtctcttcttcctacagaaccaagaaatttgaaagaagctctcatgaatcctaaatggctggcatctatgaatacagaaattacagctctcaaaaatgctggcacttggtccttggttccttacaaaacgggcatgcatgttatagacaataagtgggttcatcgactgaaattaaatgctgataggtctctagatcggtttaaatcgagacttgtggctaaaggattttttgcaaacaccgggtatagattatgctgaaactttttcaccagtagttaaaccagttacggttcccacagtatcatttcttgctgtatctaagagttagactgtcaaacaactcgatgttagcaatgcctttcttaatggcactctaactgaaaccatgtatatggaacaaccgcccagctttcttgactccagcaagcctgaccatgtatgcctcttacacaagtccatttatggacttaaacaggcaccacgtggtggaacgacaagttaaaaaaccagccttttgaattggggttttgtggcatccaaagcagacacatcgttattcatttaccactctagacagacctttattatcttactggtatacgttgatgacatcttggttacaggtccaagtgagcctcttatcaacaagctaatagcagatcttaatcatgacttttctttcaaagacttgggtgaagtacactactttttgggggtggaaatattcagagactctacgggaatgtatctttcccaaacaaaatacataatcgatctactcactaggctaaatatggaaggagctaaaagtattcccaatccctctagtgcttccaccaaactcttcctcgatgatggtgaacctttccctaattcgactttatagagaagcactattggtgcattatgttggaatttattttaccaggatcttatatctacttacaagtatgttgtttaa

SEQ ID NO: 394004 - DNA, 1446 bp, Cannabis indica
agttcgggaggaaaaattgctaaatagccttatttttattatagataatttctaatacaaagaagtacaaaaaaatataactaaaatggtcatagcacctttaactcaaaatattattatgttccattatgaacttaggatactattacattctattttgataaatacaaaaaatatttacccaattatatttacaaatgggtttagttagtgaagtttgagtattgttattagacaccaatagtatttaacaccttctgtaagtgacactacatgattaattatcaatattctctaaaaattattttataaaagatttaatatttaattactctgataacagtaaaatactgagtgaggacaggagagtactaagcataaatagtgctctaatttgaaaccttaaaccttcactttaaatgccaaaatttccaccattctactcaaaggcctaattccttgttataactcttgactcttgacttctaattccttattatataagtcttgaccatttctctatattaaaaaaaaaaaagaaattctttaaccataaacttggcctataaaaagaaacccattctttcaagtttcaaactcacacaaaacaacacaacacaagtcaaaaaaataaaaactctctataacttgcttagctatcataatatgaactctcttttatttctcttcatctttatcttacccttctttcacaacttcaaccatattatttcaggtatatatatacatatatatatagttgtaaattttattatatatataataaaaattgaattattttattaataatgaatattaggggttcaagttggggggtcaagtgagaaaggaggatggtacaattctttgaagaacacaatttctgatctttctgcagttggaataacccatgtttggttaccaccttcttctcaatctgttgctccccaaggtaataattttattatattaatcaactataataactaactttatttgttaattagtttcttttttaatatgaatttaattgttgcttgttcatttggtcatgtttaatgcttgtaaaaacaaagattgttaagagtagtgctcgacacattttaaggcgtgtggtgaaatttagtatcaagttctacaaatttcaatttagagaaatgttacttcttaaagtgtcgagcaccataacagatagtatactgttattggtgaaatttaatatttagttttagatattttgattttataaatagtatagaaaaccaataatcactcataagtcataatgcgctatgtttatatggtatttgacactttaaagttaagattgaatatttttacccggactcgaccaacccaaaaatgtcactatttatcttttattaattgaaagctttttgttacgttttatgcattcatttaaaataaatttttttcagcacagtt

SEQ ID NO: 394005 - DNA, 711 bp, Cannabis indica
aaaaattatcaattgcgtcgaaataaaaaaaatatatacataatatgacgtcataatttctttacaccatattttctatgtcttttcttcacttttactttgttcttctcctctgtcctctattcctttcatttcctataatatttgttttaaatactccaagtgtccaaaaattttagtttgaagcttcattatttcagattaagtgttttttttttttttttttttctatttttaaattttttttcttcaagttaataaaatattcattcacaattactttttattcttaactgtgagaatagaacttgtaattaaattgggtcaattatctattttatttctatgaaccctgttagaatagtcgtttcactttttcataaaacatactattttgaaatcatcaatgttgttagctaaaatttgaagttatgatctttgatcgatgtcggattgggcccatattgatatgtaccaacgtacatatcaacatctaatttggtgaagccttctataatctaatacattttgcgaccccttacgaactttcccaaaacaacgtacgatctccccataacaccctaacaatatgtacaatctctcccataagaccctaacaacccatgcaaccctaacaaaaaattgtgcacatacatacttgaaatgaagttcctacaggtggaacacctttccacaaaaaaaaaaaaaaaa

SEQ ID NO: 394006 - DNA, 888 bp, Cannabis indica
aatatccctaattgatcccaattttgccaatgcatcgacgttggtgttgttatctcaggctatctactttacagtataaagctgcagctgttccaaataacttttcatcctagatatgtatgccatcatcctactccccttctccaagtattctcccttgacttggaacaaaactagttgggaatcactaaagatgtcaaacttggtgatcaactctcttcccaagtataggccagccaacaaagcttcatattcagcttcattattggaagcctcgaacccaaattgcaccgcataatacatcttttacccctgggtgaggtcatcactactactccttccccagatcctccatcattcgacaccccatccacatgtaacttccacctctcctccccatttgaggtgcttccctccaatactccttgacttccttcttcatcgagctgataagtgaattcaaccatgaagtcagcgagtatttgcccattaattgctatctaaggtacataaaaatgtcaaattatatgtgttcaattgtccaattcaaaaggcatcctgaagtttcgggcttgtgtaggacttggcataggtggtggttggtcaacataattatggagtgggcatggaaagtatggctttagcttcctggaggccatcacgagtgcataagccaacttttccattttagggtagcgagtcgcagcatctaccaatcttttactaacgtagtatactggttgctgatgctgtccctcccgttttactaaggccacactgatggcgttcctcaacacactcaaataaagaaataattttttatcctttttctagttttgccaatagcgatagcttccccaagtgttctttgagtttcttgaaggcctc

SEQ ID NO: 394007 - DNA, 1782 bp, Cannabis indica
tagatcgatcttctggttagtttagttttgctaatatatatttatatatataaatatatattatgtgtgtttattataataatatgtataatagaaaatacgagttaattaagtaaagcaaagaagaaattaaataaagaaagagagaaaaaagtatccaagataatttaccatgcattgagaagagtaagataattaaccaaagaaaaactagaaacttttgtgagaaaaagaactgtcaaaccactaagatgtactcatgtcttcatgtattttctgtgataatatacagcaaacaacttcagctttttcatgtgcatacacaagctggtgtgcgatatatattttatgtatatatatatgccatgatcagtactaggaaaaaatactaagcatatttataagatattcccaggcataaatacatatatattatgtatacactatagtagctcaatcctgtacatatatatgagagtaaataaatactaagttacatatatttatatatataacaggatcttaatttacatgaaatccttagctggatttgtatacatagattccctttgaggtttcacggggcctccagtcttgatccaattaataggccaacctactttatatgatccaacaacctttattgtttggatatgtacacatacatacatatatttatataaatatttcttaatcttacccactaatcacacacctatgctaaatgccaccctttcatttgctgttcaaacttcttcaacaattgtttattttatataaatatatatatatattatataaatatatatatatatatatgatgcataaaccatttattcctttttctaatttgtttttttctgtgattataatatatgatatatatgaactcgtgaatcatttgctttactttagtgaagagtttaattaatgtatatacataagggcttttttttctttcttttctctcaagtttttctcatcatgatctttatgttgataatgtttgtagacttaaagctaaacaaagtggagacaaagaaactttatttgatcaaagttgattaatcacttacaggttatcaggattacaagtcattaataagaagaaaaagtggcactgacttgttattgaattattaattaaatgataattatgaccattgggagagctaggggtgtggtgaaaagtcttaaactaattaactttttcttaccctggatttttgtgaataattaaatttcatgatgaagaggttaaaaatctcaagaatagagaaagaatttttaattaatgtgttcaatgtataagatgtgtttccttaccaagaaaatgtataatacgtatatatatataaatttagtttcctaaattatataaattttcgcgactctttccttaatattttgtttttacaaatttgtacccaaataattaagtttaatttggcaagttagagcatcttcaattataaactaccaaataatttgtgtggaatttttacatttttactttaatggcatactaaattatacactatattttatactattaatagtgttgagttttgaatatacactaatttagtgtaaaacttttttcttagagcacacatgtacactagctcttttaaaatagctaatttttgaaaatagagaaaagagaattgctaaaatatactatacatcaagtaatttattttacatatattttttaaatggaatgaatagtacttctccacatgtagagaagtatttttaatgctctaaatttattttatt

SEQ ID NO: 394008 - DNA, 1498 bp, Cannabis indica
ttaacaaaaacaattacattaaatatactaactaaaaattaaataaagacaaactaaatttacttaaagtaactaaaattaaaaattaacgcacatgaactatttaccaaaaataatcaaatcaaaattgaaacataaaaccaagttacctaaaaaaagttaaatcgtttaatacagaaactaaaagactgaaacaataatataagatacttaaacaatcaaaatataaattgaaacataaaaactacttaattagagagagagagttatgtcaaaattgaggaatgcggatgtgagtgagatatatatattacggttttaaagtgtattgggttgaagcttataactaattttttttgtttactttttcctttattttttttaaatgagagttgtgtatcagttgtgcactgacgcaagttagtgtatgtgtacaattgacgcaaattttagccactaattttttgcattagctttgtaagcttgtaacgttagaacaaaaataactgatttttgtagtggtgtgatgtgtgtggactctcttcctattgtttctttatctaaaaataggtcatttatccatttgatatgaacgcaaatttgaattacatatacttttagtaaccttttaaaaagtaatcttaatacagtttaattaactattttttttttgtctatataaaataatttaggggtgtgcataaattatccaatctaataacaatcgaccgatttaattataaccgaccgtcaaatattggatatccaattgtgataagatcagatttgatgttatttttgaatatccaattggatcgaataggatgttggatggggtgtctaaaaattaaatacatacaacatccaatcaaactaattagtattattttcatttagtttagatgagtaattagattgtatattgttatacataaatatatgtatgtaaaattaacattaaaattttacttttttttttctttagattggatggatccaatctaatctaatacatactggaccttaaatattaaatagacccgattcgattaaaaatagtaggtttaaaatattgaataaacccaaattgaactaagaaatatatatgaaatatatccaacagatacaaccaatctaatctgacatctaatggatattgaatcgattggatgactgaaattaattagatcggatcaaatggtaaaatccaacatccaatatataattggatcatatctggataggtctaaaaaattgaatgtccaataaacacccttatatataattatttgtgcaacttcattattataatgaataaaaaaaaaaaaggtatgaagtgtaagagataataattaattaatttgttacttgttgtgttaaacactacaaaaaattgttacttttagtgacaacataaatttattgtgactaaatagtcacaacaaaaagtcacttgtgactaaaacatagtatttagttaccagttgtcactaattta

SEQ ID NO: 394009 - DNA, 1085 bp, Cannabis indica
ttttttttttaaagaaaaatgtagaaaagtagaacaccaatttgagctttagaagaaaacaagttaacttatttaagacaaataggtcagtaggaattttagcacgacatgtaaatatcagacttacctgtcaaaaaatatattggcacgataagttataagacgacccatattttaaaaaataagaaaaaaaagaaaaatataaggacgaacccaacaaacaagtacatacaacattaggtgtaactgtttaaaatttgatcgtatattttaatttattaaatatttaactgttaattatttttaaaatattacattttggacattttacatattaaatataattttgttaaaaaaaatataacaatattatgaaaaaaaagtgatgacacgtccaaattatatatgatctcttttccgttcatcctcaatgtcattacatttcttcataaataaaactagtgatcattaagttaggataattcctattaggcacctattattgtactctgaagtatctaatatcatattgacacgtgagatgttgtaaatttttaacaattttttatattatttttcaaaccaaaatatttagaaaattattaaattgtaatataccacttttcgtatataaatcaatgttaaaaacaaaatcttttggtttgggaaaaacaacctaggcttatacgaatacaaaaaccaactagcttattctcccaaatcaaaaaaaaaaaactagcttattctcccaaataaaaaaaaactagcttattctcaaattgaataataataataataataataataataataagaaacatgtaccttagagttttgatataatattagctgtgctacggatgaaagaatgtatagttcattaatcagtatgccattatttaatttttcaatgatattagccatcacttttgaaataataataataataatttgtagtataaatagtgaagtttaattatgattataaataaatatttaattttaatttttggcgataattataaagtattattttttttataactttttagtaattataatttaaatattattaccactaaaaa

SEQ ID NO: 394010 - DNA, 1469 bp, Cannabis indica
aaaaaaaaaaaaaaagaaataggcaaggaagtcaacttggagaaagtctttgattatatagagctgtttgatttgttttgaacatttttcttgtattttattcgagctctttttgttttatgctcctgttctgactctctttggaatcccaagctatgtaatatttgtttttctttacttttcccaggttttaataaaggtaagatctcatactgttttgtaattaattatcatatctcacatatattttaattgaataattattacgaaaaaaatcggtatacattcacaagacgctacctcatagtagtattaaacactactagtaccttatatccaggacatatttgttagaatttttttttcaattttaaccaaaaaaatataataatattacaaaaatacttccaactggccaaataaataaatttacaatccaaataaaaaaaattacacgaataccacttacacacaccttcaaccacccaacaaccttcatctaatgcaaccttcggtcaaccacccaacaaccttcatcccatgcaaccttcggtcaaccacccaataacattcatcccatgcaaccttcggtcaaccacccagtaactttcatctggtgcaacattcaatcaaccacccagcaaccttcgcctgattgaaacctctatttgatgcaaccttcggccaatgtaggtgctaaaatctacaatgatcggaatgaacgtttgtgggcaccaacaacctgcgaaataaagacaaaggatgaccgtaaaaaccttgggacaccggggtggtgccggaagaaggcactccgacgctcaagtcaacttatagtgcgaactaaaaaagaaaataagaaatgtaaataaatacttcttgtgtcaatggttatgtgatgatcgacggtcaaaccttggtcaccgaaaatgaaaaagagtacattagatcatagagaaatgataagtttagttgtaaaactatagaaagagagtgaatattcgtatatccttcgatagatcccccctcagtcccagtgagggtctatttattatcttaaaaaaacggctacctcttgaaacgtggtccatccctagaaaaacggtcattctccacttttctagggatgagcatcatcttttaggttcgttgacggatgagcatcttcacatcaatgtatcacttagagggttgatcttctcgctccgctatgctagggaagatcgctattttcgtgggttctttgtaaatacttcgattgttgggcctttgcgctgggcttagagtaatttttggccactacagtcaaccatccagcaaccttcgtctgatgcaaccttttagttcaacctacccagcaaaccttcgtctgatgtctttctgggattgaaaccttcgtctgatgcaaccttcagtctaaccaccctagcaaccttcgtctgattctttctgggattgaaaccttcgtctga

SEQ ID NO: 394011 - DNA, 577 bp, Cannabis indica
attactaattaattataaaacacgacctaatatactcatgctatacacttgtatatctatatgctcacatctctttgttttggtatcataaacaagagcttcaataatggttgactttttagtttttactgaatgttgagacttgatagacaaatcaatgtcaatattaggtttctatttttctttttagaaaagaataaatagtatttttttctcatcctagtaagttttgtttttaatttttttttttatgtaaaatttttaaaacattgttacaaacatttcaattcagttacaatcctcattctctaaaggaaaattttgactgtaatacaatattacatgtgtttaaaacaatagtttgcttatatagtcatgaattaaatttatagttacaatataataatttatttaatctatataaaatttaatttattggcattaacatataaatattaattttaaatatttatatatttttataatttataattagattattatttatacatttaatttttatctaaactcttaaattgcttaatattaatattatattagtgttatatcaataaat

SEQ ID NO: 394012 - DNA, 1103 bp, Cannabis indica
cttacactaacaaggaaattaatgaaatacgtgatgaatggacaaagtaatgtcatgcaaatgatggcagcagacaaatgattgataatgcagagtatgataactagtagttgattaaattagaatacatagttattcttaggcagacataactgtttttttgagatatatattctaacttgagtaatgtttgaaggtttttttttttatgtaaatatatagtctaacttgacaaatgtatgatttttttatgtataaatatcttaattataagaatgttattattgctattatattttttcatcattgtatattagaaatctaaatactacaaaaaatgtaagggaagaattgcattaacatttgtaatttctccgttacctcatattatctaacagtttataaaaatcatttaaagtagtatattctattaattatagttcgactgtagccttttccaacagttataaactgtcatttaaattgatttttcccaacagttataaatcgtcatttaaagtaattttttccaacaattataaactgtcatttaaagtgattttttccaacagctataagttttcatttaaagttccgtatttttatgacacccacatagccaacaattttaagaaccgttgggaaatagtataaaagacagttataaaccgttggaaaaagccaattttgtagtagtgaccttatctcccaaactgagtataatggtgttgtgagctttgatcaaaatgtctaatttttctttgtctgtcaacccagcatgcatcttctcttctccaagcaatgcatcccgtagcccttgttgtaccagaagtgcacgcatcttcaccttccaaaagccaaagtcattcttaccattgaacttctcaagatcaaacttggtattccccatctttgctgatcaatcactcaagtcttgaatttcaagaattgcattcaaccagtttgaacatagcaatcttaagtcaaggctcaacacagatcaatctcccaagctctgataccagttgttgagccaaacacacttcgatcataccagcaagaaccaccttcttttaagccagataaactaggttcacaagttg

SEQ ID NO: 394013 - DNA, 549 bp, Cannabis indica
gtgatggaaattttttgtttgagatatgtattgatagatatgtagatagattggagtgaccttagttaggctactaattaaaaataaagtggatgattgataagtaatttccaaaaacgcaaccaaatagtgatgatgtattgttgatagtgattgaaaatgatgatgttaattaataacaataacataacacatcacaattttgactcaagctttctgcaggctgggccttgatataactctttgggcctttgttttccttaatgggctttctaaggcccaatgtgtgcttaatttgttacggcttttacacaaatacttgttttttactttttagacttttactgttcctattatttatatctattctatataaagtgtgcctatataactaaaattcttggtttatgagaaatttatgggtgactttttatttttatttaataaaataataaaatattatttatatataataaaataataataaaacaaatcttattaatatttgaattgatatttagcatatttcaactctatataactataact

SEQ ID NO: 394014 - DNA, 500 bp, Cannabis indica
aaataacatactaatcaataaaccgcttaatatctactaattgccacgatgtaactatgcggtcattacaagttcttttttggttgtatggttcttgcagggccttggcctcatgcatgcgaaccgatctcatattcggtcttagggctttcatgttcttgctttgtcctataggccctctattgtcaaacactactattttttagccttaaagcaatctatgacagacatatggttgtccttgctatcttattatggccttcacatctaaggattcagatttattattccaggccgaagtatgcctgcacgacttagaggtaggtttggtagcttattctaagcattatcatttccctacataagttctttgtgcaagttcaatggcttgtatggtatgggtgaccctcaagcgaccatgtaggaaaatctcttggtcacttgctattcactaagtttcacagactttgcctgacatcttccttggggtgctatccata

SEQ ID NO: 394015 - DNA, 775 bp, Cannabis indica
tttaattttgaataattaaatttacaatcgaaaacatgctttggatttttagatttcaacattgtaaaatgtgagaaaatttataactaacaatacagaatcaaaacaactaaactttattagacaaaaaaaaaaaacaactaaactttaatcaaacaattaataatgacaagattaaaaaattaagaacaataatcagataaaaaacaaggatgaacatagtaaggaaaaccaaaatacaattaagggagaaaataaagaaatcaacactaagatatatactgattcgagtttgatagatcgatgtgatctatggctctattctaattctggaacaacaaatcctctttattgattgagcaagaattagtacaatacaatcaagaaagattatctgttgagtgtcctaaataaaactcattttaatgttatcagatttactaattaataaaagattaaaaatcattttatgctgcataattcacataatttatttcatgattagatgtttaatgtataaattctattaaatccagaacatatagttattcatgattatagtgttgtcaacacagtggaatacaatcatgattatatgtttcaaaagtttaagtcccatgatttgtcagtacactggatttagactaacatgataatcagcaataaagtatacttacaccttggataagtgttatatcattttcagggtattggtaaagtatgctagtatcgaatgtatgtagtatacatctgattggaccgatattgaacttgg

SEQ ID NO: 394016 - DNA, 667 bp, Cannabis indica
gttatcaggttccattccattctcattcttttcttttttacactattttttttttttttttaatttatattatgtttatgttttctttttcatggttatataattagctatcttgatatgcttgagcataatccggacattgatcgaaatgaaacattagaagagttcaccaagtctcatggttactccgacttgtttctaaaagcttatctagtgagattcatatatcatttaactctttctaataagtcatatgtatttgtgtatttatgtatatgtattactaatttaattggtattaacatttataatattaatatagattccaatatgtggttcaatctggtcttgcccttcagaaggtgttatgagtttctctgctttttctgttctttccttttgtcgcaatcactatctccttcaggtatatttacacatataataaactttatttatgtataaatattatatataaactataatggggagcttggcaatggcaatcattttgtttctacggaaaagattgtttcagtagatttttttatctgtttcggtatttaagtgagttttttagtctaatatttttcataatcgaatatgttgtagctgtttaagactacctgtaaattttcagaaaattccgagtagtttacaatgccaaaaa

SEQ ID NO: 394017 - DNA, 555 bp, Cannabis indica
atttaggaatttagggcgaggatagtattttgcttaaatgaataaaatatagtttttttttttttttagagataaatgaataaaatatagttagactatagtaaaatgaatttatttttgtaagaacaattacaattgtatagataaagaaacattataaaaaagaaaaattaatatgaaatgtgtgaatcaaacaaatcaatacgtaggctttggaaaaggatgaacataacttttgattgctttaagaaaaagaagcgatttagcaagcacatcacctcattttagggggttttgaaagctaatctatgagctaaaagtggcacatttaatggtagtgatcaggttcgatcacatccaaaattatcaatttaatcttcgtttttttttaatttacaacctaagaatttcaaaataaatgtgtaagagcatctacgaatattaaatttagtgaaacactaacactaaaaaaatatttttatcattatatttttttttttgataaaataaaatatttttttaaaataatatattaatttattaaaattatcacaa

SEQ ID NO: 394018 - DNA, 1576 bp, Cannabis indica
tccatcttacagcactcacaaactgtgattccagacaatactccaaccagaaaaactcacaaggaatgatacagagagctacgtaacaatgatactgaaaaagggataaaccctaggcccaaatgaaaaggctaatacccactacaggggctgagcgtacggatcagtgcggtccgagaatggtacggagagcataaatatctagtatgggaccgtaataatataaatatctagagtataatctattaattgaggtatttaaaatatacattttcttaataaaaaaattatgacgatatatattcattgtagtcacgcaacaggcttcttgtaatttttcttttttagaaattttcaagctaatttatatggcttgaatcaaaattcaaacgctttgttatgggcaattattttctctcatacaagtaaagaataatggaggtaaccacgatgcattctcttaaaaaggatgatgcacctaaatttattttggtatttagaaaaaaaaattaatctcttattttttttttatactaagtacgttatagttatttgaaatattctataaaattttgagaaattcaaaattatttacaatataaaacagtctatttcacatgcgtataaaataaaataatcacatgtgtaacacataactataacgtacacgacctattttcaacatgttaaatttttttaaatttttttaaaattttgcagtaagtcttaaataaatgtaacgtacacgactatgagaaaaattagactaaatttttttttcgaatatcgaaataaataggagtacaccaatacactcctttagcagagtacattgtaaaatttttcaaaaataatagtcaactttgatttggatatgataaattaatgcaaaaatttattaacattctaataagatcacaatgaacacaatcataagtaataataataataataataataataataataataataataataataataataataataaattaaaatttagttttcttatatatcattggtacttttacaatacaccctactaaaataggtgtactagtataatccttaactgtttcggcatctaaaataatttattagtctaacttttttcgtagtcgttacaattatttaagacatattgtaaaattttaaaaaattcagaataatttacaatatagaaattaatgttcaaattatctattttacacgcatataaaataaaaaaagcatgcatgtgcaacagattttttgaatactatttttgacgtattaaacttttctaattccttaaaattttaaaacatatcttaaatattaaataagtatgacgtatacgattataaaataaatttagactgaattatttttctttttatattttaacgtataaaaccgataaaatttataatttcttctttttatatctctcccaatggatggggacaccgatcagaaacatttgggtcagcccattgaaaaggaagtccatttaggttagtgattcagagtagaaaatttacatggtatactaatttttattattttttttacaaaaatattgtcatgc

SEQ ID NO: 394019 - DNA, 454 bp, Cannabis indica
cgttctgacgttagtgatctctagtctacgaatcagtgttattaaatttgagaggtctttggatgtattgcaaagggggttctgtagcttgaagaatcctagttcttgttataatattgctcttcctctaggtttctcttagttaagaagaaagtgtagagaaagtgtgtgaatgtttttctatttttcctctccatttacataaagggatataataggttcatataggcttagattcgggtctggacatacccgcgatttgctaggatttctatacagaatgggcccattattggagaaaatatattaaaggaataattacataggccactattttttgtaaaaataattcatttttatgtttaaagaatttccttttttttacggtttttcataaaaatgacacgaaaacaataagaaaactacataaaaataacatgaaaataacatctaa

SEQ ID NO: 394020 - DNA, 539 bp, Cannabis indica
ttttagaccgtcacgtcaccacctcatacctctccttcatatataatgatgttaaattttataaaaatgaggacaacatttgttccctccaagttgaagaaattataattatagaagatgttttactaatttataaatgaaaaaaattaaataatttaaaatgtcaaaataaaatttaaatatttaataatacatgcttttattttctttcttatatgcatacaattaatttcaataaattttattctcaatattataaattttttttttaaaacaaaaaaaaaaattattcaaaacagaacaaattacaaacaaactgaaactacaagcaactgctcaaagagccaacagcagcctgctgccaaaccagcatacccaactgcaactaccaagaattaactacatcaattaaatacaacatacactgcttttattatacaaatttggaagttgttgaccgagattttcggcaactactagaatatgattatattaaagagctgtaagaaagtgagatgaaaatttttacgtggttgggg

SEQ ID NO: 394021 - DNA, 621 bp, Cannabis indica
ccgccattttccgttcatcgttcgacgttcgagacgcaaaaggagaagaagaaagagagaggctatcaagaagatcggagaggtcacatataagtatttaagtgatcgtgattctaatttcaagatttacttagttcaggggcataatttaatacatataaaagtttgaggagtatgattttgtagatatcaaagtctgtggagcatgatttagtacttgaaacagtaaaattgaatgaaattagacaaaagtcttaggccaaaaaagttcaggggcatgatttagtatatgtcaaaatttgggaagaaaaattgctaattagttttttttttttttcaaaaatatgtatactgggtaccagatgaaaattcccattccatctttgcttcgcttacattcctactcaaaattttgaagggaaggaaaaaaaattaattaattacagtacaataatcttttttcattgaaaatttatgtgtgtgtttggcccctaaagaagggtattttttctttttttgtttttgtttctttacttgggctattgaatttttttttttattttttattggaaaatacctcttttatttatcaattaactaaatatacctctaattttatat

SEQ ID NO: 394022 - DNA, 910 bp, Cannabis indica
cccccattcccatgcaaataattcggtcatacaagctagagggacattgttgatcgatatccaaaatgacgtaaaatcaaaattcatcttcgagatttcgcctaaccccatcgacttcacaaaacaaatgagctatttatcaatcgtccatggcccgcctccatacacccgctgcctatcctctcgactcccaaagaaataacgaaaaacattttttgaacttagctcttccacctgaaaccgattgtttattctccaaatccccttcatagctctctcaataccctccttgttgactggtttatgaccgatcactttaccaacaagacataaatccattctctttttcccctcttccacaccggcctgattcaaagcaagaacaggaccatcaccttcatctagcaccaagacttcagcaagcctattaaccaattccaaatccattggaaaaattagagagaacacgctgataacacaaaaacgttgcagaacagccaggaaaatcgcaccaagacccagggagaacacgatgagaacaccagaaaccagggagaacacagcaagaacggtcgactgcacccctcccaggaagaactgcccagaaaaaacccagaaaatactgtaaagaaactcgttgaagaacccagaaaatcgctgaaaaataccccaccagcccatgaactcgcaacccaatccaaagaaaaccagagaaatcgaatcaagatcaagaaaatcgtcgccggagatcatcgactggacccttcccatgaaaggactgaacttcccagatagtttcgtagctccaaaactcgtggaagactcgtaacttattgaaatataactaacataccaatacctgttatagtgagatttctctcacctgaaactcgagaccagactcctcttt

SEQ ID NO: 394023 - DNA, 1032 bp, Cannabis indica
ttcggtttgaacataattttataggttttagttctattctatagtgaattgatcatggagtcatatattcctgacaaggaaatttgagatttagggtttaggccgaaagggagagacggcataatttttgttgcaggccagaggggagagggatgacacgtaggtggagagagaatttctgggcttggacgcttaggaatggttgagttgaggtttagctagtggctcagagtgattttcggcgaagaagatggatgtttaagattgagatggtgcagctgagagatcaagagggtggctggtgagttttggtggttggttgacaagatgggagcaggttggggtgaatcggtgctggagtggagatgaagaagacagacgaagaagaataaagaagaaaaaaaaaaaaaagaaagaaaaaaaaagaaaaagaaaaagaaatcatttttaaataatttatttatttatttttattttttaaaattaaaataataatttggaccaataatattttgacacgtggcaattaaaaaaaagtaaacgactcagttgaaattaggactaacagacaaataaaaagtgtgaccttgaggactattgccgctatttttgaaggttggggactaatctgcatcaaagtgacatttttagagacttttgccgcaaatttcctaatgaaaaataacaatttgtttttcaacagagaaataaaatcagttagtaaactagttgctactagtttttttttttaataataaatatgcaaagcattgattcttataaacaaaccaataatgaaatgaaaccagcatacaattcgtacaattttagggattgttggcttcgtaacttaaaaaaatgttttcagttttaaaaatagaaaacaaattttaaaagtaataaagattgtttggccaatttttttaaaaattaataagcgttgcttggtcaaattttttaaaaagtgagttttaaaaaactagaaaataaaaagaattaaaatgttattttttattttcaaaaataattttt

SEQ ID NO: 394024 - DNA, 517 bp, Cannabis indica
tctctctctctctctctctctctttcttatgttcaggtggatggcgtttgacggagcttcttatacggcggggattttgggttgatagagcttcttatacttcgggattctgggttgacggagcttccaacttcgtgttcaaggttggggctttgtgttcacaggctttggatctgaactaattatttttaggaccaattgtttttaggtttattttgattctaatataaattgcgtataactgatctcaaattttatttgtctgatagaaactgatttgggggttttgtatttaggttatactattatttgttagtatgtacttattttgtaatttttttgattaattggtaattttttagttcaaaattatatgtatatatctttagtaatttatatcaaatttatattagttatttaaagtttataggtcatatatttaattaaataatatttaattgtattaaaatacaattaataaaatattattaatttttataatatataaaatctgaat

SEQ ID NO: 394025 - DNA, 760 bp, Cannabis indica
tttagttgcgatttaagttgtttagttagtttttataagaatttctatataaaattctataaaaatgctaacaaaaatatttcgaagtgtaaaaataaaaaagtctcaataaattattactatatattttagagaaatacccttagagacagcccatgagtggagacctcaaagaaggttgggactcggaatcaattcataatggtgttggccaaaatatgttctataacaacttttattttttaattttaaaagtaaaaaacaaaagtgaatttaattaatacatttaaatttcaattttaacttttgttttaatttaagtgagaaataagaaattaacgttatagaaagtaggttggggttggagtccagattaggggatcagggtatgggtccaagtccgggtccgtgtctggggtttgggttcagagtccataatcagggtctgggatttgagtctgaggttcgagttcagaactcagaccagctcgagccaggggtccaaatttgggtcatgggtctagctcttggatccggattcaagtcagagtccaatttcaaaatactattaatagaaaaatacaaagtacaatgaaaaaaaaaatattgaaataaattttgaaaataacttgttagaaagaaaaaaaaataaaatttgttttcaatagaacatgtttttttgaaaatatttcaattttttatttaaaaaaacaaaaaaaatattaaaaaaatattagagaataatgcaccctaaattttt

SEQ ID NO: 394026 - DNA, 713 bp, Cannabis indica
tcactccccaaacttaattgacagattgtccccaatgtgtcacccaagtaaagtgaagaaaacttactttacaactacatcagtatgacggtggaggaagtggtggttggtgtggtgaccatggtagtgggttcaaaaaatgatttaccgcttcaggatctatagtccaccttgccaaagccgagttcaactcactaacttgaccgtgagcgaaaacattttattagccctaagtactctctaacaaagttagacatgaggacacaagaacaaaattttaaaatataacattttacatcccctaacctttttgatgtctggcattgctcgacatgatgaaatatttttcatgttcatcactactgaccaggaaatatttttataaccacatggaggatacttatcattattttctttttatttttcttgtctctttttcccatcagcttttagtttttgagactgtggattgattttagactaaaaggcagtttcaacttcactttccttatgtgcctttctcgtctactttcatatcttcaaaagacactacaacatttaacactaatagcggcggacctctccgccgctattagtatcaattgtggccgctaaagggtaatagcggcggacctcggccgctattggtccgccgctattgcttggccgctattactagtattagcggccaaaaacatagtccgccgctaata

SEQ ID NO: 394027 - DNA, 975 bp, Cannabis indica
aaaaaaaaaaaaagaagaataatcaataagacgacgaaacgacctaaactttaaaaaacttataatcaataaaacgacaagaactaaccataataaacgaaaatttactacaaaaaaaaaaaaccataataaacgacaataatttaaaaaacgacatcaatccttaaaaacgacataaacttaaaaaaacgcgaataatcaacaaaacgacaatatctaaccagaataaacgacaataataaaaaacgacaacgattaataaaaacgacaataatttgtcgaaaacgacataaacttaaaaaacgtgaataatcaataaaacgacaataacaaaccataataaacgacaataataaaaaaacgacaacgattaataaaaaacgacataaatttgtagaaaacgacataaacttaaaaaaacatgaataatcaataaaacgacaataactatccacaataaacgacaataatcaacaaaacgacatgaatcaataaaaacgacaattattggggaaaacgacaatagtaatgggaaacaattaaaatactacaggaagcaagattatagactgctgaattaaatattatctcactaattccatatataaattaagacacaggaaaataatatatataaggcctggatattctggttttattatttttagttcatagagaaaaaaaaattaccttctcgataaacaaaaattaatattacaagaaaatgtgaaaattttacataagaaagtagaatgaaatgtattaagtgaaaaatttacataacaaattaatggagagaatagattttgaccattgttgcataaaaacaagactagtctaaatcccaaacctgcatattcccaagagaaaaatgaataagaatgaaatggaaattttaaataaataaaagaaaatgtaaacaaaccatataatttataaggggaatagtatttgcatcctataaaataataaata

SEQ ID NO: 394028 - DNA, 776 bp, Cannabis indica
tcaaatggtccaccacaacatgacacacaccacttattattattattattatttgacccaaaagtaagaagaagaaaaaaaaataatgaaaattaaaaagaagaagattttgataatatatgattaagcacatgatgaacactttaacaaacacaccacatgggggagtcactcgtgactttctgcctcacgggtgcttctttcagtacttttcacttccatcttacccaaatcattacttttgtttcaattttaaaattcccactactttatatagcattttctttactaacatttaaaataggtgacgttttattaagtgactatataaatgtaaatattgtgttaaatttgataaaaaaaaatgttatatttattattgtgttttattttatattataaattatgacaaaacgtaaaatatcattaataaacaacaataatttaaatattcaaaaaataattaaaggtaatattgtaattaaatatatatatatatgaatatattaaaaattattattaataattaatggtaaaactgtaattagaaagattatatttattgtatattaaattaggcataatattatattttatgtcaaatttagtataagattatcatactttatgttaaatctagtataagattaatatattattggagaactaatttttttaaaattttaaagcgtaattagtaatttttccgctcgaactttgacatatactaaattatgtcccatgaatattttttgtcgttaaaaatttcccctgaa

SEQ ID NO: 394029 - DNA, 1696 bp, Cannabis indica
atttaaagccaacaaacctgctcctaagtcatcacaccataaaatcggagtagttgataatggaataaacaacttactactaattgactctaaccaaatcaattcagaggagactagtacaagtgctcgatattcaaattcagtagttgatcgagcaactacactttgcttcttgaaacaacagctaataagattgctgcccaaaaaatatgcaatagtctaaggttaatttcttgtcatcactacttcatgccaggtcaccatccaagcacccttggattaaggtttggtgcagcagtagaggatagactaaggtttgatgtaccaactaatgtttatggttagaactcgtcaacaaagttagtggttggaaaatgagtaattatttagagatgtgataaagaggagaagtcaaatcaaagtgaaatgacgaatctctactctctattgcattcactgatatgtgttacaaaaatgaacttccaatcccctctcacatctgagatgggggtacttataggcacaagtgcccagtggtacaacatagtcaaagggtattaacacatcgctttcaagctgtgggctgcaagtactcgtggtggccttgctcctcgtactcttgtctagtgtcaggtgattcccgattccagctgcaagtggtgatcatgagctgcaggtgtgtggtcgtgagttgtagatgcgtggtcctcagctccagacgtgtggttccgagctacaggagcatggtccccaattgcaggttcaggggtccccacctgcaagccttaggtgagtggccatagtgtaccttttgtcgggccctcagaccatgcaagtctgttgtcgccgctacttgtactcccttgcattcaaaggtttcagaaagcgtgggagtatgccttcctctccacgccatttccccagagttcccatctaacttcacttttgtctatctgcctttacttcttcccccatacttacatccttcccaaatccacccatgcaatctcacaattggctcatttctctcacaatctcacacttggcttccgctacatgcacacaccacactcctcacctacacacatggctcgcttgcaagcccccactcacacaccccctaacactgatcctcgcacacacggctcgcatgcgagctcccatgggctcgcacgcaagcctcccactcgcgtgccctctcgctctgaccctcgcacacacacacacataccctcgcacacatggctcacgtgcgagagccccactcgcacgccccctcactccttccatcgcacatacacctgtccccctgcacacacgactcgtgtgcaagccccccactcaccactcatgcgctatcttcgcgagactccccggggtaattctcttgacggtgcagacgcgccctgacatttggagtaccatttttgagaaataggcctcgggtatgtatgttgacttggtgcacttacgcgagtctttcttcccttaggcgaataatctcaaaaattaaagatgccgatttttggggttaacactttcccccagtctactagaattcttttaagtgttcttgtagactgtaggactgagggaacttgtgctgctgcaaagtaatattgcttgtcccgtttatcgaggttgtgtccactatatatagggggcctcccttgcttgatgtgacagtcagtagtcc

SEQ ID NO: 394030 - DNA, 522 bp, Cannabis indica
aaaaatgggtggtatactcaactttccgtgtggttgtttagtagtcttataaataaggttgaaaaggtttcgagcacattgaagaaaaataagatgagagaagtattattagaagaaatttgaagaatgaatgaataatatttgaacgtagagaagaaaatagaaaaattaagctaaaatacatatagtaaaccatttgatggagaattactttacaatttttgtgctaattttttaaaacacaacaattttagaaaagctattgaaaggattcaaaacattttgactaaaatcaattccaaaaatctatatatattttcttacataataccgtcgtcttccaaataactaataatgcaaaataaatgctctaaggaaatacaaatcatacaaaaagaaattctatccccaataaaaataaaagtaatttgctgcataaatatctaagtttaactttcagttgtagataaatacttaagttaaattttgtacagtaataatacttaagttatatttcttgaa

SEQ ID NO: 394031 - DNA, 729 bp, Cannabis indica
atatgtattttgtaattaaaattacttatatatacacataattatataaaaaataattataattattataatttaaatattactatcaatttaatttatcaatagacatttatcattattactatcaaattattgaacattgtaatgtcatactttctttcgagataattcatgctttcgggcgtgttgtatcgtgtctaagtctatattttcgtgtcatgttgtgcgtaaacttatatttttttcttgccataccgtgagaagtgtgtagaaatcgatccaatccaataagaattgaccgatccatttacaaccgactgtcaaacattagatatccaacaataatttgatcgaattgtatgttatttttaaatatcgagtcatatgatagatggagtgttcaaagatccaatacatcctatcaaattaattaatattttcatttaatttagatgaataattaaattttatattattacatgtaaaatctatatatatataaaaattaacattaaaattttacttttttttttagattggacctatccaatccaatacatactcgacttaaaatattaaataaatacaatctaaaaaatattaaatttgaagtattaaataaacttaaattaaactaataaatatatatataatatggataaaactggtccaatccaattaattagatgactaaaattaattaaatcgaatcaaatagtaaaatctact

SEQ ID NO: 394032 - DNA, 833 bp, Cannabis indica
gctgcagaataatgactcctttcaatcactctaacatttgattcatttctatagcaagatattatcaagtaatgaacttggatttctctaacttccgagttggcaacaagaatgttagatctttttttgacaatttaattgtcaaaatattatttaatttgttgcgcaattaaattaatattttatgttaattttgtggctttgattgcccttttccttttaggaaacttttatttatagttgttcctttttatttaggaaacttgtcttacaagagaaagaattatctttatggaataatgcctatttttgaaaaaattgactttctatttctctgaattttaatttcagtttttttatgtatatagcaaatcaaataatctttatttggtaagtattgaagaccaaatcatgatcttggtcctttttggaaagtttctcgatctgctgcagcagaatccgagcttaatgctacaaatcaagaatttttttaggaaagttttggacaactttaaaaatgtgtttgtgactgtctctggggcttctatattatataaatggaacctggagagcaaccaaacattttttacatcttctaatttcatattttcatctttgtgaggagagagtttcttttgtgaaaacctagagtcttcaactagattttagtgtatatttttttgttcttatactgtttttagaattggttgaggaacttgtttgaacaagcgtgtgtattcgggagaagacttttccaagtctcattttgggaggaagtgagcatatatctttgggagaagatttttttaagtcttacttcgagaaaaagtaag

SEQ ID NO: 394033 - DNA, 612 bp, Cannabis indica
ttttaagcttaatagctaaataggtacaaagttatactgtactggttatttaagtattgtatatatatgtgtgtgtgtgtaatatggacagattcgagcttcgttccgccgttgatatacgcggtgttgggaacatctagagatttggcggtgggaacagtggctgttggatctcttctgatagcgtcgatgctgggaaaggaagttagtgccaccgaagacccaaagctttacgttcagttggctatcactgctactttctttgctggtgtttttcagtctgctttaggatttttaaggtaacaaacataatattatatacatacatacatacatacatgcatactgtatatatgtactcttaaaattaatatatatgttatatgtaattaaaatatgcagacttgggtttgtggtggactttctatcgcacgcaacaatagtgggattcatgagtggagcagccacagtggtttgccttcagcaattgaaaggagtccttggactcattcattttactcacgagactgatattatgtctgttgttcactctatcttcactcaagtacaccaggtctatatatctatatatatatataatatatattatgt

SEQ ID NO: 394034 - DNA, 912 bp, Cannabis indica
gttacagtttgagttgctccagtggtttctatgtggatggctatgtgaattttagttacaatttagattgctttgttggttgctatgtggatttctatctatgtgtattttcataaaatagcaaaaaaaaaaaaaaaaaaaaaaaaataggtttgatgtgtaaaaataaaaactccctaaaaattaattcatttctattttattaccttcaatcaaaccccactttagagttctaaccacaactgaatgaccaatcaatagattgatcaggaaatgtgttaaaaattattttaccaagatctaatttaataccatgtatatttgactattaacataataacctaacaacctaacatataatctatcaaacaatgaaataaacacgttagaattttggatatccttacattggttgcaacagaataaatatgactccttcctttcattcactttaacctttgattccctttctgcagcaagcactactacaaaaaggcttattctcatcggtcctcaaattagttttttttttaggaacgtcactaataaagttgtgtgactatttaaagtcgtcgactatagtggtttatgttggattttatgccctaactaaaactctatttcaatataatcttaaatatttatttatcaataaaggaacaaaattattttattacttgtttaatatattgcttggttcacatgtttatttcatgatcatttatttaatttataaatttatttaaatccttatcacattgttattcatgattattgtattatctacgtagtgaaaagtaatcaagattatgtgatataaaatatacctacgatttatcagtacacaggatttctacagatatgataatcaacaatgtaatttacttacacttggatagtgttatgtctttt

SEQ ID NO: 394035 - DNA, 885 bp, Cannabis indica
aaaaacgtaaatttttgattgtttttaaatatttctgaaataatccaaagatttttgttagatcaaaacaacgataattaaagaaatttaatttcaatctttgatgcccttaatctaaatgagcactactcctaataatagagtatacatgatagattgatcaaaagaaagtatgaacaaaaatatttgttattctaaatttttattttatttaattttttttttaataattcatacaattttattaatagcaagctaaaataatagcctacaacttaaattgagacatcttgtccattagaaaacacaacctagattaatatcaaaaaaaacgagcctaaataattgaccatttgatttctagatcgtttgataaaaaattaaaataaaatcatgaaaaaaaattgtagtgtattacaatattaagcttaaaaatacttatatttaatttcctccacggtttaaaaaacacaacagtataaattattttagtgtaatatctataattgtactactaataacgatttgatgactagcaataacaaaaataaagaaagatatatcaaataggttctatatatttaaatcctattagataggatattagcactacaatatagaaaatatcatgttaactatttagtgtaaaaagacaattagaggaaggattagtggttgtggttgtattgttaaatattcatatgaataaccttctttgtcttgataagaaagaaatcaatttattaattatgattgagatcacaaagtagtgtgtttggtggcaaaatacatttatacatatatatatagggtaatactatggtaggacctagtaaaagttccctaccggtggggaacttttttctaaccgttgattttagatct

SEQ ID NO: 394036 - DNA, 916 bp, Cannabis indica
aatattataaatgataacgtggtatttttttttttaaagcagtgggtcctaatatagataaataacattcattaaaaagagaaaaataaaaaaaaatgcacatatcattactaatggggtagagaatggaatttttcttttgtgaaaattgtagtaccagtactaagttatgattatttattgaccaaaattttcgacaattaattaaatatttgtccaatgatgattagagtgagtttgagagtagagatttttacgcgattcacatgttaaaaaattttagtttataaattatttgtatttatgttgaaggttacaataatggtagaaaagtgttttggcttgacctaaaattctctgatccctttacaatgaaaatagttttcctatttataggaaaagtgaggtaggtccccttgcattttgcattaatcccttggctgattttgaaataatgtttgaaaaatatgacatgtttttgtttgtcaacttttaatgacattttatgactttagaacctttttatggtattgaatttgctatttttgtaacacttacttagaaaggtcatattttatatttaagtaccaagttcatttaattaagggtatttttttatggggagttttatttactgggtataaagttataagtacaccatattttaataaattttatttaatataaatatatatatatctttgttataaaataatatagaataatataaaatagataagaataaaagaagaagaagaagataaagagatgaagagataaacagaaagtgaatgagaatttctcaattgtttatgtcaatggggtaaacctttatacaaaagtattgactaaatgaatgggaaactaaattaatatgtaataaagaaaaatataatcaaacattaatggtgataat

SEQ ID NO: 394037 - DNA, 1225 bp, Cannabis indica
ttttgttttactaattttctttcccaaaatttctcaattagggtaatgtagagagagagtataaagaagtggtgctcacgaagatggagattaggatgaatcgtcactatctttgccagtggccatacaaaagctcgatcaacttagaaaaaatttcaaattatttttgaggaattgattcaaagaaacagatcaaggtgaggctcattaatcagaacccagttgactcttatacacgcagactaagggaattgaaaagaaaaaaattgattcgacaggaaaaaaaaaagaaaattaaaaaatatttccatggcattcaatggacgagttaatagataaacattgattgtgcaggagctgttgatgatagagttggcgaactgcagcgtgggtgatcagggacggagaagactcctgcgattgaaggtgaggagccgcagttgatcaactatgatatctctggttcgattttacgaatgaaaaaaaaccctcaataaaataataatttttaaatttgaatgagggtaattttttaaacccaaaatttaacttcccacaaaatctaaaatctaaaaatttgtgtgggtcaactttaactaaaagttataattttagcttaaattgaaaaaaaaaaatgctattttttttttattttactaaacactttttaagtaatagatttttttgaaagtactcttaattttagattttctaaaagccaccctaaacgggtcgttgatcccacttatctaatagacaacacactaagcaggtgatattgttgatgcgtgtcatacaattatgggattaaatgtacacgattattataaaaataaacaaattattcataatgattgctcaatgaggagtagtgcaagtatgtcaacatttcaagtcaacttggctagctagtactgtatgtttttcaagtagtactaaaagttggtcttaattagaatcagtcactaattaaaaaaaaaatacactataagttttattaacatcatgagcacatgaatattatatagatgtatatatattactagcactaacatcatgaacacgagaatctatatatgtatatataaatgtaatagtagttgcattacaattatatattagaatatttttaattaaggaaataaaataaagtattgatttgtgataaatgaatattttatattcattgaatttggacaaaatcaattacgtaatattctatata

SEQ ID NO: 394038 - DNA, 1268 bp, Cannabis indica
aatctagcactaccatcaaaactaatggctgtgcttaaatttcttaaaagctccctataataacaacaaagtaaagaatgaggtctttactagtgtatttaaaaaaccatacttaagtcagtaagaactggagaaataattgtaaagcatcaaatttagaagcagtatcaatgtttaaatcaatttaagaaacaaaaggcagaattatgtcttttataaaagttataaaatagatcattttctttcagtataatcattaattaggtagaacgaacgaacgaaaattaataccattttaaattttgtcttttataaaaattataaaatagatcatctattttgttaaaaaatatataaattaaactttgtatttttcataatggtacaaaactgtttattgaacttaatttttgaattttttttttttaagaaaacaaagttcaagataatttctagtacgaacatatacataaggtgtacacagccttatcataacacttatagatcaggttgttattaagttttagtttaaaaaaaatcaactcgggatactattttgaaaaatatatagtgtaatttgtcatttaacaaaagggtctaattaataacttttacaaaataattcaaaaatagtatttacccctattttattccaactttagaactccatagtccaaattgaaagagaacaacttgaaaaagaacctctcaaaatgtagaaagcttaataaagaaaattcttaccatataaagatgataaattaatgcttaaagatactagtggtgcctaacatgctcataagtattaatattgctattagtgtaagtaagtattgagttgtatatagtttaatgtaataatttttagggaatatcgttaacaaatcacaagacgatacatctagaatgtgttagatactaatggtacccaatatcaataatctataagagcatctccaatgggggttgtccattggagtggtcttgccacatatgcaatgtgatctaattttaggagtaatttttttttttattcaagtgtttatatattacaactatgttttaggagtaattttatgtgaagtgttgatcaatatagacaatggccgcatgactattttttttattggaaaaattatttttttgcctaaaaagtcattaattcaatgtgatgtaggactatagtagacaacttttagacttgtcaactattagagcattattttttttttttaaagagaattgctaaaaagcaccattggtgccta

SEQ ID NO: 394039 - DNA, 760 bp, Cannabis indica
taaattattacttttttaacattgcaagaatttattggagaactttgtggccatccataggatctaaatggataatttttgctggcgcaacgacttctagcatctagtggacactaaaaaatatctatacatgtatataagatagtgtaaaaataattgcaagttataataaagaaaataatttcaaattatctcttatgtagtgttcacccaatattctagggaataaagaatatttggtgttggctattcatcaatgataacaaatgagctaatccttttgacacaaccttaaagattcttccttttctaaatcattgttaccgtgtactgcgagaagctctgggtcataaaagttgaaaattcgtctcaaatcatgtagcccctcccaaatgtgcctgcattaaattgttagatattaaaatttttataataatttcagtaaaaattgatatacaaagtcaattaggttaaagaagagtatacattattcaaaaaagtattatttccctagtttctgatgaacacaacgccacctattgtaaatcttctccagatttggtgatctgggtacgaggcgctatgaattcatacccaaattgagatttttcgccttgattctcagaaattctacaattatccaaatgattgccctagggattagcgccatgatctctggagtgaataatagatcagcttgatcactactgccttttcgacaaggcatgggaccttttccctttgacacatcacgtcttga

SEQ ID NO: 394040 - DNA, 1650 bp, Cannabis indica
atttgatgaactatgtatgaggcctcaagctagtcaatcgataacaagtgtagccattttttttgtctaaaaaactcttcaacttatttcactttttactttttaaatatttaaataaaaaattaaataattaagtgtaataatttaaaattaagattacaagtataataaaatttaaattatgaaattatatgtgtataattttaaattataaaaaattttgctataaaattttaaataatttaagtgtaaaaaataaattgctaaaagatccttctatagtaataaattgcaaaaaattaattaataattataattaatttaattttaaaatataattaatcttaattaaagttttataaggaaataaactattaggttactttcatgttacaagttatttattatttatctttatttaatttccaaattaatcacaaccatttaatagtaatccaataacttaaaaaatgtaaccacgatggttacataaaaatgtaaccattaaaacctttttcttatacttatagttttaagttagttggagatatacatatttaaaaataataaccttatacttacgttttatagatatttatattttttaaaaatcttgaaaaatagactaattttttaaaaaaattcattatgaattaaaaacgtgagttgaggttttttttattacttattgaattaattaatagctaatgtgattaaaaatgtgaaaaaagagaaaaagaatagaatataattaagctattttagacggccacatcaccgtctcatgatctcctttttatatatatatatagattctatactgttattaagttgttgaagcagatcagttctatcattctgccattctatcttggcatcagaattcagcatgaggcacttttagggctcatttagtatgtcgtgtattgtattgtattgtattgtgttagattgtattttattgtattgtattgtattaatattatttaatacagtactacgtttggtattgacttgtattaatagattgtgtaaagttgtaatatattttcaataaacttgaccccaacaccgactacgggtcgggtcacgggtcctaggttcgagttcagtcttgggtttggatcttgggttcgggtctaggtctgggtctgagtcctaggtctcgggtccaagtctgggttcgggtttaagtctgggttcgggactgagtttgagtcttgggtcctaagttcgagtcttgagtctcaagtccagtaccgagtttaggttcgaattcgagttcgggttctgggtttgagtccgattttgagtccgagtctgagttcggattgggtcctaggtataggcccaagtcccgggttcgagttcgatcccggtctggctccctggtcttgggtcctaggtctgggttcgggtccctaatctggttctgtgtccaggccccgagttcaggtctggtttgggtccaagttccaggtttgggtcagggtccgcgtctgggtccaggtctgggtttgggttcgactcaaagaatggggttgaccggaatcttttgtaaatattataatacaagctaatacaaaccattcgttatgtactaaataattcaacttacattgtattaaaaattttggttgtaataattaa

SEQ ID NO: 394041 - DNA, 711 bp, Cannabis indica
aaaaaaaaaagaaaaaattcacttactgacaatttaatatatcaaaaaattcaaatagcttactagcaaagaaaaacgatatggctttgctattaatttttccttagacatctaaagctgccgccatatttcttctcctgaccaaggtttgctggccttttttggccttgggtgtggctctggttggaaatattcatgagggacatggctttctcggagtggttctcgtgcttccttctagtggggctttcttctatgggcgaggggttgttgttaggcggctttggtcgtcaatggtgtctgattcggctcaagggtgtggatctgatggtttttgacagtgtgtgggggcatgactttcatcttttggatttgatggtttcaaaaattatagggcgggttcgggttacactcgattactcatcaggctgggttcaggttctgaaattataacaccccaaaacccaggtcaaacccggacccacccaaaaaaattgtttttttttagttaagggtttatatattacacaatgcataatttgggactcaaactcaggacgtccaacacacacgcactctcttatgaccacttgagctagctgattaaactcgtttatatatatacaattagaccctagacctccttttaaaaataaaaaataatagtaaaaaaaaaaaaaagtgatatctgaaaaaaaatgtaaaaaaaaa

SEQ ID NO: 394042 - DNA, 1340 bp, Cannabis indica
ccctctttctccctttccttgctcaaccaccaccaagacatgtaagaaccaggaaaaatctcaacatttattttgaaatttaccaagaaatcaagggagaatcaagtagaggtcaacccttgtactttaattctttagttgttcaagcttaagtttaattcatgtatgcatttttgtgaaactgtggctgttaggatttgaatgaattgtagtttgatttctaggttcattttgagttaggtttgagttcgagctgctgattttagggtttggtgtggtagatgtacaagtttgattttgaaaactcaagcttggttcgtctacggcatattttgactctatgtgtatttctgaattctattacttggaatatgttgtgggaggtcattttaggcgttctggaagttttggtgagatttgggcatgattttgaattatttgtgttacctggtgcaatctgattaactggttttataggccctgtgaaaccggttaaccagatcagggtttggtttctcgaattttttgtattgtgaattcatgctatttttagggctttgtttggtaaaatccttgttagttagggtactatggtattaatagttaattacagaacccttagttaggggtttggctttcccagattaatgtttttgcatgttattaacccgtatacgtgaatgtgactagggcatccatctaacacaaagtattttgttcaagtcgaccaacttaactgaatttagaaacgaggtaagaatagcatataatatattgtatatatgcaaatgtatgtatgtgtaatatatatgtatgcttattgtgattcgacactaccaacactagtacggttgcggtacacagtgcattggtaaagtatacgatgtctgaagagtacattacggtgtttccagcactagtacgagtaggtacaaggtgtatgtggtacaacacttaatagtactcggggtacggttcataccctacctacactagtacgatggtggtactgagtgcatgtggtatagtggtacatggtcgtatcttagttaagaacgttcctactcatttgctgaactttgtagataggtgtatgggcgcatacaaacaagtcaaaattatattatttgttacatgtttctcttactgagtctgtcgactcacagttgcttcttctatctgtaggtaagggaaaggcaaaggctaaacaagagtgagttccgagctaggatggtgtttgtatatgtcgagacgatgcgacctggagtgttcggtgtcgggacatcttggatcttattttgtagttgctgagcgactagtttataaatgtattttgataa

SEQ ID NO: 394043 - DNA, 962 bp, Cannabis indica
ttattttatttacttatttatattttttgcggggattcaatgaaaaagactttttagtcaaatataacacattacatatcttacgtttaagtaattaatttctcctataaatcaccagaattaatccataataatcaattcactctacgaagaaacacatgacatatctaatcaacagatttgaagtgagagatctgttggtgaccaaaaccaaagcccaataatccaagaatctaatgcatctcatcatgtcaaagtcaaaaaatcctaccagtacttgtctcttgatcatcatcaccatatggataagccttgtaaatgaaagccagtgctgtgatcaaattaagaacaaaagagccttattcgtgtttggggactcactatttgatgctggcaataataactacttcaacactgctcttcgggccaactattttccatatgggcaaacttttttcaactacccaactggcagattttctaacggccgcttaatccccgatttcgtcggtaaacattattattattgtcatgaattaactattcatttctatgctataaatctttaataagattacttattggtcaataaaatatatatgcagctgagtatgccaagttgccattaattccaccatatttacatcctggttatgttgactatacatctggagttaactttgcatcttctggagctggtgttctgattgaaacacaccaacaatatgtatgtctttgtcttattacaattgcacattttcagaacacccttctatctagttctttcaaacttgtccaccgaggccttgattgaggatggtattttttttttatttatttttaattagtttctgttatattattttataatataataagtgtagattaaaatgtagtaatatatattattatgtgaataatatgtattaggtatttggtaaataaattgtgtaacatataat

SEQ ID NO: 394044 - DNA, 1099 bp, Cannabis indica
ttttaatgtaatattttataaatgtaatattaaagaatgtaatattttataaatatagattgtttactgttggtttttgcgaacaactgtcaatattataataaaatttaataaatggcatgtgtgaattactacgtcaagtgttgatatttttattaataactacacaatattatgttaattattgctatgtggggaggacgccagagcactatataactctttcttttttttttttatcaatttaatcattaattttttttcttatgcatacagatcaatattgtttgtgagtgttgtaaattgagctccagctcaaatgggagaaagcatttcaacaatggggattgacctgttttcccctttcaagatgggcaacttcaatctctcccacaggttagtcacccaaatccacatcgatagatttccgttagtatggaaaactcagaggacttagatatgggtttggactgattttgcttttgcttttacttttacttttggtgtggttggcacttgggcagggtggtacttgcgccaatgacaaggtgcagagctatagatgaaatccctggaccagccctggccgattactacaaacagaggtccaccaacggaggattactcatcactgaagccacttccatctccaacacctcacctgggtacgttttactatttatatatagttgctatttggtgacatatgaaactacacattttaagtacaataagttagcctttttaacattaaattgcaacaataatagtattctttgttgttcgatggtgattctagcaattctataaatatagttggcttttagttcttaggaagtaacaattaaaaagttcataactatttaatattcgcctacagtttgaggtaggaccagactatttttgtttttcattgatacagaattctaattttctaccaaacacgtaaagttaatataaaacgtaatccatgttagacttttatttgggcttacattaaattttattggttttattaaaacttgggttgattggatagttctttgctgtgttagcccatgttgttggtgatcaattgttaatgggcttatcatctgtg

SEQ ID NO: 394045 - DNA, 1133 bp, Cannabis indica
cctcataatcttacaacatattttggattagacaatggattgcccagacactcctatcaacttcttcaaactaaagattcttcaaagaaaccagcttccctcatgtgcttattgcatagctaatttacattagctacattttcttctccacatctcaagacgagcatagtgcttgcttctttatatatatttattataatttttttttggtgtactttcattttagttttttatacttctctctcacattatattatttaataaaataaataatatttaaataatacaaagataaaatagaaaaagtctgatgtatggaataatataaatatttgaggtaaaataaataaaaaaattagtgagctattttaaaaacatcatagacacactgatgagggtgctctaaaagcttggataaaatatttgtaaaaattattgttatttgtttttagtttttggttttagtttgatagaagtgggagttacttacaaaactcacaaaataatgttgctagaattatatgtcgcctgatgtaactattgaaaaaacaagagcttataacagccatgaatgcaagagcttaagcatttggttttgaatcctagtttttgtgaaactccaaaccaccttatttaatcgattttgcatttaattaagagcttataacagccatgaatgcatatttgatttttaagctagtgtgatcatcctaaccactatatagaagtttaaaatgtacattttggataatttagttttttatcaataagcacttgttagaaaacacaaggctagataattgttaaagctaattctgggagttctcttagtgcttaaaggtaggagaaataagtttttagacaaaaatgataatacattgttcaagtcatagtaatacccactaatccatactcaagattatgagtgagtgatcttcttcttcttcatattaaatatatgtatctgttatataatattatgtaatatctatccttctacttttcttatatatataatatagtatatactaggtgatgctaacacatgcaatgcacgtgcctagctctttttatttcatttttttatatttttgtttgcttaattttaatttcacaaataattataacaaaaa

SEQ ID NO: 394046 - DNA, 701 bp, Cannabis indica
aaataataatggatagatgatgatcttgagtttggaggaagaagaatgaactgacagaagagagtgagcacacagagggcttttacataaagattatgttattgcttttgcgtgctcactattctatctgtcaggttataattaattaatttcacaattgattatttatatattcctctttattaattctatcctccatcatcatcatcatcatcatcatcatccacttttcttcttccatcttctttccattattttctcttgtgttcttgttcgttatggtgacgatgatgatcattcccatttaataagagttttagaataataaattggtaagttttattgcttcttttgtatttgtatttacattaattaattaaccagctaatttgtgaatttatttaattattctacagttgagagtttgatcactatgcattaattttccatttcaatagtatgaagagaggattatcaatacattacactgatcatccaaagtttctatatacacaagataagtatctttcatcttcttaattttactttctgctaaattaattaagtactacttttattttgtttttaataaaagttaagtatttattacctcttattacaacctcttagttaatttccacgttcaaaatcacatgtcagaatattttttttcatagtaatattcgttatagttacagtat

SEQ ID NO: 394047 - DNA, 1903 bp, Cannabis indica
ttgacgacaaagtcaagggcttttttggagcagcttctgcccatttggtaaactagtctactgcgactacatcaaattgtacccctccttttctttttaacattaggtctatcccccacactacgaagggttaaggagattgcatcatcgtgagctcattgggtggagctcttagaatttttgagaatctctagcacttgtcacatcttttgacatagtccatggagtcctcgatcatcggccaggaaaacccttatttgagtatcttttttgataggctttacctcccggcatagttgccgcaaaaagccttcatgcacttcaatcattagacgttcagctttagccttggtgacacaccttaagagttacatggaaaagctatgtttgtacattactccgtctaggattagatacctagcagctttccttcttatctttgttgcttcattctcgccttctgggaaggctctagtttgaaggtaagctccaataagtgccatcactgttggagtgtcatccagcatatcgacttctttagggacggtaatgtttggttccagtaggaaatgtattggcaccaagttggccttgttgcaatggtgctacttgccagatgggctagcgcatatcctgtagcattctgctctctagggatctgcctgattgtgtagccttttagctgacttagtaagtatttgattttgctcaagtaggccaccattttctcacctcgagctatgtactcacctaggatttgattaataactagttgagagtcactgaatatgtctaagtggtcaaccgatacttcatgtgccaacttaaggccagctattacgacttcgtatttagcctcgttgttcgaggctttgaatttgaatttgattactctgtgcacttgctgctctcaggtgttataagggcaatgcctacaccagacaattcgtcattgtagcttccttcaacatggagtttccatgttggttctttaggtttttgttgcttctcttgctcttgtttcttctctggctcttgcttttctcctaaatcttgagagatttcaagagataagtttgcacactcatccatgaagtctgcaaggggctgaccgtttatggatgttcttggttgatatgtaatgtttaattggcaaagctcaatggcccacttgagtagttggcctgatgctttaggtttttgtaaaacctactgcaatggttgactggtgtacacctttatggggtgtgcctagaagtaaggtcttagctttctggaagcctagagcaagttgtaggttagcttctccatgagtgggactctccgcgtcgattagtctcttactaatgtagtatacagggtgttgtacaccatcttcttctctttgtgaggacaacactcacagcatgttctatgactactaggtacatgcctagctcttcattgtttaggggttttgacaacacgggtggataagccaattgtttcttcagctcttcgaatgcattttcacattcccctgtccactcaaatcttttgttgcctcttagaatgttgaagaagggtacacatttgtctatagacctggatacaaatcagcttagtgcagtaatgcatcttgttaggctttgtacttccttgatagttgtgggtgacttcatgtccaaaaggtcttggatcttgtttgggtttgcttctattcccctggcattgactatgaagccaaggaattttctagagcctactccaaaagagcatttgagggggttgagctttattctgtagctgcgaaggattctgcagcattcgtcttggtcctccacatgcccctagcctttttggactttacaagcatgtcatccacatacacctccatgttgcggccgataagatctttgaacat

SEQ ID NO: 394048 - DNA, 925 bp, Cannabis indica
ggagcgtatttaaagcccacaatatcagaaatattgttatgggagtcaaatttaaatgtaattaactacctacctatattactataaataggggcagattatacaaaaagacgggacggaaaacctttgagagaaaaaagatactaattgtaaaaccctaattttgtatccacaaatatctgaataagatagactcgtggactatgtagaattaactgcaaaactacgtaaaaatattgtgtcatttttgattctattagtcttctcaaatttcttataatttctatgtcaagtctattacgaaaataggctcataatcattaacgaatatctgcgataacaagtggatagtgtgaatgacttaattagctatgttctagttagggatgaagaatgatggacgctaaatattattatgatttattaaatctatgtgtttggtgactacctaactgtggtgatattattgttctttatattgatgagtgatcctggtttggttactaatatctctttataattataggaattattcaagtaattttaaacatgtattttgtaatataaattaaaagatcatttataagtgttgttttcctacaagagtaaaagtgttacttttgaccatccaaatatgaatattacatatctgtcacgacctacggcttaggtcgtgacaacatgtgtcattgtctttaaagtttttacaaatacttaagaataaatttagaaaacttacgaaaatattgtaaaatgggaaaattttacaaaaatactgggacatggagatttatacatttttactctaccaagtttacaaaaatactgtgttaaagttttaaaattacaaaaatactgtgttttagtaaaataaaaaaacacaactaagatagctaaaaaaaaatcctagaacaacttaacaaac

SEQ ID NO: 394049 - DNA, 645 bp, Cannabis indica
aaaattgtaaggaaaaaataggcttataattaataaggacaacttaaatatacgcccttatcatgaatttaattagtataatcatatgaatcatttaagaaaaataaactagggtttgaagggctatattatattgagaacactaacaatacatgagtagagatataatataatatacctcaccgaaactttattatttttaatttactccatttataacatattgcattattatacatcaatttttttttttaaaaaaaaagaagagaaatcatataaatcaagcacagatcacaaagacacatgcagcttacatattgtttatacaatcaatgatatatagtcaaatctctcctatgcatcttcattttggctatgtttaaaattctacccttaagagtaataacattcacaatcaaaaacttattttcatatatactaaacatttctatttattcataaattgtaaataagcacaacaagaaaacaaacattagagagaatgcttcagagaaccaatccaaaccagccaaccatggagctgaaagagccaagaagtgcaaactagccaagtgtcactataaaaaatcttaaagataaaaaaattgtgactaattataattatcattattgtgttgtgactaa

SEQ ID NO: 394050 - DNA, 596 bp, Cannabis indica
ttttatcaatttaattatttttcagttaggttactatgatgttgtggttaaaacatattattaaagaattgttaagcttcttaatataaatatttttatttagtagaatttttttttcgtaatcgctcaacgaatttaattgctcataacctttaaaataactctttttataaatatgacaagaatttagtagtcgagataacttacattaaaaaagccaacccacaaatttacaggagccaatatatataaaaaaaaaaaaaaatatttgggggcagaggcaacggcaccttcggccccctttggctggttacttgaatttgtataagtttttaatttatatttggcaaatgactaatgaagcaatttattctataaaaaaaatattttttttttcaaaaattaaaataaattaaaaaaaaaagtaattattgcatgaatgtgtagcattgtagggttaggggtaccttatataacaaggccaatcttttttttctttatttatttctgtgaataataaatgttaccctttattgagagagtgacatccattcactctaccttaaataggtaagtttttttaaaaataaaataaa

SEQ ID NO: 394051 - DNA, 650 bp, Cannabis indica
tatatatataaatatttatattaatttgagtaccttcagtcagtcttcctaattaacagacttgctattttataagtgctaaaaatacaaaggctccagctttcagattccatgcatgatactgatacatcatgcatggtaccaccaagttgaaaataagtgttctttttttccttttttttttgcatctccattcatttaggtggacgaaaataatgaaagacaaaaaaatacttaataacatgcatccaagagaattgtgaacacaaaatatgatattattataagaccgtgtcaatattattagaatagttttatatagaatttattaaatttaaagcaagtggaatacagtattaacgaccatggcataggattgttgagcatcatatataatgtaccgtcaacaagtcctaaaataataataataatttgaatcttcttattatcaggtgtataatttttctttttcatttttgttttgaaaggaacattttcattaaatgttcttggaacattttcgtcaaacaaataataataatgaaataaaacatttgaatcttcttgggctatacattgtcaagttattgtgtatacgtcaaccaaataatataaaaacaattttttttgaatggaacatattcattgat

SEQ ID NO: 394052 - DNA, 898 bp, Cannabis indica
tttaagttatatttttagatcttttgtaagtacctgaccaagtcataatccatgtgcattttttaattggtatatttaaattaattttaaaataaaaaataaaaatttaatgacctaaaccaatcaagaactaccacatgactattgacttgacacttaatgcgtacctgggaaagttgcaaaaacataacttaattatttgtctgcagcctaaattaaacttatgtatttatgctgcatattacgtatttttcttaattgtgcatctacgttatagtttttttaagacaatttataaattttaaaaaatttattgtgccataataaatatgcaaacaactttttattatgagtataagaaaaaataataatacctataataaaatatttaaacattatttttagtattgtaaattatttaattttttttaaattttaaaaataattctaaatagctataccattatcataaaaaaagattaaacaattcttctaaattctaaagctcatagaaatgcaaatctccatttttattgggtgtacgtgctataaaattacctaaaaataagtaactatttcttttagtttatacataaatatttaatttagtacagactaattcatcaagtgtgaaactaaaaatataacacatattgtgcaaaatgggtttcacgtaaaaccaaatgaaaagctgatcaagaagaaaacagcagtgtaattggtacgtggattgtactgaaataacgtctaattaattagtcacggattcacccttatttacgtagtaaaataagaataataatacaattatacacgtcacaattatacatgtcattttaatcagtttccagcaagtttgaggttcaaatttaattatatatatgatactaggatgtat

SEQ ID NO: 394053 - DNA, 818 bp, Cannabis indica
agaccctgccgactccggcccgagccttagcctcgatcccagccttggacctagacctagacctcgaccccaaacccgacttaaaatataatcaataaatgaaaataaaaataaaatttacaaaacacacttttgtttttttatttttaaaattaaaaaataaaaatagttataagatatatttttaattttaaaaaaaaaaattaaaaacaaaaattttacttatttttctaaattaaaaatttaaaaacaaaaatattacccaaatctatctaaatatttagcacacacgtattgtgatcattatttgctttgttagtgcaagatttgcttacataatacatagttgattgtgtccacatcaactgtttttgtttgttaaaatattaattatattaagtctatattgttttgttatattgatgagttttagtttgaaagaatatatgttgtatttgataaggttattttaaatgtatatattgcaaggtttaaaactaataataatatttaatgtataataaataatcaaaatactaataaaatttatatacttattattggttttaaatagtattttattaatttatatttataaaattaatgctgattatttagtattttgagtggaaattagtatcaaaataattctaattctgacaattcatctaattttcataataattaagatctatgaagtcaaaacagtcaaattcatcatattttcactttttcgacaatgtaatttacaatcgggtaatttcgagtctcttgtttttgcagaatagcaacatcttcgagaactggtgaccagtttt

SEQ ID NO: 394054 - DNA, 882 bp, Cannabis indica
tattgttttgttagtttagatagcattattaacaaaaagaaaagataaaaatagaatgataacttagcaaagataagaatagattaagacaaataattatttcattactttcggtagaagaatacgtattagtgcatattaaaattgcgttgtcattttcataattaattttaatattacgtatattactgaaaattcccctaaaaaaaaatgtgtaaaataaagcacttatttatttttatttttttcacttttttttcactctataaaagaatacgtgtacgtgagtgcttttagctctatatccaatctaattaaaaagagtggtccctttacagcaataattgaatataattttgaccaattgaccaaggtgtaatttgattatttaattgaaagaaaatagtattgtacttttaatacattttatataatttaatataataatttttataaaatattactaattaactgtgaacttatattagttaaatactaataaaatttattagtactttataataatattatttcataggggtgtttattggatcacattcaatgaatttgtacccatccgatccaattcaattatttattggatatcatatttttctattcgatccaatccaattgaattgagtcatctgatccgatccgatcgaatagatgtattagattggatcggttccatccattagatgctttaattggttttttattagattagaatgtatccatccaatggatcaaatagatgaatccaatccattttagccactatatatttaattaggttgatttcattaaaatatatatatatgtatatatatatgaaaaaacataatttaaaacttattaatccaacatagataataaaat

SEQ ID NO: 394055 - DNA, 692 bp, Cannabis indica
taggactaaaaaaaaaaaaaaaaacttttaactataaagataaatgatatttttaaaatatttttttaagggcccctaaaatgagtgggctttaggcatgtgcctaacctgtcttaacatagggccgaccctgttctactattaccttataaggaaaggatcttaatctctatataataagattgttaccatttttacataataatttgtaataagttatatcatttttataataaggtcgtcccaaacatgtgacagtttgagttactgcacaagtccttttatttaaaggtcttatttttttttattatccttatatatatataatatgataaaattttgtggtttaatacacacgattttttacagagaaacccctatagtaactaacatgacaacctacatcgcaactaaaatctgtatagcaacccacatataaattaccggataaactatcgaagcaacccaaaccgtaaattaaaaataaaaataaaaatagaatatgagataattttcctaataaatattcataataacaaatatgcacttacaaaacatgtgataaaattttgtagtctcaatacacacgattcttgcctgttagagattttattacaatggaagaaaatcaagacattacaacactattgcaatataatacaagaatcaacaaagagattaaataaatgtta

SEQ ID NO: 394056 - DNA, 879 bp, Cannabis indica
attgatgaaattaagttaataaatacatgtatatggtgtaacattttttaaataattgaagaattcaaaggcacagggatacgacaccaacaactagaagcaaaccacgatttatttattatttttaaacaactgatgtgattttcattcttcttagtcaatatattatatgatatatggacttggagatgaattcgttgactaacattactttaatttggatgaattatatttctacatcatgtaatatcttatgaaggaagttaggttcaatattttgggacagttatatttatagtttttaatattaataagaataaatattttaattattgtaagatctaaagctgtttattgtttgattttatcgtaaaaagaagaaatcttaaatttaaatttctttatccaatatcaaaaaataaagctacttattatttatttacattttatatatatattttaaaaaatatataggtcaactgattattcgagtattatagattaattttgtgtctaattttaagctattataaaactaattaaagagaaacctctaacccactcttttttgtactttttttttctaaattaagtggcacgtctaatctaattaataaagaattaaaatatcctacattttttttagagaatccacattgttatacacagtcgacaagtaatgctaatgctattgggtaatgaggaattaaattttgagaccctaaaaaatatataaaaaaaaatattaaaagaagagtattatgagattttaacccatgaccttgaacacattccaaccaactaaattatgaatatttattacttatagtatatttaattttatttaaataaaagtctaataattttttttttaatttt

SEQ ID NO: 394057 - DNA, 1002 bp, Cannabis indica
cgaatccttcatttggaattcatcgactaacaacttctatacgtctgataacctttctacattgcttccaataagtagaatgtcatcaacataaagaactaggaataccactacatcacctttaatgaatttgtatacataggattcctcttcgttttgttcaaagccatactctttaattgctttattaaaggtgatatttcaagatctagaggctttcttcaatccataaatagatttaagcaactttcacacctttcgatcttcccctagtaatacataccattctagttgttccaaataaatgacttcattaagatcacaatttagaaaaccgatcttgatgtccgtttgccatttctcatagtcataagtggtagctatggaaagaagaaggccgatacatttaagcattgccattggagataaggtttcatcatagttgacgccttctccctgtgtgtagccattagctacaagcctagctttaaaggtctaaccttcccttcaacgtttctcttcttcttgaaaatctatttacaccttattgatgtaatatcttaaggtggaatttcatattcaagactttagtggtgcgtgctattaatgataaatcttgtagtgctttcaaaaaaaactttgaaccctcaaattggtcaaacaactaatttatcatcaattaggatactttttcttaaatgtaaattgatgattcaatttctaataaccgacataaagtcagaaaatgatccattaactttcttggcaaacaaatggagtttcccacggagaagtgctatattcccgatgtaacatttttccattaactcccttatatactatgtatcaatttagtgaactatgttgttatcgttaagtaaggcacaatagaaataggtcaagcttcaagaatcaaatcaatgcaaaactcaatctccttatccggtggtaaccttgttaaatactttgcaaacacatttggaatgttggaaattattttac

SEQ ID NO: 394058 - DNA, 957 bp, Cannabis indica
ctctctctctctctctccttcgtgcagccaagaaaccaaccaatattagggaattttcttcttcaattccctttgatttctggcatatcttcatcccaattcagcctagaagctttgaggtaagctactttgctttgtgaacttaagattttcaagtttgttctcgattagggttttggtgatttttgtaactgtggggttatgatgagttaagattgtgttcatagggttgttttagagtatgttggagcttggattaggtgactttgatggctgctaagcttgaagtaaggaattttgaattttaaggtttaattaggattcaaactttgtaatttgtgataattgtgaaattgtagtgtttcgatgtgctgggtatgtttaatattcgatattggattgttctgaaagagtgtagcaggtttgaggagttttgtgtggtttttggggcaaaaaaaaggttttccatttctgccaactgagaaaccagttaaccagctttacaagtgttgtaaaacttgtaaaaccagtcaaccagtttcgctagtaggggaaaattctagttttagcctcgaaatcggtttttgcttgcggtgtattttagaacttagattagggtaatttagcgatatttgaattgttcaaatctagtgggagttggatgtctggttatggagattagggttttattccagagttttgacttaaggtatttattaagttttggtagtcatcacataggaccgcccaacttattttccactcaagttggcccgcacacttgagttcaggacagaggtaacaaaagtgttatgcatcatgtaaagaccgcttagcttaatttggaaattagcagttaatcatgtttaattatgaaattatttatagctatttaaataattatttgtactgttattattgaattctgagatgcattttatgtcatttagtagtttt

SEQ ID NO: 394059 - DNA, 868 bp, Cannabis indica
tttttaatatttattaatatatattgaaagatatgtgttaatttgtcttacaaaagaagcaactgtgtttttatagaaagacctgagtttgtttccattaaggatgtctataaatatatatataatgttatatctacatcgatggattaggacaatctctctctcataattaagaaactcaaatgaaccaattagaaagactaaaagtcatcgtctatactatataagtcccttttctcatactgctattaataacaattacgtttgttgatccagatcatgaatattattatatatattatcatcgcttaatgattgtgactcacctcaactttgaattatagataatatacccataaatatacatactgccctttcccggtttacatatataaagatatatatatgtatcaccagtcactactactacttaattaatatatataaattatatatgagagtcttcaaattattaatcagcatcccaaaaaaaaaaaacagacggctatatgtatgtagagaggaaggattacccgtctacatcgatcaagggaagagtaattaattattattattattttgaaagggagagcgtaattattcatatacatcgtaattaattaattatgtttctaaaaattataaaaccaatcaatcaattttaaaggttatggatttcgacgtgtataatatatattcttaaataataatataatatattacgtaccaattaaaataatatatagtaaacttggtatcctcttattactagctaacactgattaaataatgtaagcagtgattgattaattttcaaatcgagattattaaatttgctctcacaactttatatatatacatatacata

SEQ ID NO: 394060 - DNA, 633 bp, Cannabis indica
agagagagagagagtgtgtgtgattacagatgatgtaactactggcggggcgtggcaaataaattgatctcttaattaaaaagtttctatgttcttctccccttccccactctcctctctgtatatatatttttttttaaaatcctacaaaaaaaaaacaaaccacaaaagtgaatttgtgtataagagacaggttggtatatatatatgatgatgatgaggttcttcttgttactacttcacttttggggtgcaacaaagttttttttcttttatgtttagagaaaaagatcaagagagagagagggggaatagtacgctgtgtagtgttatatatatgtatatatatatggatgagaagaggagtagtcagaaagaggcgtgagaaagggaaggcatatatgtcagtttccttaggagcaagacaggtaatttgcatggggaccataccagattaagacctttgagtccactctctctatctctttcttttttcttcttcttcttcttctctatgttttctttctcttcccccttttacatatcaccttctcaaccgacaatctttctctcttctctctctctctctctatatatatatatattcacgtctatatatatattatatataca

SEQ ID NO: 394061 - DNA, 512 bp, Cannabis indica
tttttttttttaaaaaaatgtaaagttattaattttttggtgtatacttttattttatatatgtctgggaaagaataaaacggactaaaactaaaagcattgattgcagactcgctccatgtaagaattaaacaacaaattcaagttcaactttgtaagagacgcggctacgctaagtgcaaccccacttctgtccgtacacgtcatatggcgactcatataacaattacaatgctgataataaaatgaaagaaaatgaaacattttccttttataccgaattacttattttctataatgcataattttctttgactagatttatagttttagtttcttgcatacagagaccaacccagaactaaagttgatggggtatatatttttattaagcatttaaatttctataatatgtattagataatttaaccaatatatgtcaaaattattattatatttatattcaccacatttaattataaatatatattgtaattaattaatatatatat

SEQ ID NO: 394062 - DNA, 585 bp, Cannabis indica
ttttattttattttttataataacgttaaatatctaaatcataatatttatggttaataattactgtataattatacttaaaaaaaattactgtataattcttctttatttgttattattattattattattattaaagatatgtgttgtaactctaatataacatttattactataaaactaataataaaagattattatagaaaatataattaataaaaaatttagtctacattacaatttaatagtctcattataagtcaataatttaaaaataaactggatactcaaatgaattttatctggagagtttatattgtataccgacttttttaattttattatgttttattatgccacaaaataatttacaattttactgctttttcaaatactttataccgactttttttttaacttttattttgtcaattttgttgctagagatttctttaagggagatttttattatataaaaaagtgtaaaattggttgaggtaatgggtaatatcacatcttaaatagatttttttttaattaattaagaaaaataagagtaatttgcggcataaatacctaagttta

SEQ ID NO: 394063 - DNA, 608 bp, Cannabis indica
tattttttataatggtatacataaaaagtgtgtatctgtatatatatctgtatatttaattaacgtataatggtatgtattttttataatcatatatatttataaatagaatttcattatttttaattttgtaattaaaattacatattattgtatatacagcaacgaatacaaattgaatgtatttcaaatttcaattattgggtgtgtttggaagtaactgtgtaattactaggtagggtaattattagggtagtaattacacagtttaataattatattatattttaaaatgcaatgtgtgtttggatatggggtggtaattacatatgaattcttactatcttgtttggcaaaaagttagtaattacatagggcaataatatttttttaatagctaatatttaatatggaaagtttttagtaattacacagtgtaattacattcaattctcatgaggggccatgagaattggagagtgtaattggaacccctcaattacttccaattacacagttacaatgtaattacatggtcagagaaacatgctaaattgtgtaattacctctaattacacacaaattcaattacattatggctttccaaa

SEQ ID NO: 394064 - DNA, 600 bp, Cannabis indica
gatatcactaaattcggtactaaagttacaagaaattaaaaaaattataactaccaaactagtaaaattaattatcattaatttttatatctaattatgtagtgatttacagtctatttcaacgagtcaattttaattatatatgatatcatataaaatcatctaaatttatatatctatatatgtatattcaatttaagtctttactctaattaaaaaaaaaaaaaaaattaagtcttaaaaacatacatacaacaaacagtgtttaacattcccccatatcatacgttccaaaccataaatatagtattgtcttgaatattgcaccatttcataagttaatcaaagtcatgatatcatttattaagtaagtcatcttgtagtgtgcctaaactggtgtagatcttttgtaataactgcattttatttgtttttgaccacttgaaaatttgtcccattcacacattccaaactatattattacattacacaaatatctactgatcaatcattattatgtcagaatattgaactataataccctttatagtagaacctctatttaagaataaataaaaataacttctaaattgtaattag

SEQ ID NO: 394065 - DNA, 828 bp, Cannabis indica
attaaactatattaaactataggttgaggtctcttcatggtagacgttcaacttcttctaagcggttggtgtccgcgtgagacgcgtgagactcttcgaatgccttcgagatgtctcttgaacatatgttgagcttggtcttctccggattatggagaagcagtaagacctctggctcccagacggtggtatgctgctggacaagtcttcaggtaggcttttcccgaacttgtataacttctcagcgatcctgactaattaagggaacttaattagtgaatgtttaagccggtgctactcacttttataccacacgacctttctctaaaaatatgaataacaattagtattaatgaattggtagttaaagtaattaaagttattttccctaatttcttgtttattgattgaaatttctatatttgtttactttatgtcttacatagtttgtttacaaaattaatttttatttcaccaaataaaaataaagatctaaattttgttggtacttagctacagttcactattataaaattagatttttagtcgagtataatattttcgtcagtctttaagaccaacgcttattcgattgttgaaaaattggatagaaataggctgccgtggaaaaatatcgagaaagttttttatttgactgtacaaaactgttgccaatattttgtgttttacgaatggtcatatcgccctaatagtagtaaaatctgttactggtttttttagtcagggagttgatatatactagttctaatttttgagtgattttttatttaataaaataaaaatagtaacaaacataaacatataaag

SEQ ID NO: 394066 - DNA, 1338 bp, Cannabis indica
cataatcatcaccagctttacattaactttggtacttttaagaagaagaagaagaagaagaagaggtggtggcatggaataaatcagagaatttcttgactatatattgaaacatcattgttttgaccaacctttttttggggagaaagatggcatgagtgttcttagtagctttttggttgaactttttctcatctgggtggagattgattgtgttaatatgaagctcttttctggtgatggtttccaaatctgagattctagtactcactcccatgcctatctctctttttgtaactctgtttgtgtttagagagctatgataataaccactttcagaaattcttaattaatatgttttacaattttatgcttttttggggctatttaaagacaagaaaaagaggagagagagtgaaacatggtcaattattaagacccattttccttttctatttttttttatgctactattagagaacagcacaggtggcatattatctttggtctaacattgcaagttgatcctcaattaccattttttttagcattgctgttaggtaacagtggtacctagcactttctcgatatgtcgcgttgcaattggctagcgatattccctaaaagctattatattaaactatatgtgactcgatacttagttagacccataacgatattgacacataagagggtgttaggcaccacatggtgccctttaatatttttttttagaccactgttattagagactaataattttcataactttctacatgttgggctcataacaagtaatattctctaaaaactatttttttaaaataaaattatgaaaatctttaaaattctattttgtattacttttgtgtatttatgaaatagtcacttattaaaaacaaacaaatccaaggtatatttttctacgaatcaatagttagttagtactaaaaaagtgtttctagaataaagttagaaatatctttatatataatatatatataagttacacattcttttaaatagaaaatataacataaagcaactaatgcaaactgtatgcatgcatgcgcagagtcatgaccccacttaaattttgataaattatattatataagaaaaaagaaaattactttatatattttctttatttttttttaatttatgatttgtattttttccaataatttttatgtgaattgttatgtaaattttgattgctatttaacttttttttgttaattattatagaaattttatgtagaattctaataaaaaaaaaaaaatatatatattttaaaatataaaaataaaaaaactcctaaaaaaattaattta

SEQ ID NO: 394067 - DNA, 839 bp, Cannabis indica
gaagaattttgtagcaaacatcattgagttgaaacttgaaattcatcgactcccaaattgagttgagtggttgactaatattatgacatgaagcctaccaaaaaaaccaatataagccttatatgtgtttatattgaaaaatatatatcacaaaccaaactttttcttgatgcttttgatatatgaagttcttgaccaaatatttcaagactttccatcaattaagtgatattaggctttataagtcaagcaattcggcactttatcatttttttttaaatatttttataaaatatatacacaaaatgagatcataaacattatttgagaagaaattttagatgaattggtcaatactttaaatcactcaatgaccaatgacctagggtacaaggaagatgatattgtcttcaaaactgtacaaatttttccaattatgataattaagggatgccgattaaaagaaaaccttcaatttttttttttttttgttgagaaaaatgaaactttttattaattggcaaataagataataattcattatgatatatcactcaaggagcataattaacaaagatagacaaatcatatcatttaaaaaaatatgaatgaaaaccctaatagcacatataactaaaatactaataaatcatcagtattgaatcaccaaagaaaaacaaagaatgctacatatacacgtatcaataattatcagtcaaagatctttcaataaaatttaagtaataacaacattattattcaatctagaatgaaaagaaataatcaaataatcaactatgacgataaaagtcgtaacaaacaatcgcaccataaactat

SEQ ID NO: 394068 - DNA, 1152 bp, Cannabis indica
tagctccgatcctggttcaacacagaatggtggacttctgacgaactctgcaaatggtggtatatgaaatcgaaacagagataacgatgaaaactcgcttgaggcaagaatgaaacttaaaaaaatcgatggggcttgcacaagcattggagcatatggttcaattcaatgcaaagtaaagaatcttaccattatgttatggtttgtgttatgtttttgctacataacaagcggaatgaagtactcacatatagaccaagaattaactaaacacttatgtcaaatagactgttactgattcaatttagattacaatatcaatatccttatagggagaaaaatgaaaggcaaaaatggttgcataattgcattgtgcattttgaacaaaggtaaatctttcttggtaagagtataagaagttaaaaacaaaatgaacagatttgtctggttaatggaattattcaataattgaagatataacatcttatagacaaacaaaatagtaacttttatggtccaccacatcccgagtagccattaattttggccaccaaaattggacctggttaacatcctttcacattgaacttattaatgagggaagcaccacttatttcatcctagattcacattgagttaaaatacctaataatagttaagatgatatatatatatatatatatatatatatatatataacaaattcaatcttcgttaagcaaatgaatagttttatcaacccaaaggccaaagaagaagcagaggttaaagctcactatgccaaacttaaaaacctaaaaaataaaagttaatctcctgtgtaatttgacatctataccaaaaaccatatcagaaaaataaaatatgtgaaacacaatagtttgtatcaggccacagttccttaaaaaaaaaactcgtgtataaattcagtacatacaattaggggtggacatccgatccaatccaattagtaatttagatttagagaatcatcatccgatccaattcaatccaattagacctcaaaatccaatccaattactaattggattggatcgattttttaattggatattcagttacacacctaaatttcaatattagcttaaaaatataaagaaaaatacgtaaaaaactaagtatcacttttta

SEQ ID NO: 394069 - DNA, 773 bp, Cannabis indica
gttgaacaaaaagaaagaggagatagagaatgatagcgggtagctcccttgattgaacggggagtaggggggaatagagagagagaggagctccctcgggcgcgtgcggcgtgacggggagcgtggagctccttcgggcacatggcgggctacagcggggagcttgggcacgcgaggagggaggagcagctggacagcgggaagctcgacccatgcctttgctcctcctcgtaccaacacatttgtgcggattgacctcctcatcctcttaagcgtattttagaatttatacttagtgaactttcagatataacactaatgactctctaaaaattacacttagtaatttttgaaaatgaacatatatttgtgtatatattttgaaggtgacactcttcatagaatgtaactgaaataataaaagtcagcaataatccttcaattcatttaattaaatcaaaacccttcaaaaaatttcttaaggacattaaaactctatagccaaaatatcaaaatcatattaaaatatagttatactacaaattaattatatttgattagcaatagtaacatcaattatacaagttagaagaatagtagacccttaatttagataagagatatcaaaaacaaacaccaaactaataatttatttttcttccaaaaaaagctaatattattaatttaatactctaataataataataataataataatgattataataataataataaagtgttaattagaaaagtgattattcctgacacaa

SEQ ID NO: 394070 - DNA, 618 bp, Cannabis indica
aggctgtagttgtcctatctttcttcaagatcaaggtttaaatcttttacacttcaatttttgttttaaaaaattatttaataactatataaaagataatacaattcgaaatcttaacaccccaagataagatgaagaaggctgtagttgtcctatctttcctcaagataaaggattaaatttttgacacttcaatttttgttttaaaaaattattttataattatataaaagataatacaattcgaaatcttaacatcttacaggaaaaaaaatatcacgtttactattacatcaaatctttatatatgataggaggtctctagggtataatatattttatgtgttgtaccattacaacatgcttccaaatcggctcaatttaggtattttttatgacagtgttaattataattataataaaattcctatatatattttcgaatattttatagtaatgaaaaaaaaaattaaataattttattatgtgttttttaatatacacaagtgatagaaactaaactattttgaaatataaatttggcagtgcaaattcaactacaatgaatattatcataaagtctaattagtaatttttctctccgaactttgatatgta

SEQ ID NO: 394071 - DNA, 431 bp, Cannabis indica
ttcttaaaccaaacacatgattagtttcatcataattcaatcgtatctagtccaatctaatcttattcagtccaatccagtccaatcctgggtaccaaacgggccccagaattatagttacacatgtccgtaagcatgctaattaagttgttcatggactggctaaatatactctagagttagatgaatatatttgttagatgggtaaaatctctcatcctattttcactgtaaatgaccttattttcaataatagtgatatactaaaaaaaaaaaaaaaagttattttttatttgtcttgtagtgaaatcccatttttctattgatgttattgttatttgataaagttacattaaaatttattaatggcgtccaaccttgaaaaatgacatttcaaaaaaaaaaaaaaaaaaaaactttgaaaaaaatgc

SEQ ID NO: 394072 - DNA, 887 bp, Cannabis indica
agaacaagttaactcaattcttttcctgagtggtcagctaatttttgtaaaactgatatctttcctcctttgtagttttgggctttgttaataaagattacttttacaaaaaaaaaaaacaaacaaacaaattattggagccccacaaaatgtatttcaattcaacaacccagttctgactcgtattttggataccatctagaaggtcttcgattggtcaaccgataaatagaaactattttataatattatcaataatagtaataaagacttggataagatgtaaagacccagagatattaattaagcaccaaaccattacaaattaaagccactcaaaattatagttgtacattcgggctgagctgcacgataaagtcatagagacacgagcatgatatggaccaaaaaaaaaaagataatgggactttgatctggtataacatgaaaaaatgtagatttagacaaataaaaaaagaaaattattcacaagaccacacaccaagcataaaagcacataaataaacacaaaaatggggaataaaaaaacatgaattgcagctataaatatgtaatattaagttctcacatattattaatacaaaaacattctcttgaaatagtgattattttttgcttatagactcttttaacttctttttttttttttttaattggttaatgattttggagcagatacttgttagaattttattttagctttgatatcatgttagaatatgaaaatatagtaaagaaagtagaatagagtgagtgtagggtaagatacatgagacttaccctacactgataggggcggacccacattgtaacgagaggggccgcctcctaaaaaaattaggaaaaaatgtatatgtattttagtt

SEQ ID NO: 394073 - DNA, 796 bp, Cannabis indica
tcttgtagtgttgaggattgatcgagaaaatactagtgtgtatttttcacgagttcaattatttttggatagataatcgttgataaatatgaaatgatacaagaataccctgataggcttatagttcaaataagttttatctaaaatatttttctaaaaattgcttccaccttctaatatgatttgaaccataaaaatcaacagaatgtacaaatatttcggtaagaagttgtaagatcttttacgtttctttgtagttcatttagtggccttccctactacatcatgcattcatgtagttcatctttataccctatctgtcattttcaagtcaccttttatattaacctgagtgcattttgttctgaagttgaggaacttggttttatgtggtctcctaccaattaggggtgttcataaaatagccaatccaaactaatctagacgatctaatctaatccaaatgcaaagtttagatatccgaacttatgcgaattagatgttgattggcatgtaaaagtaacttattcaatccaatctacacatgtttacataattttttaaaagttatatatataattaatatttgggtaaatacctttttggaccctttgttttacaaaagttaccaattggaccctgtgttttgttaaatgacaaaatggaccctgtattttctaaaatagtacaaataagaccctgaattgattttttgtcaaaataaagtttaattataatccgatctaaaagtctatgacaaaactgtttacatttttttgtatctgttcatattaag

SEQ ID NO: 394074 - DNA, 1010 bp, Cannabis indica
gattgacaaaataataaactatcgtcagcaaatagcaagtgttaaacagatggagagtgccgagtcaatttaaggccattcaacataccagcttgctctttcgaatgcaaaattcttgaaagcccttctgaacaaatgagaaataagtagggggaaagtgggtcgccttgatgtaaacctcgagatggaagcacttgtcctacttcttcaccatttagagaaaaggagaaggagctgctagttatacacctcataatcaatgatggcaatgcaatatcaaagcccatcttaagcataatagcctcaaggtattgccattcaaccctatcaaacgcttactcatgtccaacttgagtgcagaaaccccaactcttccttgagtcttgtgacgatatgatgtatgagtcaaaagcaatcaagatgttatccataattaatctattggaaagaaaagctgattgtgtttcagagataacaaatgggagcaccttcttgaatctgataacgattgtcttggaaataattttgtagataacattgcacaaacttatcggtctataatccatcattgagcttgagcttgggttaggcacttttggaatcagtgtaataatagacttgttgagctccctcatgtgaagaccattgttaagaactccaagcaccagattagttacagaagtgcctactatattccaatagttttggtagaacatggcagacattccatcacaaccggggctcttatcaggactcatagatttaagagcatcatacacttcttggctcgtaaagggctgaattaaagattggttcatgtcattactgatggtagttgggacagcagcaagaacttgttgcaaagaagcatgatctacaccatctgaagcaaacaaattatcataataagcacatatggtgttggtcatatcagtcttggaggtaacagtgaagccttgggaattgataagagatctgattgtatttttggacttcctggaggtggcgtg

SEQ ID NO: 394075 - DNA, 679 bp, Cannabis indica
tataatatattttacttacgattatttaaagtctttcaaagggctttagtaaaaatttttcaataacattcatataaagatgagtatgttgtaaaatataaaatacaatacatttatatagatgaccataataatagagaattaattagttactaaaatgaaaataattattaatgtttgattttatttttttattacattgatttagtttttttattcttttagtcttatttttgtataaataggagttatcattcactctctcattcttttattttttttatcattcactctcttattaatctctttttaattgtcttatctcttctcatattttttctttattctatattattttataacacgtgacactacaacattcaacagcattagcggcggaccactctgccgctaatactgtcctttctggccgctaaagagtattagtggcggacttcgaccgctattggtccgccgctaatgcttgaccgctactaatagtattcgcggccgctatttgtctaaggtaaaatattatttaaattttttgaattgtttattttaaagtcatatacattaaatatttatttatatatactcatttgacttaaataattttttaagaacccttttatttttttcttttttgttatttatatatgggacttttttattttta

SEQ ID NO: 394076 - DNA, 505 bp, Cannabis indica
cacaccaattcgatcgatcgagaagacttcatttcaatccaacctagacctcgccaatcccttcctcaaccgtaaataaagaggccaccgccactaacggggaccgcctacacataccatgaatggagaggacacgaacgaagacattctctgtaattttctagttttttctgtctttacgagtcgatctgatagtgttcaatataggtttgataggaggttctaaaatttaagttttgaggttgatggtgaaggtccgatagtggttcgatatagatttgatggtggttagatgcatagtagctgattggtgaatgtatttcgtgttcgatggggatccaatactgtttgaatgggggtctgatggggtcataatgtactgggcagatgagtatatatataaatatatatttaatgtatcatgactttgatataatttaagaactttaaacaaaaaaaaaaattaccataagcaaaattcatgttgataacgtgttataaaata

SEQ ID NO: 394077 - DNA, 1116 bp, Cannabis indica
aagaaatgagcgacaacctaaacagatgtggttagattttttcatacgtggctctctcattttttattcaatccatttaattaatgtattgcaattaataataaatttgttcatattatttattttttttattaaaaattattttcaaattttgatatttagaattagttaaattttaaatattattttaaattaaatttgaatgttttgatagtttaagagcattttcattaattccgaagataaatttaggacgaataataattttttttaattactattacaaagtataatagtaatttttgtttttatttaaatcactattatgctttcaaatttcaatgattatcactacattgaatattattaattttaaaattataatattaaaaaaaactaaaaactaaaataaaattaacatacgtgacttggcacgtaacatctatctagtaaatacataagtatatatatatctttactaatatcacataaaaaaaatttatatatttttaataaaataaataagggttatttataaaatatgagtaaaaatattagtttacatatttgcagtgtaccacaatatatggtaattttagagagaagatgagaagaaaaataagaactttaacaaaatacccttaaaaaatttagggatttctaagaaaattattgttgaaaaaattgttggagcagccatgactatcggaaagtcactggaattggcatcggcaccagaaaagtcatcaaacttttcatcattgctgaaaaatttgtcggagttgttatcatcactaaaaaagttgttgggttcataactggtgggcccgtctgactttcatattggacttctcaaacatatcatagttgacttcatcttcctcccacttgatttaagcccatgtcttaacgaggacgtcttccataatcttacaaaaatacttgatgagttctttgtataagtttgagtcgtaacgaagtcctttgcgaaaggttgaagttgttgtgtgctgattgcaattagtaatggacattttctctttacttgaaaatgacatgtttgacctcaaaaatgtgaatttatcatttttttcaatattaaattttaaattaaca

SEQ ID NO: 394078 - DNA, 1193 bp, Cannabis indica
aatgtgatggttttggtcacatagaattttaatgtgctaatactttgaaaaagaataaaaatgacttgaatgctacttaaagtgacaatgtttatgaaagtagtgatgatgaattagttttttcaacctctcatgcctcattttttttagaaaaagaaaaaccttatttgcatgaacaacactgttttggataataaatgttctgacgatgctatagaatttgaattgaatgaagattctttggttgaatcttacaatgttatgtatgaaaaatagatacagatttgttttgaataaagattaataaccaaaatgaataaaactcaatctcaagaaattattaatcttgaatcgaaaattaagaattatgaggctggtttatgcttgaaaattgatgaaattaatattttgaagaaagaactaaataatcttaagaaaaatgttcagttgcttaaccctaattcttctatttttgagaaagtacaaaatgtagatttagtttataatggatctcaagccactagtttatttagatttgtaaaactagtgagtttttgagtattttcaatttttcagggaaatttattgttgctgcaactttgccacctgcaacagaaactttgtcacttgcaacaacaagcgaatcaggagcttaaaaagggtaagaaatcaagtgagaaaatttattcccatttgttatttttgtggtattaaaggtcacattcaacctaaatatttcacattacaaaatatgtttattaggtcaaattattttggaaaactgaataaattgaaaacaaaacatgtttcaccaaaacaaatgtggattgaaaaaaaaaaaaatgtattgttgatttttttttataaaaatactgcttcataagtgtggtgttttgacagttttcttatcaacatcaggtctttgcagtgtggtgaggtaacatttagtaatggtctagcataaaatgttattggtaagggaaatctcaattttaaaagactaccgatgttgaaaatttttctttttgttgatggacttaaggctaatttaattagtataagtcaactttgtgagcaagatttgtctgtaaattcttttcataataattattctgtgcttgaccaaagtgataattgtgtaatgaaatatttagatctgtttgatgattgttatacttctcactcattttttt

SEQ ID NO: 394079 - DNA, 811 bp, Cannabis indica
ccatacaagtgcgaatatccgcaatttgcggattaattagatcgaatcgtgcgaattggattggattgattattttatgaacactcctagtctcttacattggactacctattaaatcttttgagtttgattaattattttttattactgtattttttaggagatccttctttttgttttaaagtacgatcttttctagattttattactagtttgctatccaattttcatgaagcatctctaattcatatttattgtacacatgaattaacagtttgtgcactcaaaatgaatgatgaactagtttgaatggatgctttttatcttttctctatgtattttgtcattaatttagttttagtcgcttttttactttttgtcacaaattttgttgtaaataaaaataaaaatttttatagtgtatataaactaatttatacaaatatgaaaacaatctatattataaaatttaaagcaatgatttatatatgtttggaggagaaaaaataaaatataaaattgaaaaaggagaatgattttttttggaaaaagaagagaattggcaggatccggaaaacatggtggagctgagtatgcaaatgggtcctatttcataagaagagggaatttagggcatgggaaatggctttatcacaagaaaaaatatataagagagagagagagagacaaggacataattataatataaataattaaagaaaaatggattaataataataataataatgtaaaaaaattattccatatactatttttttttaaactttttttaaaatttatggtttgagtt

SEQ ID NO: 394080 - DNA, 512 bp, Cannabis indica
ttcgcctaagataaggccaataggattgcacgagtttcaacctccaactgagaagaagcatatgtttgagcagtacactacacccaacttccattagcaaaattagccattactgcagctaaactagctacaccagcctcccaagatgcattagtacaaatcactaaatcaataccctccttgctaggcccaactaagcttttcgaacaacatactagtctctgattcgaagtatgaatcaaagcacaatattcattaaaagaggttgttatcttgaaagaaaacaagtttaaatcaacagtaccccctttcaatctaataatgtttctttgctgccaaatttctaaagcaaaacaaccactatacaataacacaataagtctattgatatttggaaagacgataaagagcgacaagaaaaaaggccagaaaaccagacagctttcgcaacactgcactctttgaagagatgaaaacaactttccccagaagagaagaacttgcatcagtat

SEQ ID NO: 394081 - DNA, 1268 bp, Cannabis indica
acattatgtgtggtttgctatgaatctctaatccaaatcataattaggtggctatatctggtggaagcaattaccatcactgtccccatcgatttcttttattattattcaaagagagctatatattataggccattatgggccatgaaatatgaaagtgtgtgcatattaatttaaggttgtaataataagttttattttgatatatacatatagctaatcccaaatgaaaaaataatgccttttcgaaccatattattaagctaagttagggtattgggcactagtaatgtttattaatttctacatgtgttactttatgattggttggtgatgtctcgtaaaaattattacattaaattatataagaaattaaatactaattaattaagcattcctacgagacactaaagtatctagtacttctagctatgacatgatatcttataattggttagcggttctctataatatttatttaattaaaataagtaacactcgatattaaattgcaccaataacaattatttctaagagtgtcatttaacatttctctacttaactacaccaatataataatattgatataaaagggtgttaagcatttctcatgaatttattatatatgctgacaaaatatttgatttttttctgatgtttaaaatgatcatcatatataatggacaattttcttttattaaaattattaggaatattatatatatatatatacttatatatataatgaggctactaaataaataactataaatattaattttagaaatattatacaattaaattttaatacaataataaaaagaaaatttaagtttatatatttaatttagctacttaattaaaaaaaaaattattttttacacttcaaaagagttttttgatattttctcgaaatttatatagcaacccatatataataactaaccgaataatttaaatcgcaattaaaatttacaaagtaatctacacttataaattattggaacaacctaagtactgtataaaatatataataataatagtaataataataataataataataatatatttatcaaagaaaaggagtgaaagaatgcgactgatgatgacgattgtgtgaatatgcatggctatatatcacgtatgaaatataatgacctacaaagtaatttgggttggaaaagttgacttagtcaactattttgttttgtggatgaaaaattagtgggttttatcccacattttgttttgaagtaattgttggc

SEQ ID NO: 394082 - DNA, 720 bp, Cannabis indica
tcacaaataatagtggaagaagggatatgggtaaaaaaatagaaataattattaattatgtattaaattgtaaaacttttaggatttctttttctataataaatatgacataaaagtataataattattactaatcataaattaaatcaaaaaactgatggaattcctcttctccctatatataatatatatactatatatattatatatagtagtaaaaaaattttaatgaacaaaaaaataaataaggaaggaaaaacagttgaaatgataatttaaaattattatattataataatactactaacaacaaatgaaaagataatattaatgtgtatttaataatagaaaatgcgcacatttattactaatgcttacagatttattgcagactaatcagtttgtatataataatagaaaatgtgtatataattccttatgatactattaaataacaaacgaaaagacattttcacatataataataaaaaatgtgtagatttattactaatgcttacaaatttagttatgaatttaagttttttttttctcaggattataaatctaaatttaatgtgtgctaattgaaatatttattcttttacccattaaaagagctaaaatggtaattaaaaattatcatattataataatgacaataacaaatgaaaagtaaccatatttagcaataattaggtcggttattcttttttatgtttt

SEQ ID NO: 394083 - DNA, 512 bp, Cannabis indica
tttttttttttgttttttattgagcaaagtgtgttttcgtaattaaaaattttagcttagaaaattataaataaaacataaaaataaaatatttttaaatttccccgattgtcaatagttccttcaatatcctttgaaaatttgaagaataaagagcaaatattttatcaaatgtaaataaacgtaaaatcatttccaatgtatattttgggttaaatttagtctaaaatataccacagtgttatttggcttaatttttgtatttatactccaataaatattaatttaattacctaacttgccaagcgagagtattgttataggaaattgaaatagtttcctgctttcctctctcttaggtcttatcatctttctatgagtacatccacatatatctattctatataaatgtggtctatataacagaattcttggtttataaaaaattattgagtaatttttttttttaaataaaaaaataacaaattattagatgttgccacgtaaagggt

SEQ ID NO: 394084 - DNA, 686 bp, Cannabis indica
tagttagttgttattaatgttttagctaattaataaaagaatagtatgtatgatatgaggtatcatgtaaagaaaataagtagtagtataattaaaggcttgaataacgtggcaaataaggagagataagctctcattagttaagctagaaatagtcaagtgcatggctagatgttgggacagttcaaattttaaattatatatatataaaaaaaatactaggagttggttgcatatgtgaagtacttggaaatgttggctgtataaagggaagaagttaaggggtttagttgttgcggattcaaatattaaccatagttagagttggattagtggtgtagttaaggtagatgtggcttagttaattctaagaggctaaaaataggactcactttttcacatttcactcacactttgataaccaaacctctcatcatcactctaattctctcgtgaactttgagctttcatcacaatataatttttctcttattctctcatacctgaaagcctattacattaaatttcaattaatatagctctctttaaattacaactcttatcatcccattttcttccatccctggtgttctgttatctctagataaaaccatcaccatacgccacaatcaaatttctcttataaccatcacaatcatcctctcataaacatatatatatatata

SEQ ID NO: 394085 - DNA, 565 bp, Cannabis indica
ggcataaatcccaacaataaatacttgtgaagacgacaaactcaccctaattctcccttagcaacaaacccagaaagttgctccatatacacgttttttctcaagatctccatggagaaaaatatttttaaatatcaagctgaggaaaaggccaatgattagtagctgccataaaaatgaacagtcgaacagaagtcagttgggcaataggagaaaaagcatcacaatagtccactccataggtttgatcataactcttggcaacaagacatgcctttaagcaagaaattgttccattgggattagctttaaccgtaaacactcattttgatccctataacccattttcctgaaggtaaattaatcaagtcccaagtaccattcacaactaaagtactcatctcttctaccattgttgcaagccaactagaattgagacatgacttcgcgaatagttttaagaattgaaaaaccgtgtttttgcaaatgtcaattatatataagaaaatataaacagtatgcgtctgtagaagcagaaagtaattctgctacagcaaaacagaac

SEQ ID NO: 394086 - DNA, 1608 bp, Cannabis indica
ttgatctccctctttcaaccaaattttaaccacgaaaatttatcaagtgtatattttcaaagacaataaggaaagaaaaaagattctcaagctaaattaaaaagtccaatagaagtacaagtggtaggctgcccatgtctccctagcgctccccatcacctccccgcccacccctcacgctccctgctcacccctcacgatcctcactccccctcccctccccgcacctccacacctccccgcgcccctacacctccgcgcccctatctcccctcctccccctcttctctcttttcctccacttcaatctcccaaggaaaaatacatctaatgccttccaccaaaggcgagtgagaacgaatgtaaagcgggacacttagtttgttgagtgtcttatttataattggcccaaattagaacttaattttttttataacaaattagaagatattcttaaatagagtattcttatatagaagttctactgaatcttgtaagattttgagaaattcagaaaaatttaacacgctgaaaacatagctcaaactgcctgttgcataattgactcttctattttatacatgtgtgagatagactatttgaaccttattttctatattataaattattctaaatttttaaaattttgcatgatatcttaaataaatataacgtacaaaactataagaaaaaattagtctaaatttttctcctaaatgttgagacatatagggatgcatcgatgcatccctttccttttaagagagttgttgaagcaccatatttactatataataagaatggaattgacaagtcgttcttgtcttttatgtctttttaataatatttgtgctatttttttagtaaatgatttttggtacttgatatgtgaaagtaacatattgacgtggtacctaataattggttagcaaatattttttgtgtactttttttttatatataattttttatgaataatctttgtaactatttttttaatgattttttatactattattgttatatagtatttttaaggtgcttaataccatactgatgtgatacccaattgttattcgtgtttttcgaaaagaggacacgtgtaattctaatactttactttagctaatacaagctcaaatgtaggcccattcaagatgatggaccaaatccattattgaaatcatgccatccggaagctggatagacaccaaatatttttacgtagtttgatagttaaaatctacatactctacgagttaatattatttttgagttttggttgtgtttacaatttggcagagtttctatcaatcaaaaacggcctccttttttccctttgagtcaactcctatttataagaataagatgattggtttttttttttttaaaaaaaataaaagaataagatggtggttactcaaccttatcttagtgaaaagttacaattgatggtggtaaatgcccatgttatacctgaaatttggatattcatcaaaagctgcacacatgtcctacaaaaggaatatgaatcaactcaaaaaatataataattaaattgcattgttaaatgcgattaaatataactcattttaattaattataagt

SEQ ID NO: 394087 - DNA, 1073 bp, Cannabis indica
aaaaataactaaaataaaataaagatatagtaaaaaatccatattataatataaaacaattcataaatataaagacttgaaatacttatctgtcaaaactgaaaggtcgttgatgtagaagccaagagcacaaaatagggtagttttgtggtacagtcaatgggtcaaaactcatttgaacacttggaataatagagctttttctaaaactagaaaggaagtgcttcttaaagctattgttcaagatctaccttcctatgttatgtcatgttttaggattttagttgctatttgttctttttttttctttttgaatggaaaatgcaaattttattaaccatcaatctcacctatcaagcaaggtagcaaattagttggaacatcctcccatcagaagcgacaaccaaagtatacataaaatctcgagtaaaattatgagccactatattatttgatcgcttaataaaaaaatagaaatatttctcaaagcaataagtaaaaacttacaatcattaataacctcaccaaagaaagagatcatcgtaacagaactcttcaaagcttgaatcacagtcagacaatcggtttctagtaccacattttgccatgaatatttcttatccaattgagcgccctaagaaccccatagcttcagctagttatggagtaacagaaacattgtaagagttggtacaactgtcaatctgaaagcctctctcatcacaggctactatcccaattccatatttcctcccatcctcaaagaaagcagtgtcaacattgaccttaaattcaatatttgttctaagattgtgttgattttatagtactacattaggtacacgacggaataaaagtttttgattatcatcgtaccatatcttctggatcactatatgtatatgtattatatctaaaaaaaaaagaataaacaaaaaagataatttactttttgaagtctatcagggtatcctcgagtcttttcgtatgttgtatcattagttgatctcgaaatactcacacggtagtcttccagatctttcaccacatacaaggactagtgtgggctagta

SEQ ID NO: 394088 - DNA, 749 bp, Cannabis indica
gggagaaaatttttagtattgctgtgttacggtgggcatttttaagggctaataattatatgtatgttgttttagagatgtatcatgtgcgtgcatttttaatggcagtacgaagcttcgaactggtttgttttggctgttttcttgtttttttgggtcaattttagagtgaaacataaggatcaactcagcttcgaactggtttgttttggttgttcttttgttcttccgcttgttttcaagctctgcatgcggttccttaagtttcaacttctcatcgtgagcgtttatttatatttaagttaggatttttgagtcgtagcctctgtttctttaaatttgagctcatcagtatttaattatttttctccacattttgtttgtgcttatacatatgaattgatgaattattgaagagcttaaaaattcattaagcatgtttttgtattataattttgacatttgctatttatttctagttatgcctctttgaaaaatttaaaatcaactcctttttctaatggaaactgatcaattggaacgacatatttattattattatctaattactgtgatacttataattgtattgcaatattctttgtctgcttgtgtaatgtgtaattatcgtaatttttggaactttgttttgacagccattttgtacaccttttgctgaatatgaatcatcgtattgttttttttaattttttgtagtagttcagcagcttgttgttggaaattatttt

SEQ ID NO: 394089 - DNA, 1502 bp, Cannabis indica
ataattgtattgcatgtgatggtatataatgtgaagctctagccttggcccctacgacaactagaaaataaatacattattaatgtgacacaatattataattaatcaaattataatattgtatataagcctaaactacttattatctatatatatttttaaaaaataaaactatatatcaatggtgatatatcatgacgtattgtatcatggttctatatgtgttatatatagctaattatataataatatatagtaccatgtaggtgatcaccatttgatcgtataattcttaattatattttagacgtaattaaaatttttactctaaattttaatatgtaataaattatactctctaaacttttgaggctcattcaaaattttcatttaattattgaaattattagatttaagttcaatttaataatagaaatctaataagaatagaacttggtagatattaaaatttggaagcacaattttatacatgataatcgttatattaataaaattgaatgaaattagatatacatctttgaatccaacaatctcaataatttgagcgaaatttttaactgtcttaaaagtttagggacatgatgatttagtacatgtaaaaatttaagaggtaaaaattttaattattttttttgccaattagtgtctaagattctgaaataaatttttaaaatgttttcagaactctttatttttaaaagaattaattatgttacataattcacaaaataatcgtcttgattgagcatcaaatgttttaatgcaacaatacaagttttgggaatttcatgaactacacttaactattttctcttcccatttgaaaatcatattctttgagttactatatgatttttttcatatgattaatttgttaattatatttgtaattgagaaaagaccaaccaataattcattttacaaacgtttatttttcaaaagaatattcattatatataataataaggtggacggttctaaatgatttgtaattatattaataataaaaaaatatattaagtaattcgtcatgttttttttaatattaattatagtttagttagctgaaaatttgattgtcttatattgatcaatctatatatacaaaccttaggatgcaagtataatgcattctctattttggtatttgagagaagtttttagtctaatatttttatgggcatttacgacgtagtcaggataaacattgagttgaaatggaccataggtaaaaaaaatttttgggcccatactataaagaaaaatagtgtttaaaaattattaaaaaaatatgtatattttttaaagggaaatttacatttacaaacgtaaattgtattttattattaataataacgtagcaatctcattcaatactttttgtaccgtaattaatattattgtaccgttttttaattgataaactgacaactactttttttgtcttttgtcttttcttttttatttgaaggtaggtttta

SEQ ID NO: 394090 - DNA, 512 bp, Cannabis indica
ctctacggacgatccatcttatgattcttattccattggaaaagtaggacgcccctacctgtattgtccatttccttctactttgtaggaactcctcttaaaatgtggcttcaatctgattctctccagtccgaatagtagttaaagcttgaaaagaattaacaatggcaaggtagaccagtggttctttggcttaaaccctccaccctttagtaactggttggatttctcctagagcaggcttggtttgttctagtttcatgcacctctggtttttcgctttcattttgaccactcattcttgtttcctcccttctttcctacgacaatcattagtagcatgcccaactcctttgcaattgccacaaatggttggtttccactcataattaagaaacttcaacaggtatattacaactaatttatctcaaaataatggtaacctgaaattcttgatgaattgagacttcaataaggactctcaagaattaagtttgcctctctctctctct

SEQ ID NO: 394091 - DNA, 1247 bp, Cannabis indica
gtgtaatgagtgcacctatggcgacggttaatccctaataatcgacgccatagagttaatcaaaaaccctcaaaattatccaatccccaaccgacgacataggctataattaaattctataatgtcaattttaaactggcgagtattttcacaccctttagtcttcacttttaataaaacgggttgaaaaaataatatctaaaggctcatattgtagtagtgtgagtttgtgagagatgatgcggtcgtgaatgacgagttaaatctgaatcttaattagtttttcttaagtaattatattttttttgctagaaaattaattaggttctctgaagaagaagagcatgagtggggttggggattaacaataggattttgttcttattttcttagataatattttttaaaaaatttaataaaagaaaaagaaaataaaaataatattatagtttttacgttttatatataatttctaattatttaaattttttaataatatttattaacaaatattattttaacacggggtaattgtggtagtaattattagattatttaacagactaataaaaatagtgaccttgagcactattgtggtcaattttctaaattgaaaattaatttgcaacaaccctaaattatcggtaaaataatttactttacgtacgtacgcgtgcaaatgtatcaaattttactacagacctgatcgataagaacataatcaaattaatattatcctaagtgagacaattttattatgtatatatgacaaagtgttattaaaccaacaacatcgatatttttactcaataggacaaaggagagtttttattgttaagtaataatatcatcttaaaggttgggaaggtaaaaaatgataaaaagaacagcatatatatcctatgtagaacttattattcctatgtgtttagaccctaacaaggccaaaataataggtagaaaattaagagagtgattatcggttgtcaaattcgctttggacattctgtattttgtaataagggaaaatgggtcatctaagttatcccaagttttcttctttctagattgatatatatttattaatagagataagaaacgtgattgactaaacaaaatatgtatatctttatatattaaaagtgcctacggtatttcttggtttaacagaatatacttaaaaaataaaagaatattctgttaaatttaacgattacgtttgatctcccgttaataaataaacccaa

SEQ ID NO: 394092 - DNA, 1351 bp, Cannabis indica
gaaagagcttatggaagctctcattgctaatgaaaaagagagtaaggatgagttgaatgaagtaaggaggctcttcattaatgtaagatttttgttatgactttattccataaatctaaaacatgcaaatgcagatgtttgtattttggtcacattagctaattttgttgttaaatgtttaaaatatatacccatttaatactttaattaattgacttgtagcacttcaaaaatgcctcaacttcttcttgtccttttggtgttaagagaatgggagaattagattctgaaccattccttgaagcaatgaaatgtagcaaggacaatcactatgaagctatgcagaaatgcacattatggagcaaacatattagagatccacactggcaccctttcaaatttgtcaaaatcagaggcaaactcacggtacatttatacataaatatatatatatggattgagttcttggattattgtttaggaataagggtaaaatgaagcattttcacttgttgttttggtaactctatagtcccttttaactgtttgattcaggaagttgttgatggggaagataagaagttgaaaggactgaaaaaggaattgggtgagaaagcttatgaggctgttaaaactgcattaattgagatgaatgagtacaacccaagtggtcgttttccagttcatgagctatggaatttggaagaagatcgaaaagcaactttgaaggatgttgttgagtacatgctcgatggttggactcctaacaaacgccttaggtaggtaatgtaaatctaaagtctatacctttaattttctttcttgctacacagtattctcttaaatctacatatattttggttttttcttggttaaaatgcaggagaagaaagtgaagttgatcatcaacaatgttgtgattttgtaagataaagatctttgttggaaaagcaatgtacttgctcttttgatgtgtgcatatgcataagtttcttttatgttttttatgcttttgctttgtaatcgtagtaacctcttatcttaccagatgtatagactggttttatattttgctttgtgaagtaatgatatggactttgacttgactatttaagtttatttttgtaagttcaatgaacaagtttgcttatctataatcatttagtatttttgttgggtttgtgaatgattgttacaatattttttaagtctaaatacgatttagaccttctgttttacaaaagttaccaattggaccatgtgttttgttaaatgacaaaatgaaccctgtattttttaaaatagtacaaatgggatcctgaattgattttttgtcaaaataaagtttaat

SEQ ID NO: 394093 - DNA, 941 bp, Cannabis indica
agttagaatgacataattgtaataacattagaatattataactaaatatcaagtaaaaacaaaccttactcaaaatttgacattttttatcacatcaaaaaaagagtgcaaaagagagtaggatagagagtctccttagcactttcaaaacttaaaagcaagactaattaagatttttgtctctcaaactaggacatataccaaataatgtctctgaacttttaaggttattgaaaattttccctgaactatatattgagattgttaaatataaaaaattttgtccaatcttagtaaataaagtctaacaacatgatttaatacataaataatcaccgaattagtaaaattgaatgaaattggacaaaatctttaaatcccacaacctcaatagttaaggagaatttttaacaaccaaaaaagttcaaaaaatataatttggtacatattaaagtttaagggtaaaaattctaattagtttaaaatcaaaattctcacaaaaaaaaaattaaattaaaagcaaatttatagatgctcttaacaaaagttaaaatgatgactcatataatataatattgaacatttaaaatttgttttggcaaccattttttttttattattaatcctgtttttgttagaatgaattattagttcaatttcaataatataaagctctatagtgttctaaattaaatgcgacactttattgtataagctagacataattaaagatggtcaagttttagagatgcaggaattaaaattttctttaattaaacgcaatcaaaacatgaaattaactaaaatagataaatcatgttacttgacagctgaacactctatacattcgactaggctttagttgttaaatttgtcaaatactatatatatatatatagggacacgattttgtcccgtgatatactttcacagaatgtatt

SEQ ID NO: 394094 - DNA, 1222 bp, Cannabis indica
gtgtggaaagataatagaatataagaggagtgtgctactcctccatagttaattgattttgagatggaaccccattcaccttatcccaaattctaacatgatcataaatctctttatcctgctctcattaccaataagaactgccacaaaacctttaggaatgtctttcgtgcttgagaaaggcctctgaatgagttgcttggcatgaactaagttagcaaaagtgagaagaatattttagagaactttcaaggagggcttgatagttgggatggtagtgatttcattcatatgtgtaactagtctccattaataaatactatatagaatgtgtagaatagatacgtctattgacattaaaatgaatggttaagaaaattagctcaaacttcaaaggggtcaagtgaggcattgtcctttgtggaattacatggttttgtccatgaaaggtctattttatccgtttgctacttgattgattcttagattaatatcttaagtattaaaacacaaagtaaatcaaagaacactaaatttataagatttgtttgccctaaaaacacattctaggtgactagtgcttgagtttccttgaaccagagtaagataactttcactatgaaatcaacgatgtaatatccagtattgattacaacacattacatgtaagcagaaatgaatccatacaaaatttaccctaacacttgattccaaatcgagtttcaagatctaagtccctttagatttccaaagtcaagatccttttgcttcttcttagctgaaatcccttcagataatgtagttcatatcatcccttcttcagttcctgaagatccaatgatcaagcacctgcaacacaaaagaacaagaaaaaggttttcccaagcagagcaagaatcacaagaaaaatctatcaaagatgaagagagttaattagaatctattagaaacaagattatatatgtacaactcttttaaaccgatattgacagctcatcagccagctaatgacagttgtccaagatttttttccaaataatgctgacctaaaataaaaactcagaaaatataaacccagatgaatctaccaattggtcagatgattcacccacataattgttgaaattattttaccaggatcttagatctactcataagtatgtttattaacactctaaatatgaactttctaaaacgatagaataaacacgtataaagttta

SEQ ID NO: 394095 - DNA, 742 bp, Cannabis indica
ccacaaactaaattttatatgtaatttgtgtgcacttatccttcatctttttatttgtgtgcacttatcattcaacttaattaaaaataaaaaaaaaattacaaaaaaaaaaaattaaaaaaagaatgaatatatctttcaaaaatctataaataaaaaaataattacatgttgtaatttaatcaaattaaaatatttcaattattttctttattatgtaaacaaaataaattaatttttatttcttttctgatcattttagtaaacaacataaaaatactattttcgattattttatattttaaactagttaacaactcgcactttgcgacggatatttaagaaatttttaattgtgtatatttaatgataacgaattaaaaaaattatatcaaattttaatcttaataatataagaaattattatactaacattttacttctaattcttttttatttaggtgaaagataaaataatataaaaatattaataatttattagtatagttatgaatattattattttatttgataaaagtatttgatattaaaaggtcttgtatagttatttggacatttttattttgtaaattttgatattataataaaattaagttacatatttttcaaattgaaatatcaatattcgttaatactaaattcttttcttaattagagaaaattatactgtatacttactttttattttctattttaatttttatctttattttattatttt

SEQ ID NO: 394096 - DNA, 1095 bp, Cannabis indica
gttaaggataaaattaatgtccttattttccttaagttgtttttttttttaattattattattatttcattttatttgtgtatatgggaaaaaagtaaattaaaaaaaaaatcttatgagagtttatgatgtaggcaaaaagaaatccaaagagaatttatgagagtgaaattttgaaagtacaataatgaattaaaattaaaggaaagagggtgggaccacaccacgataatagtgcttcactacattctcttctgaaagtggggtccatccacgtcaccatatgatgacacgtggcaagcaagcatgtgtgttgattgatctattatatttttttaatatttaatatttgttagttttatacttgggcagtgggattgtcgtcgtatgagtagacttgtagttgaaattgtagatttgaaagttatcttttcaatttgaagttttaagtttttgccaattttgatttttggggctaaatttacttgaacgtgatgctacgaaggatagatatagataaatttttagtatttttttaatcaatacttagtattagaatacgaaaaaaaaatgttataacataacattttttatattattattatcataaagtaaaaaaatttgtttatttaatatatattaaataataatataatattattttaataatttttagagatattttagattattttagaacaaaaaatcctaaaaataatgtgaaaaaaagataaaataaaataatatattttaagtgatataaaaattttttaccattaaagatattctaatatacaaaattcttaataaatgatatagaaaagccataataattctaaataatttatcgtacaaaaaataaattaataaattaaaatattatgaattttggtgtaagatattgtaaattatttgaaaaaaaatttaaattcataaacttaatattgtaactataataaatattgtcataaaaaatatatttctacatgtaaaattaacaataaccctcttaaaaaatatatataaatcatattcaaactaattatatattttatatctatgaaataatcatgacttcattaaaaaaaaaaaaaa

SEQ ID NO: 394097 - DNA, 1073 bp, Cannabis indica
gactttgatatctaacaaatcacgtctatcgaattttgacaagtatcaaattatgcctcatcaatttttatccatgttagacattccttactaaaattagacaaaaatccttaaatccaacaatcttaatagtttattagagatttttaacaaccttaaaagtttatgaaatatgatttagaacatgtcaaaactcaaagagtattaattttatatataataactaacgattcacttaattaaataacaaatgattcacttatgtacaagtaaattacggtaatgacatcaaatttaaatgtagtaactagtgattaataagagtgaaattgtgaattacggacatcaaatttaaatataatagtgtctacaaatgatctacgatgataattacttattttaaaaatatttcttttgcgtgtttttttttatataaataattgtatgaaatttttttagaactttctatataatgttatcatatataaaataaacatttttttaaaaaaaattttaaaaaaaattatacataaaaatatattttaatttatttaatataattttattgtttaattaatatttatataaaatttaaagtttttacaaacaacctcagctgaatggtggcctagtatttactagttttaatatatgattcaaacaacaaccatatatgttagtcattatttgatggtaaaccataattatatacattgactatattattcaaattatattattaagtttccatagtattacatttaggactcttacattacagatttgatattaaaatggaataattagcagtaatactatttaaattatacattctattatatttaatcttaaaaattaattttttagggccaaattcctcaagcttcaattttgttttgcttataattgtaaatattcgtttacacatttacaattaattaggtattatactacaaaaaataactatctttactgataattttctagtcaaaatataattttttgtgactaaatgtaatttgtagtcacgacaaaaaattacttgcaactaaaacataacatttagatacaag

SEQ ID NO: 394098 - DNA, 1322 bp, Cannabis indica
acttgttattattaaacaatcaaagtctataggtgaaggaataacctccaatcaagaacaagtctcatccacccctaaagcaaacttagcaaggccataagctgcttcatttgcagaacgtacgttagggaaaaagaataaaagactaattacatcaactattaaatctgaaaaaagaggaatttggattgaagggagcagtcaaagcatttgtcaccatgagggcatcagtctcgacttgtgtaaccggtaactgttgttgaatagcccaattgagactgtggaagagtgttttggcttccatttcatgaaatttaaaattaccagcaattggcattgacatagccgccacaacgtgtccattagaatctcgaataacagcccccacacctgttgtattcattgaaggattgacagctacatcaacgttcaacttaaagtcgcctggagttggaggggaccacgattgagactgagtttgtgcacgttgctggtgcgaagctgctggtgcagaagttgaagttgtcgtcgcctgtggttgctgatgtggcgatgctgatgtagaagcagttgaagcatggtgttgttgagctgctcgataattctgaagccaaacagaggcaaaggtggccaaattctgggctgatagtgcagttgaaccatgcactaccttatttctctctgtccagatggcccacatagtacaaaaaatttgttccatctcaaacttagtgtatgtggttgaaagatgcagcaagtaatcaccacttcgcatcgaggtacaagcatgccaattgaacgaaaagttctgagatcgccaaacagccttggcatatttacaactgaagagtgcatgccccgttgattcccaagcttgtctacagatcgagcaagtcgaatcggttatgatcttcctcctaacaagtgaagtagctactggtaatgcgtcatggagaactcgccaagcaaagattttgacattctacagtatgtgtagggaccaaaagaatttccaccatgacttgaatttacaacaactatatgtatatgatttcctcaattttaaaatactagtaatgaattatacttacaaaattaaaaaaacaatatatgtgaaaaataatatttttattatatatattataaataattatattgtatattaagtaatatatgataaataactatattattatgataattaatacaaaaaaaataaattattttactaatgttctttcattgttgatcaagtttatacttaaaatatatgcatgcaaatagtttctattcctcaatacaaatagttatgaaaataattt

SEQ ID NO: 394099 - DNA, 867 bp, Cannabis indica
tttttttttatagtatttgatataaaatatctttgtttgatagatatattttttaagaatataaattgaaaaaaaataactaatataattaaatatgtattttatgtaaaataaaaattattaaaatttagtatatttataaatttttagagtacaaataaaattaatgtaagttaatcgtttatatattatattagtaccagattctctcagaatttcacaataaaactctaaggtgtcgtttggttggaaagaatgaaaatataagaataggaatgagaatgggaatggaattgaataaaatttaaaatatatacaaaaaattaataaaaaaattattaaattttttcaaatcttgcattggaatggtctttctttctatttcaaaatggaatagtcattctatcaaaattgtggaaaggccattccattggaatgatatttcatggtttaaaatgcaactaaataaaggaataggatgaaaattattttctttccattctattctatttcattacctccaaccaaacgccgcctaaattcatagatgagattagtaccagagtaagtaaattatttagttgcttgcactcttcattttttatttattattttttatcttttgaaaaataaaaaataaatttatattaaaaataaaatgtgatttgtgatagtatattttttatgtacatcatatcatatgctcaatcacaaagcttgggtaagtacaactaccaataataaaagttgaacaaaacatgaccaataaattattatctattttccaaaatcatattctataaaactgtttttacttttcaattttttaattaagaatctaaactttaaaaacaaaaataaaatcac

SEQ ID NO: 394100 - DNA, 545 bp, Cannabis indica
tatatataattaaaaaatttaattaaaaagtattatgtggagaccatgatagtcaacttttggagttaagcactattaaaataatttttgtaagaaatatattaaatcttatgtaaatgaaagaaaaaacaaaaaaaaaaattatttcaaaatgatatgtgtattttaaaaactataaatatggttaacaatcctattgaagacactcttaacaatcgctcacatccactatggctcacatattctttgcctttaattattatgatgtataattttattttatatttttgaaaagggattatatatatatatatatcatgtataattcactattatatttataaataattaactatacttaattaattgattaattggttgactatgatcactcaccaacacctggtgctttctctatagttgtatccaacaagtttttgcgatgggtatacctatcctaactattgcattaatcactacttattaagtgttttaattatttcggttacataaataataaattataattgtatatatatatatat

SEQ ID NO: 394101 - DNA, 588 bp, Cannabis indica
aaaagatagtattttgtaaaaaaattcgcgtcacaataaaattataaacttttaaccaaaatccatgtaaaaatcccaaaaataatatacaaattattttaagagaactcatccatatattttctctatttttattttttattcattcgttcatgtggcttgattataacctaataaaatgtaatgttaaaatagcagctaaatcgattactatccaaaaactttataataaagttatcatcaataattaataatgaattaaaaatttaacaaaatgtaaattgtattcattgtcttttattactattatttgtgatttgtttatgcttaataattatatcataatataataatagtttgtcattagaattaagctcaaaaggcatactttaatatttgtatatatatatatatatatatatatatgaataattatgttctatttttgggccataatcattttgaattagaaagtaaataaagtataaaattaggtttatcaaaaaatcttaaaattctacactcacgtaaaactattaggaattttttctataatagactaaaaatggaacaaatttacatttatga

SEQ ID NO: 394102 - DNA, 990 bp, Cannabis indica
catatagagtttcttatcaaattatggccaattatagggtcgtcaataatcacagccaaagcaaaacaagcaataattctaattattccctaaataattttttgacccttgactaatgtcaacttaaaactccaacatatatagctttatatacttatcaacaataataattagaacagacaaacatactaaacttgatcttctcaataaaacatttgagatgttcataatattttatatgattaaagtctaagatagttaaatgcaatgtcctatattgtctcataatattagaactcttaaaatagccttagatgtaaatccttattcaatcacaacattcatgagctattcaaaataagacgatataatccattgaatctcattatcttgagagttgctgcgatagacttcttatattgtttcttcagaaaacacctaacacagttgtgaatgtataattatgtttgtgattatattactacatacaagattttaatatctctcccacttggaccaatataatcaacaaacactatattaatctccattatccaataggcagccaaataaatcatgcataatatcacatcgataggatacacatattacacataaattggcctgaaagacattcaaatttaataacaaccattaaaccaaatgcatgtaacacaactattaatgctatatattagtcttgttttgtatttgtcactttgagaaataatgcacacaagaagtgacgacatgtttatatcaatcattttaggtattctccactttgaaactttctaaaatataaagatgttggaacttcttatgaaattatgtaaaaataaaaaagtgaagtgtgtgaataggagtcccacatgggatagaaatacttaatttgaagtgtataacgagtgcaagtttgagatatgggtttgggccccaaggggtacccagttttgtgcgcatgggtgaggactcacacactggaccacc

SEQ ID NO: 394103 - DNA, 927 bp, Cannabis indica
ttattgcagatatccctatttaataacattatattactattttttaaaaaataattcacttatgtggcttagtatagttgcagtatctatttaactaatttaggctacaatatgaatttaagtttattaacatttaatatattaacattagcttatatatacacattatttttaaaataatttatcgttagaatgttatttatgcacgttattttatgtctaaaatcttaatattgcatcaaattagcttaacattaattaatactacatcaataaattaatttaaaaaataaaacaaaatacataaccgatcaatttgtaattaagtttttttttttttaaagaggggggacgaggcgaaaggattagtatattataattataaatttttatataactatgtacattattatataattaatagacctagctctcaccaaaatttgtaaaataataatttattaatacatcgaaaaaaaaatataaaaaaatatttagaaagcatgcctatttttctagtacaataagttgtttttgatatcctattttcgattaaaataaaattattcatatatagttttttaaaaattattagtaaattttttactatatataatatacattaatattatatatataatttcttttaactagtgttataacttatctaagtaccagaaatatactaccctacaaaaatatttcccctaataattttataaataacatcaattattttccatgatatatattttctgataaaggaaaaagatatttttgtcgttgcatatagatatattctataagaacttttatagcaaagttccatagctattggtatatatgtatttttgatacatgtgcatgtgatcgagttcatttatatacatatataatatacacatatacatatatatatatgtagaa

SEQ ID NO: 394104 - DNA, 603 bp, Cannabis indica
aattaatacaaaaaaaaaaaaaaaaaaaatcaaaatataaaagaaactataaaagttgggataagatcacgcgaagcacggctttattccttagttagtaatataaaagaagtatattttaactgtagttttatgcgcgcagccaatctatctcctaaaggtctttatttatttttataaattttggcttgtttttaatgtttggtctccatagtattagctacaaaaataatcttatatataatgatgtttgattatataattacactactaaaaaaaattatttccaacccttttaaacaatgagataaatttttgagtaggaattgatgcctatgccaccaacgcaaaattggatggaatagcatgtaacgtccttgcttcaagtctttattgggtctttacactcatgaaataatgactcttatacacgagtacgccattctggttgcttcctggattgacgacttgaccctacaaatcaacacgagtgtttctagtatgctttgtcctcactcacactctttctgggaaaacttcccagtaggtcacccatcttaaaattaccccaagtcaagcacacttaactgtggaattctttcg

SEQ ID NO: 394105 - DNA, 1292 bp, Cannabis indica
taagtgcatggttatgatctctgtgtaggtatttgtattgggctctgcactattctttcaaacatgcatcttctgaacgatttaaaaacttttatatataatatacttcttcattgtaattctcaaactgagtataaaatttgtgcactatgagaactgcaatgtattttggaacaagctatattgatgacagcaataatttcttttttgttacttaaattgttttactacccctttgatttactaataataaatacttgatctaatcattttggggcatatgattaaatatttgtactttaattgtatgagatgtgtttattgttcttacctctgtgtttccctttattcatgttaaatagattatgattctttgcaatgtgagctgtgttgtgattgatcgattaatttattatatctagagactataaattgtgactaattgatattatagttggtcagattgtagcagtgtcaatgttgtatttaagatattattttcataggtaaatattggtataaatattcaaaattttaagtttgtaagtgatataaatctaatgacataaatacttaatgttttacaaattgtaatttttttcaaattttgtgagtacatgttatttaccatattttcatcaacaacaaaatttgttatctgttaagcctagctagtaatagtatccacaaccatttagcccatatttaatttggtgtaaccgtaattataatatgtacttggaaaaactttttctcattggtgattactatgttttcttagagaaatattactgttaagtaagctccatcactaagaagtgcattgccaatctttaacaatttttcagaattcattcaatgcttaatcatatgctatttgatgtaaactttggttttatgacatactcatttattaactaatagacatgatgactatacatcctgatcctatttgtggtctatctttttttttttcagcaaaataaccagtttgagtgaactgttcaatttaacatgattttgctcccttgaatttgtcttcaaatgctcacttatcaatggaaaaattataaatcttttgcctcacaagcttttttagtaaaataatcttcaaggacaacaattgttcagaagaatagataacaatttgagagagcgaaaatttctatcaataaacgatcatgttaggatttataaaacaattaagaaatatataaatcatagatctattgctaaattaaagaagaagatgataaaagataagtagaagcactaacctgaagccattgttg

SEQ ID NO: 394106 - DNA, 659 bp, Cannabis indica
gtaatataattaaactagtaaatgtctgccacaaattattactatattaaatatgttaaaaggtttggacacagaacattgataaataatataaagacaaataagttcatagtcatcagcagcagtgcatcaaactagtcaacgcaaacacatgaagtacaaatgaacaaagtggcataccattaatcttccaagtggccaaatctttcacaggatttgttaaccagacccaccaccaccacgcttgggatggtcaggcggagaaggctttgggatatatgggattacaggagtcccatgctggattggcccatgttttatagaagtctttgagcttggaactggatcaattgggtggtaatcttgcagatctatagtgggctcatcttcagtttcctttgcctttggtttataactagtttcctggagacaacatttttataaacaatctaggtatacaagtacctagctaatacaatcaaaagtgagttttataccttgagctttctgctttttattggtatcacagttgagccatcaccatggtggtaccccatactatctgaaatgtacattttgtgttaggtccaattaggccatcaacacattacaactatttaaaactgcgaaaggaaagtctgcaagctcccaagggactt

SEQ ID NO: 394107 - DNA, 1108 bp, Cannabis indica
tgataataatgttattttgttaaataatcaaatttacaatattacattttttgttttacaatttccaaagttagaaaataatcaaattaaaaagtaaaattaaatttaaaatgtaaggaacattacataaatatgataattaaaagtaattaaattaaaaaaatatgtttaatttttaatttgtacaatgatcactataaaaaatcttattttagtcacaataaaatttgtagattaaaagttaaaaaaaattgtaactaagtataaaacataattctttgtgactaaaaagtgtgtagctaaaggtattagtcacacaattataatttattgtgattaaaatatgttttagttataatacgacttgttgtgattaaaactaaatcaaagataatttgtatctaaatattatgttttagtgacaagtaactttttgttgtgattaaaagtcacatttagtcacaaaaaattatattatgactaaaaaattatcagtaaaatattttttttttgtaatagatattatttcattgtattgtaaataaaattgtaagtgtaaatatcttaatagtaatttcatatagaataattttaccatcaatatttttctttattataaatctaaaaatatgtcaaataaaataataaagaatgatgtgatagaatcacattttaatatgaaattaatcaaataacttcaactttgaaaataattataaaatttcaaatatgtaaattataatatattattgataaacattgtgaatttaaaaattactgtgtcacacaaaaatatagttgttttaataattagcattccatcaatatttaatttagaaattttgtattttaaaattactaatttattatttaatcaatttcttaattaaatgtgaattaataaaattggtgataaaatagtctgtagctacaggattaactctgtaatttcagaataaatcagaaaataaacattgcagaaacgtaaaacatacaaagtttttgtacgtggtttcaaaaatctttacaaattgttattagtccacgaagacacgcccagagataaaatttattagatagatctcaaaaatacaaagtaattgactta

SEQ ID NO: 394108 - DNA, 919 bp, Cannabis indica
cttcattctcctcacagtgatcttaatggtcttatgcaatcttaaagctatggccaattctcccacatttgaagcacatgaatggcaattcgtcatacttgaatgcaatccataatttctttaccagaatacggtagtggaaaacccggacaaactggtttcgtaatagacatccatacttggaatcgaaagaacccatctgccaccattcttgaaacatttgaattctggacttggataaccgcccctgctttgtttgccattcgcactgtgttgttctttgtcaagagatcaatcggcacccccattgccttgccccaaatcgggaagttggtcagatcattggcccaagattcattcgaattttctattttccccaaaattaacagcccgttagataaataccatggcattttagttaatatttttttttgaatcgattcagaggcaaaagtaaaggttaggaacagacctgtatcgaatttatctttaattttgatgttccattccgtctcctttaatctccatatgcctcccaggactctctttaggaagcctctactgtgttcagcattggtgcataatcgccctctgagattgaactttgcaatcatgatagaaagactcttgtctatttcccaatcatcttcatcagttacttgaagattgttggttttcttcagcagttcatccatggtggaggtgggaacaccaatccctgaagcagggaaccctttgaaatcgagggaggagcaaggctcaagctcgcttcaaaccctagcagagcccgcgaaatcaaatgtgtatattttgattaccgatttttatttatcaattttattaattgacttattctatttatttgtatatatattttttaaaatatgataacatgtatatttttttttttacgtttttt

SEQ ID NO: 394109 - DNA, 678 bp, Cannabis indica
tatatatatatgcatgtcacaatcacaatagtgtatattgagaaagagagattaattaaattaatatgtgtaataacccaactaatctcaactaatccataccttactcctactttcttctatgatatacataaaataaatatttatatatattatatatagtacacttggtagctcacattaatggttatactacttcttttctttcccagaagccatatttataaatgtaattatgattatgatgcttgtttagttgtataaaagcatgcaattccttgcttacaaaagaagcagattctcctctaatgaatattatatatatttataggattaaaaggccttgttgttgtcattgtgaaatgtgataactgacataaagaagagaccaaattaatacttaaaaatacttttgattgatttcatctaaaccaattataattcttattaattaataagtgatacaaaataaaaaaaaaaataatgtggtgcaaattttttctttactctttcaatcatttaagatcaatttcgggaatcatatgtcagtaatgagggtcttataccttaaccaactttaattggatcatcggtaccacctcaagggtttacacagatagcactactcccagcaagcttagcctttaattcctctaatataaagggattgaagtgagt

SEQ ID NO: 394110 - DNA, 817 bp, Cannabis indica
taattttagtatttctaatttagtcactaaataaattagaaatatatcttaaagtatactatacaattaacacataatattttaatactcaatgacccataattactaaaataatcattttatttgagtcaaattttatataacacaatacacacaaatacataagagtccacattagaaatttttatccaacactctcaaggccaaccacaattgtatctctattcctagaaagagagtactccaaaatctcttacgagataaatgataacataatacttgattacctcaaacttaaacttaaagagtgaacacaaaagagttttcattgtctttaatatctgctttggttatattttctttctttcttttaattggtgctcaacatactttgagcaaccaaatgctttgtttttattttagacgagatgttgaaatttttgtattaaaaaatagactagtagttgaacagttcccttccttacatgggtttaaagtataaattcttgttaattgggggccctcttataattacatgtaacaatgtcaacaataatggtctttaaattgaataatttgaatgtagcataatccaaagatagacaatataaattataaagaaaatttcggtataaatacctaatatttcagattttatacatttaaatactttatttttatttttaaagataaaaatacctaatgttacaattctcttacaccgttactaccacttccattaactcatatatatgaacacgtaaagagttcagattagggatgcatatttcccccacggggatggggccccgcgggg

SEQ ID NO: 394111 - DNA, 1753 bp, Cannabis indica
taagttcataatcttacactaaattttggtactatttttatttttatctagtcaaatgactaactatcctcttaatttttctctatataatatatatataattcactattagtgattagtattaatttttttttctttttgaaaggaagtgcttaaacataactttcaacttaatcttgagttcgaaatacaatttttttttttttggggataaatatagaacattctagaaatgacttcttatatagatatatcaaaatgacatatacacacctaacaaaacatctatcattgtctttaattgttaatctctcacacactcaacttaattagagccccataatttaaaataattacaaacatatatttcccaagaaaattaaaagtaaaagttatctttactttctgcaatagcaattagtcacaaagatttctaagcatttctaataaaacacttcttaaatagtgatataatgttatattatagtattttttaagaaatttgttttttaatgatgtgttaaatgatgtatcaaatttagcatatgttaaagttgtgttaaatttggtacaacaacaaatgtaaagttttaaccacgtgttgtatagtgcactggtaggaatggctttattactatattttcttgcttagatcaaaagttcgaatcccactacaactatttatgagaagaattgtgtttagcccttttggaaactaacttgttgtggcaggatcatacttaatgggatgagagccctcaaagtacatatcgatgatttaatgaagagagaattgaggtataaagctcttataaacggcaaggaagccccggaaataaacaaaccaaccgaaaaaaatgaaaaaaagagatctacaccacgtatttttttttttaaaaaaaattaattacaattttatcattaattgttagtataagttttaatatacacattttcggttacaatattatcattaattatgatttaaatatataatttactaaccatcatcatattttcatttttttatattatatttgtttatattatatttgttttgtgtattgggataaattatgcaaaatataatatttgttaaattcttatgtaaaatttaagacaaaaactaattttgtggagcaaactatttagtatataaatgattattgttattgagtattagtggtgcctagcatttttttagaagtatcactttacaattagttagtgtagggatttgaaatactaattttgccctacaccaacaatttataatatcagttttaccaaggtcaagaccgaccttttatttcttttcatttcaaagagtcaacgagtaaaaacgacttcgcatcccctaaaacaacaccctattacctaaatcactctagaaacacaaatcaaacagatgaacaaaactagatttagatcgatctgaaaaccaaacacataaacaatacaataaaaaagtaaactagaggaatagaaaacaccaatttttttcccgagattcacctaaaaaactcaggctacatcctcattgagctgctccttggatgatagctcgattccaccattaatcaacaaatcatcattataaggtggagattccaagtcacagtaatgtttgattggtaatctctagttttttattgcaagtttttcactagttattttctctcttttaatttcttagtttaacttgctatctctttcttgtgcatgtgcttctctctctctctcactctatctc

SEQ ID NO: 394112 - DNA, 1124 bp, Cannabis indica
agagagagagagagggagagaaatagggaaaggaaatatacgcctttttagtagggtggccttatttgagaagacaagacagagacgataatatgagtaaagtgatgtctgccgacgttagtccaaaaacgtcgccgttttactcgatcagtacaaaacgacgccgtacctttcctgcttcgttcgccttctgaaaatcatgtagacatatatatatatatacgaaaaagaataatataaaattatttagcatgacatgctggtcttttcaagcctcaagtttgaaaaagaatatatttatacaatgtgtggtgtttaaataaataaatgtccttccaattttgaaatgtactaaacatttaaattatgcttcttaaattttaaagatcgttaaaaatatttattagattattaagattattaaatttaaagagttttgtctaattttagaattttagtaagaaatagataaaagttaagagaatataatttgacacatgtaatagtttgaggtatatgatttggtagatattaaaatcagaacatgatttagtacattgacaatcaccaaattagtaaaattgaatgaaattaaacaacagtccttaaatccaacaatcttaatagtttaaggaaaatttttaacgcttaaaaaattcaaggagtatgatttggtatatgtaaaaatttatagggcaaaaattctaattagcctaaataaatatttaagatacttggtttaaaaaactgtttccgtatatttttatctgtttgtgaatttgttcttcaatttaactttttagaactatatgtatattttaaaaaaaatttaaattgtttatattgctaaaaataaattcaaacaattaattagtatgcttagagtaattcgtgtcataaatacctaagtttaatttccaactgtaaataaatacttaagtttaatttttggcggtaataatacctaagttatatttttggaactctgtaggtacctaatcgttaaatattatgtcattatccacgtgttattttcttattggtatatataaattaatttttttaaaaaaataaaaatttaatgacttggaccaatcaagaattgtcacgtgacaatttattta

SEQ ID NO: 394113 - DNA, 1041 bp, Cannabis indica
agtgctcgtgcaaggtctaggttgtttaggtttaaatgtgcacgtaggattagggtcgtgttgcatgtcatttcttggtcgtaattgctaaccgaccttattgcagaataactctcagattgataactctcaaaattacttgatcaccttgatagtggggacacgtaccttccccatctcgcgtttgtctttcacatgcacgggttctaatctattttctctgcccatgagtcctcgatctcgacctgttaggatctgtacttgaccctatttcctaaggttttttttgtacttgcctttgtcttccaaacaaatttgacacatgtcccctacttaagtaggtatacgcattttctttttcattttggtttggcctttacgagtgtctcggtggttgacttgaccaaggctgatttcctatagccttcacctcatgctgagtgaattcttgatccttaggtcgtgtttgtctggcatccgcgttcatgtgagatgactttgggttttaaggttgtacattcccacagtttgcatttccacgggaagtttctggatcgttgggtcgagtttctctgtttctagtgtttcttggatttagggggttctcttcatccactagatgtctctcatgttcccaagttgaccatcctgagtattcgtcggatttctaggattatttgctcttggggtatccccatgtcttctggtcctagagcctttgggtcttccctgaggtcatctagctgttgtctcgagttactttggaggggcatcactgcgtccagaccttgcaaccaccgcctcatgctctaattcagcatttctttgatttgactcagccactcgctgtcgaagttgcctattttctagttccactaatggaacatatcttatgggatcgtaggcatcctcacttcgtctttctgggatttcatcctcaatttgctcaaattctccaccatttcctctccaaaagcaaggagtctcaattttgcttgtcctgtgagaatttttatgtcttccctggacgctgagttgttt

SEQ ID NO: 394114 - DNA, 960 bp, Cannabis indica
tatgcaaccaaaattgatttttttttttcattctattctatttcattatctctaatcaaatacaaacttattatgtagtccccatatattttaattaaattaataataataaaaaatcactaattaattacataaaatataatattaaaatatcttaaaacaccaaattaacaatacttatttatatataagaaagatgctttcaaagttaattaataacgtaattattatgtacatgtcgtcttaatttatccattaaattaatatatattgcttttcaaacttgactctagctatatctatacatctataaataatatattaattaataatgtcttttaaatttaataacttaattaattatcgtactaattaaaggtcatgatgtgtagctatatataaagacacactgagtttcccaaatacaagttcaaaatatatcaaacaatggcatattttaatcactacaaaaactctcttcaactcagtttagggtttcttcttcttcttgctcttttaattcgtttatcggtttctgaaaatatcggtaaagttgtaataccaactcaatatgcttctatgcatctcaatagaacaagttttccacctggtttcatctttggaacagcttcatcttcttatcaggtatacatttattacataattatataaaatgttttaattaagtataattattaaatttaattatccataattaatttattatgttattttttgttggttaattacagtatgaaggggctgccaaagaagatggtagaggaccaagtatttgggatactttcacttacaaatatccaggttttttttattattatttttcttaattataaatttatatatttatttttctcaagaattattattagtactcttgtgatttctctctctgtgttaaattaaatatgagtcagtatattaattaattaatttaatttg

SEQ ID NO: 394115 - DNA, 520 bp, Cannabis indica
tttttttacttaaaataataaaacattaattctactgcaaaatgcaaattaatttaatgtcaaaaaaaagcctaagtaaataattggttggatctcaagtttttgtgactctgttgatttaacgaaggagctagtaaagaaaagtttggctatgagtgaggagggggtttctaactactctgcttctcaaagggatcctttcacaatcaatggatccactttgctggtagatgcagctgccattattatgtcaacaaatcatacagtattggctgtactaagcaaactattacgaggttagtattgtaaattaattttaaggttttatttcatatagtgaacaatagcaattcttaaagtttgagaattttgacaatttaattatactgcactaaggattagtactgaccaaaggattctaagtagaggagcatggattatgtgtgctccttgctcagtttgtacacgaattataactttgtaagtactaaccaaagtgtaggactttggttagtagggg

SEQ ID NO: 394116 - DNA, 804 bp, Cannabis indica
acacatggaataatatctaataattacctaaccgctcctcatttttatcctctagacggttattgttgacttaaaaagttacatctcatccaacatgatgagttctccttcgtgtccatttaaataggaaaaacgctaagtgttgaaaaataactcatctcgttatatcccttcattaatattagcaatgtgaggtgatcatcatcacactatatgtgtaacgcgaggcggttgaatatgctacttctattctgctcaggtgggaaaatatcctttttatttaactaaatttatcctgagacagatatatgtctcattaacatcaatttaatagttattattttgttgaatattttctatcaaacttatatataattgtgacaagttatttaattgtatttaatgatacaacattattattatattttttgagttgacttacattccttttgtaggacacgtgtcatcctctggtacataactgaatttcgggtttagcaattatagatatgcccttcaaaaattaagtattaatttgtttttaaaatatgtcgaaacagatataaaatttaccaaattaagcttttaagaacgtatactatatacataccatttaacaattaagtgttactttatttatatttaagatatgtatatattctatatatgcagtgacggacccagagtttttactttgtgggggcttatttatcattaaaaaatatttatacctatattataattactcttactagatttatttaattttgtggagactttttctactattttaatctataatta

SEQ ID NO: 394117 - DNA, 817 bp, Cannabis indica
ccttctttgatctacacttcttcgctcttcgaccgtttgttggttgctccgggtttgggctctttggattcatcaatatgagtcagtattgacaaagccagatgtcaagcccagctttgcccattcttgatagacgggtcaagttgctgatccatatggacccaatgagtgggcctttatcatgccccacttatttgctatctagaaacatgaataataattattattatataaaatatctctcatcgtagtatttaaaattttctcttgattaattaagtataaattaaaataattatactaaaaaccttgataaaaggagaaaatctaatttatttggttaaaatatagttaaaggttaagttatatatatataataattttatttttgaagttatcttagtatttaatgcatgtaagttataaaatatgatgaaatgtgtgcaacatgttaaaatataatttttcctaaaaaaaaatgaatgtaatgaaaaagacaaataagataaaacaagctctttttaattcttgtttggatgagtatttgggaggctaagtgcatgtttgacattataactaaaaattgttttttatttttaaaaataaaaaaattattttttaaaaaacaatttggcttgtttgtccttattttttaaagggattttttctattttaagctaaaattacttaaaataaacttttatagtactataatgaaaaataaacatttataggatttaatgtttactaaaatactatttttaaaatttcttatttacaaaaatacagtagagacaaagaaaaaaagaaaattgat

SEQ ID NO: 394118 - DNA, 755 bp, Cannabis indica
tagtctcgtgagtctgtaaggagaaaatgggaggtaagttgtgcaatctcacatcaacctgggaaaaggtcaagtgtgatgatttctgagactgtgtatgtatgggactacacagttgaagatgagcataaaatagattgatgagtactaccttttatcaataagatgcttctatttttggtagcccatcatattgaaagaaccccacagttaagcaagcttgcacctacatggggtaattttaggattggtactgacctcttggaacgtttttccagggagtgtgcgagtgagaataaagcacgctggaaacacttatgttggtttgtgaggtcagtcatcagtccatgaaacaaccaaagtgacgtaatgtgtataagagtcatcattctatgaggttaaagatctaacgaaggcttgaagcgagagtcgtcaaaagaaaaattcctaagaggtctcccattagctaatttctgcagataattttaaataattacaacttacatctacataaaaaaaaataaactaaaaaattctttaagtaccaaaatagatagatttatcgaaacatccttttaaaaaaagtgtactacaaatatccctatatatatcatgtagggaggcacttgcttccctatactatgagggcaattttctcactaatgataaaccatagaatttcaaattcacattaaataaaatgactctttgcatacaattttttttatttacttataaatatttattctacttac

SEQ ID NO: 394119 - DNA, 1139 bp, Cannabis indica
tttatttataattgaaaattaaagtaaatacttatagtgcaaattactagttaataattaatggtaaaaaaaaattaaaaaaacaaaagaaataataattggtcaaagatttttgtatattttattaaataaaaaaaattcaaatctattaccaaatatatttagtagtatttgatatgaaagttgaaaataatttgattaatataaatattaagtggggaaggtaaatattgataaatttataaattgtgtttagctgtatatgtgaataaataataaaatttataaaattaaaaaattaggatatgtcggaagtcactatataattataattaagtgttatttaagtgttatttgaagtaattattatgcttgatgagtctatttaatcaagtgattatacactaagtatgtgattagggataattaaaaaatttagagtaaataatttttaatatgtatggtaaactaaaatatcaagaatacaagttattcaaagtgttacttatggttacccattcttgttttggtagagcataattgatgattgcatgtgtcttcttttcaatttgaagagttttttttttaagttcatcaaatggtctgcaaataatgtagcattttgtttagtaaagaagtattgttattaggcactaatggtatccaacatttattataggtaacgccttacgattggtttgcgatatttcttaaaaggttctttttaaagttatatgagacttaatacttaattacaacaatagtagtatgacactgaagaatgtgttagacaccaataatacattttagtatttctcgaagggagagtatttttgtattgatgaatgattttattaattaataattttttttggtaaagttcatgaactaatttgtcaaaacttatataatttaagaacataccgtataaataagccttttgtttgttttttaaataaaacatgtaattttatagaaatcagctaaaaaaaatagcttataatctactcgtgacatatacaactaggattagaattaaaaaatctagcagcgtctaattccaaattatttgtcaaataaattaaaaaaaaattaaagaataactttaaaaacactattgaggttcatttatctttcct

SEQ ID NO: 394120 - DNA, 1655 bp, Cannabis indica
actttttgaaagcggctttttgctgagattagaaatcaaaagagagggtcttttgtagtggaaaaatatcgttatgggggaatgaaatttttgactccagggtagttggcgtgtggggaatgggaaaacattgcatttttttttgacaattggattccatcagtttttgcttttcgtttttgcgttctcttgtttggattgctggatctagcaaagttttggtattaagagatgcttcgggtggttggaataatgcattaatttgatccatttttttgcctcatgaagcggaagttatcctttctattccttggtcttcatttgatgtgtcagataagataatttacaattttgagaattcggtgtggtattctattaagaatggttattggcttagccttcaaaatatggttgctcctcgtgcttcaccgtctggtagtttttctggttggtggaaaaatatttggtctcttaatcttcttccaaaggttagactttttgcttggcaagcatcctatgattgtcttccaactaaaattaatctaactcgtcatggtctgttagctgatgggttatgtcctttgtgtggattggaagaagaaactattcatcatgctctttggggtgttcttcattgtcatattttgggaaactttgtgaatttgtgtaggggggatccacttgtttatgtggattttcttcatttcattcacaggtttgttgatatccttttaaaagatgtgattgaattggttatggtgattcagtagaggatttagttcagatgtaataaaatggtccataataacgttaaattgtctcctgtactcactatacattagacccacaattaccttggaacgtttcataacaaaaaagttttgacggtggctcccttaacttgccagttggcaatggatgtctctgttggcgggtcagtgccttggacaacccctcttcagatgatgcttaaattgaaacctcccccacttgctttctcaaagtcaatactgatgctgctattagatctttggaaaattgtagtggcttgggtatagtgattcgtgatcatttgggaagtgatatagcttcagctagttggcttttggatggttgttttgttcctgaagtggctgaagctttggctatccgcaacgcattgattcaatgcatctcctttaggtatagaaacattattattgagtcagactacttgaatattgtgcttaaacttaaaaataataattctattattacttctttgggtctagttttagatgatattttgagtttttataagaggcttgaagatgttatttttgtgtattgtaagagatcttgtaatggtgttgtccattctttggccaaacttgcttaaacaacaggaaaaagtgtaatttggtagccagcgaattctatttgtattcagaacttaataatagcggatgctatatttgaataaattctcaccccaccatagtagagtgcttgctgctcttgggatttggtagttaagaccttttcctaaaaaaatgttttgtaccaaaatttgtacacccctaatattattaaaagtacactccttatattaaaatttgtagtacattaagggctcatttggaacgttgtattaggtcgtattgtattatattgaa

SEQ ID NO: 394121 - DNA, 628 bp, Cannabis indica
aaaaaaaaaaaaaacgaaaagcattaggtaaacgcatttttgcacctaatttaagagatattttgttatttttttggcacgtgaataaattatgtataattatttttttttgtatgaccacaaaataatttgacttttagtcatcctaaaatttgtaacttaaaaaataataaaaaaaaattatgattaaaattatattattattttttgtgaaatagtattagttagaaattttataatttgttgtaaataaaattaaattagtgataattggtatttaaatttgtagttacttgtatgcagatttgaagtttcaaaattacaatcattctaattttttaaattatagtcctcatcacattttagttacgcatgattatatataaatattaaatatatgacatcatagcatagcatgcaataaaaatgtataatttaatacaatcatacatacctaatcccttaaatatttgtcaataaaactccccaaaatactccaaataattaaactccagatatacttatcacttccaacatggagctccaactaccctcttattatttcccaagggaaatttgattttctatacttagaaaatcaaaaaattttttccctaaaccaaaaatt

SEQ ID NO: 394122 - DNA, 1466 bp, Cannabis indica
ttaatttgttttttcattttaccttaatgaatacccgatggattccccataaccgatgggtattctcctaccccgaatccgttggttattagacggggatggggcggggatgggggtagaaataggtagcggggatgggggcggagattgcattctccatacattaaccgaccaatttccatctctaatccgcatctgtttaaaaattgaacagttttgctttaaataatattttgttaaatttttttggtaattataaaaattaaaattttatattaaagtttatctgaacaaaaaaataagtcattttctctctattcgctagggttttacctcttcctctcttagtttctcttagggtttttgatgcccctatgggtgccgccggccgaatatgggttggtggtgcccgagtactcgcatcttttcgttctcgtgcaaagtcgaaggtcccaacaaatggggttagtggttggatggtgtgtgttggtggctgggcgtctctggtgagatgtctatcgtccttggttgggggttgcagatggagttgaccttttgggtcgggagacaacgatggtggtgggcttttggccgcccactttctctcgttttcagggttggcatttttcaaagattttttttcatgcatgtgcttcggccgtagtggggtgttgctcttctttattttttcagttctcgaattacttccttgggttactattcagatgtccttgctttggtgcacaatggctgagctttcaaagttttatagatgtagaaaggggattggggtttactcgaaagggatgtgctctccttgtcctatcaccttcaccatttagaaccattataggaggccgagcgtggatgtttctcgtcgaaagatgacagtactttggtgcttgtggtctacttgtctcgggcttgcgttttgcctcttgtgcgttagggggatagttgttgaagttgttttatctttattgttttttttttttgtttattttgagttattttagtttgttagaattgtttcggtgttgtgcattttatgtccttataagtgggcctttttggggtgtttgtccctttatgctcttgtgtgagctttgagcttaatgctcctttcgaatcgctatggttgtccaacagttgttacgagattgcggtttatgacttgtagggttcttgtccttttatcaaccttcaataaagcttccatttcatgaaaaaaaaaatccctgaagttttatggtataatttttcatttcaaatcaagcttagaacaataatttgtaaatgtgatcgtattaggagcaacttctatctatgcaatgtttgtaattcacactttagcaaattcaaatctagagagataggtcgtaaaaaaaattagataataaaatttaaaataatattttaaactaaaatcttgagccaaataattggtttcgttctacctgtaccat

SEQ ID NO: 394123 - DNA, 722 bp, Cannabis indica
aaatattaaatatttattaatattgatcaatatctatatggaacgtaccttattgatgtattacttctggaccctacatctgaccgtcgaaatagaacagctgctggtgtagatgcgtatgtagaattcatcaaaggtcttagctccaaagctgaaataaaaggtgtgccatgtccagtatttacaagacacacaaatatataatctgaacttggaatatgaatgatctcttttgtggcagttgtggatgcattgtccaatttcacagaaccccatttgttagctccaaggtacagatcgaacccaggtgctaccatttttccatcatagtttccgtacaagaaccttgccctaattaaatacttgttccctttcccatctgctggctttagggtgtagcaatttctgtctccttgtgggaaacttcttagatttgaaaattgttgatcaagagtatcggaatggtattcaagttgaattgttttactttcgcctatgttgttttcaatgaaatcagagtctgacatgtatgttaagcttgttgttttgtctatgtaggttgaactttctggtattccacagtctatactgatgaaccctgaaatatacataagtcacaatagttatttatatataaaagtactctataagaaaaaggcctggggtacaatttgaatttattgatgttcactaatatcatgcataggcatatttatatatat

SEQ ID NO: 394124 - DNA, 1125 bp, Cannabis indica
cgttacattgtgctcttattattattattattattattattattattattattattgtgttttcaaattagattgctattgcaggggttagcatatatatatattgagtatttacttataacgcctatcacttacatagttctagactttaaataattccccaggcttttcggtattggtccaataaattgattgaatgaaagatccctaatacatgttcatgaattacaaataacattaattagtatgtgatttaatatgttcataagtaactcaccgaaaaagaaagaagggttataaattagaaaatacattaattaattaattgaatataatataaatatatgaatattgatttgtatgtaatcaagcatatactcacaaactagttactaaaaaaaaaaaaaaaagaatatactcacaaatagttgaggtatttcatagtttccaaagactttggaattcttccataaatttggttgtcatacaaatccctgtttatgtaatttaacaatatattcatttaatttgaaactgatttgaatatccgaaggaatacccaaactatttataaaatagaaatactaaaatgtacttcacgtatctaagtacaatttaaggggtaatatactaatattataattgaatgttaagtttaatataatttgatatatagttacttttaaaaatatagctatttaatttcaaatagacatcgctaaaatgtacttatgcactattaatatttaataataatactatatatagaattattacaggcgttcaagatgagtaagttctgacacttgttctgatagattgcccgtcaagcctttgccgctcaatacactgcacatgccatgtgaaatatcaaaaattacttattaatattcaaaaacaaattattttaaaaacataattttaataataataaattaaaaattacttataactaaagtatataatatttagatacaagttatcattaattttattttattcacaataagtattatcattaaaaatttatttaatcacaacaaattgtaattttataactaaacttttagtcacgaaccttttaatcataataagaataataatttataattaattacatttttt

SEQ ID NO: 394125 - DNA, 959 bp, Cannabis indica
tcctgttgctaaaaatctcaagctcaatactctttcggcctcctcgagtgatgatgaagaagaagatcccatggaagtgtcttttgaggaatttgatccagaaccgagactttttcatttgaaaaaataatttctgtagaagatgatgttgtctcttttgaaagtgaggaagaacttgttgatctagatcttgaaccgccattgcctaaatctgcagcaacaactcctcgatctgcttctacagttaaagctttagcaacagcaaaaggaaaacaaactatgaaggctttttctctagcaaccttttttcctctgaagctattaattcaagattttttttataatgacaatcaacgtgattgaaagttatatgctacccgtaaatttaaaaatgaaagaaattttgatttaaatgcttatcgagtttatgacattataaagtgtgttcaatatcaaaattggaaggacacattaactgaatttgaaggttatattaatggcatagttaaggaattttatgctaatttgactgatgagttgcttgataaaaaatatgagttctttagcaaagtctatgtttgcgaacgttgattttctttcactgaagatattgctgaagtcttgaaattgcctaaaggtgtaaagagtggcgatatgtccatggatcatgattgcattctcactgaaatcattggtgaacaagttgaatggcttgccggtcaaagtctgcattactcatcttacttatggccatgccttactaatgcggtttgctcttagtaattggttcccaaactctaacaagatgatggtgtctcaagatttggctctttctttttcgaatcactacagggacaactattgacttggcttctctcatcatggagcaaattatatccttccgtcgaggtaaaaaacgaaaccacaagcttatttttcctaatctaatctataaggtt

SEQ ID NO: 394126 - DNA, 721 bp, Cannabis indica
aaaaaaaaactaaaaaaaacactattgatacaaatgtaacatctaaaaacaagctcaacagaaaataaactaaagaatatccaaaataaatactgagaaagaccccttctcgtaaccccaatgttttgagctgccttcaattgttattgtgagatttttgggaatttttcttcaactttgatatgagatggttttcaactattcattattatttagagtccttgaagatggatgtaaatataattgaataaaaatttacttatgtttcaacgtaacataaataaatttacatgtgtttctcatgttaaattcatttatgtaagtctactattaaaaaatactatatttgctaataattactttcaacattcatacttggaattgatagaagtgattcgtaagatgatttttacgccattctatgtttttggaaagatttgtctgaaaaaaaaaatagataattaaaaatgtaaagaattgtgatgatgattatgaatttgagtttttatgttttattttatagttgtaagaataattatatcattgtcattcgttgggagatagttctttaagaaatattaatatgaagggacagttcttattatataggccctttttaaagagtttcctggtcaagtttattaactaataccaatttttgtttgggaaatttgaaattgcatgcttataatatcttaaattttttttcctaaattcataa

SEQ ID NO: 394127 - DNA, 681 bp, Cannabis indica
atttaaaaaattagttaatttatatataaaaattcaatttcattcaattttactaattcagtaattatttataaacgaaatcatgctctccaaacttttatatctatcaaatcatatccctcaaactttgacatgtaccaaatcatgtgcacttaactttcatccatgttagactctccttacaaaaattagataaaaatccttaaatccaacaatctgaagagttcatgaaaaaaatttagcaaccataaaaaaatgaaggacacgatctggtatatgtcaaatttcaggggtaagaattctaattatcaaaattgtattttatttttgaaattttaatatatactattattttaattatataatattaatatatatattttttaattatataatataaatatatatctccagtattaaaacttaaaaattaataaaatatgtttataataatgttattcaatgtataaatgtagagaagttttaaatgaatgagtctagggagtaatgaatttttagtatggtttctttaaatattttaaaagttctatattttagaacatcttatgtgagtgagtgtataagtcaagtccccaaattatttaatagcactttttaatttattctacttttgaatatttttaattttataaaaattataataaattaaattaatttttt

SEQ ID NO: 394128 - DNA, 777 bp, Cannabis indica
ataatcaagtctaactataattacctacgttattaatttgagctttgatccacacaaagtcaaatagtatcctacgtggcagtctcctttgaaataataataataataataataagatgagatcaaaatagttggacatgtaacatgtttgttgttcaaatttcgagatccaaaattatccatccactcataataataataataataataaatttgtgttaaaaacaaacaagagaatcagattttattttagacagctaatttggtcattaataattatatagcttccaacccaatcccatgcattctgtgtccacataaataataattgaaacccacctaagacaaccgttgccaccagaattaacagctgtctaaacctccaaaaaaaaaaaatcaaaataaatacaaaaataaactaattttatagttcactccatctatttttcacaatgtaatagaattttgcggaattttttttaaaatttaggttttgagtttttttagtatttgctcaattaatttcttatataggttactatgtaaattttaattgtaatttaaattactttgttaattattatgtgaatttccgtaaaaatataaaaataaaaaaaaatcttagaactttttagtttaatttttttatacttgtaaatttttaattttcaaatatttcattatacatgcgtaaatatttttttttgaatacatagcgacataagtacccaaagttttaagtttgtaagtgacataattctaatatttatttttagc

SEQ ID NO: 394129 - DNA, 761 bp, Cannabis indica
ttaaatggtcatatatataacatattaattaatgtcatgatttcatgcatgcaattaatactaccatataataaatttatatatatatatatatttatatgtaaatctgccttttctttttcttctgtacccactaatctgaccactccacttgtgttggtccccctcatgcaaagagattctttacaagatttattttatatatatataatacaataatataattttggattggtagatagtccatttaacttattcatgaaatattttcatagatttatgtagtttttattaaataaatatctaaggctgtaaatataggattgatatttttttttaaaaaaaaatataaatttaagtacaatatatgacctgaaaaacttgaatgcacgatttataaattcattcgtattaaaaagttaattataaatttaattcaattatttatatattaaattatataataataaaatttaaatattttaattctaatatattttttataaaaattgtcagcaaggctcaaatagaaaacccaatacttttggacctagtaaaactgggccaaaagataagagagtggctaaacaactcagcccaaaatagtaaaaaaagagataagttgaaaaatgtcttttttattaatcaattaactaaatttaccactaatttttatttaattgaaaaatacttctttttatatgtactgtacccaaaataccctaacatatagggagtcacatggagagtatcttgaagtg

SEQ ID NO: 394130 - DNA, 556 bp, Cannabis indica
tgaaattatgaatttgagaccttaaataagttacgtttactgagaaacataaatatttcagagattaatagctaagatagattggaatagctcgccattcacaactaggtttcgtcaatttagaggaaaggtctgcaagtggaatggacctgtgtgcattggccaatgtgcctataataccccgggaaacaggtggacttcccctgtttacaagcaattgagcaatgttcagaaaggttagttggattgggtgaaaaataagcacgtgatatacgattactgcaaagatactaaaaggttcaatggtaagatgccacaagaatgttcaaagcaacaattttaagtaaggtgtgacacatgataatgatttagtatgctgcctgaatgaagttttcactttctcatatgcatgaaaatgaaaagggaaaatggaaacaacacacagaaaatagaaacatcaagcatttaaatactttgcagaacctgcagtgctatgcaaagctttgataaagcattagcaatgaatgtgtttgtaacaccctaactaccttaggcg

SEQ ID NO: 394131 - DNA, 652 bp, Cannabis indica
cctatatgagccaatatactctttgcaaaaaaatatcgcctaacctttttgtaaatttccattgatatcctcaatttcttttcccatttattcatgttgtctattaacttttaacggttcaattttttgtctttatttatgtacattatacatgctaaatttcaacatccatgctttaaatgattaaaaagatcccattaataaaaaaaatactcaatatataaatagatgcttaaattttataaattataccagttttatccttctaacaataaacattagtaggagagtttattgaatcatatttaatatatatttttaggattatatttagattcaatctaattatatattaaatattaaattttactattcgatctgatctaattaatttaacttatctaatcgatccaacatccatccattatatattggattggatcagttctatctattggatacatttcatatatatgctcttaatggatattacctatgtatgattattttattattaacaattagatcaaatctaataattgatatttataatcattaattaaatattaaaaaattaatatttcctactttctcacttctttgtttgattttttttattctctctacattcttaaaataaatgaaactatta

SEQ ID NO: 394132 - DNA, 830 bp, Cannabis indica
gatatgactaatatatcatatcttgactggttctttatattatgagttagttattaattcatacttatgaattggtttatttttatttttaaatctaaccctaaaaaaattaacgagtccgacattaaatataacaattatattaaatcaactgattaatagaacttttattcaactatatatatacaattatttatttttgtatatatatatttaagtaatttttgtattgtttttaatgatgaagataaaatcagaaaacagtgggggtaatccaggtaagtggtatcgccacatttcaaagggaggatgggctttttcaactccagacaatagttggattgtctctgattgtactgctgaagctttggaggtctatatttatacatttatatatgcaattcatatagtttttgtgacatgcatgcatgcatttttattattatatatatatatatatgcatatacaggcagcaattttattatcagagatgccttgtgagattgtgggagaaggcatagaagaggatcatcttaaggatgctgttcatattcttttatctttacaagacaacaataatggaggctttgcatcctatgagctcataagatcatactcttggcttgaggtattcaaaattttatatatcctttatatatgatattgatggttcgagaataaatttgtattgattttgtttaaaataagtggatatgtagttaatagtttgatgatgttgacgttgatgattggtgggacaaggaagaattatgtagtgttttaattttatgtgtgtagcaagagaggagacaaggtagtaagttagtag

SEQ ID NO: 394133 - DNA, 609 bp, Cannabis indica
taattaaatttttttaatttttaagtatataaaatcaaatttttccttaatttatgtacggataaaaatatatttactatttaaattaaaattaatttttttatttgcgaggctcataggatgggagctttaggtacgagtttactctgcatatccttagatccggtcatgatgcttaagttgagaattttttttttattacacattaattaaatataaatgtaaaataattttaattgataaatatattttttataattaaaatactaaatacaatctcatataatttatgaaaattagagttactaacggatatgacttaaaaataggtataaattaagagtaataaaaaaatataaaaataaaaataaaaaataaaaatgagtatacaatctaattttttatgcaaaataatatgttttctttttttttttttacaaaacagatttcagttgctacaatgatatgactaatatatcatatctcgactggttctttatatccagataatgcgaaacgatgagttggttattaattcatacttatgggctggtctatttttgtttttaaatctaaccctaaaaaaaccaacgagtcacacactaagca

SEQ ID NO: 394134 - DNA, 714 bp, Cannabis indica
cccccccccccccccgcccctccctcttctctctcttaactatttatgtaaattaatctaaaaaaaattgagaaaaatagtatgtggatcacatctcaataaatgaataattgaatataaattttaaaataatgtaatcaaggaaataataattgagacacaatttaccttacacaacatgatgtattattaatttaatataatttaaataataatacgagcattactttaagaaaataacaaacaaaaaacaaaagtaaatgaattggtggaaaataaggacagattgggatgggataagatcaaaagaatgagtaagtgaggtgaggttggcctcaaagtcttgtctacaaggtcccacttttatgtttatcttatctttaacaaatattttaagcaaaagttttcattaaagatttatttttctttaatatttcttcaacaagatagacttgttttcattaatttaatcaccgcttggacttttagaatctataatttttcgtcctactctattatatgtttttacctttttcccaatttataaggaaaatttgaatttatatgcttaataaataataaaatttgaaccctaatacaatactaaacataatttgtaaagtgggatacattttcactaaaacccaattttacccctctcatttcaaaattctctctctctctcttcgttccctatcccttctctcaaaccga

SEQ ID NO: 394135 - DNA, 798 bp, Cannabis indica
atgtatattgtctaaaaaattatgacacaaatttatgtctgaatcggtaagaggagttaagaggtaataagagttttgggaaaaaaatataacaaatggagttaatagggttaaaattcattcccaaattaagtgcaaacgaattcacctaagtgtgggattagttggtggtttataactacttggacaccctcctctctttggcagttcttttcaggagtgagttctaccagttgtaacattttgtgattgttatgttgtctagtcttcgtttttgggcttcaccggagaatttgaggactgctcatatagctactcgtatttaatggtgtttacatctatatctcttatttttttttttgttttcgtaagcataatttatgttgttgtcaatcaataaaagttgggtgtgtaatgtcttttttagtttaatagaagtcttaactttgaagaaaataggagcgcatagtaagttattatgctcttgagatgttaccttgctcgcacctgtctttgtttcaaccaatggattacgggaaatatagagctaatgtgtttttacattgtacctcattagttgtatcagcatttctaattcttcttctgtctttgtagtgtcaatctttggttgaggcgttatcagcttcacactcgacagatctgcagcagcgggcatatgagatgcaagctgtcattggtttagatgctaattctgttaggagtatcttgccatccgatgcaagttgtgaagacattgaggtcatataattaattggaaattcttattgtatttatttt

SEQ ID NO: 394136 - DNA, 729 bp, Cannabis indica
ttaaagtcaactaaattcgatatgggagtggacaacagggtaaggagatagttcatgtctccttttgtgtatggaatgaatgatgaagagatcagaaaaggttatgggaagacttaaaagacttggcccatggaatcaaatatccttgggtcatgttgggagaccttaatgaagtattaagcatggatgaaagaattaggaaaagagtgaagcctcaccgattaaagcattttcaaaactgtatggaatattgcaagatggaagacattaaaaacacaagtaaattatttacttggaacaacaaacaagaggaagagagaagaatttattccaagattgataggatcatgggaaatcagttatggcttcagagatttagctcagcagaggtggtcttcttaccggaaggaaactttgatcacagtccaggaattctaatggtgcatcctgagattagaatggggaggactccattcaagtacttgttgggctttgtgccctaaataaaactctatttcaatgtaatctttttccattcaattatcaataaagaaacagaattattttcattacttatttagcatgtcatttggttcatgtgatcatttatatgtttatttgatttatcaattcatccaaatccttatcacattgatattcttgtttattatgctgtcaacacagtggaaagtaatcaagattatgtaattaaatgtattcctagattta

SEQ ID NO: 394137 - DNA, 1304 bp, Cannabis indica
tcagttacattttcttagctattgctttgtttatggaggaaaattctctttacttggctatgtatattttctgtcaaacttggtccctttgtactttgtctcttcaattatttggactttgttttgtatgtatgtagtttcctttttttgttacaagaaaaaccaaaagtattgtaagtgtattgacctgtcgtgggaatcaccaagtaaaataatcatgcgattcatgctagatagagtttaattttagatcaacaggattaagcaaaactaagaagctttttttttttttcttttaaaatagaacttcaagatattatcgaagatttgatgttattactttttttacaaaaaaaaaaaaaaaaaaggaaaattgaagctaaaaatatctcaactttttaccttgctttttcttccctttatcaagtgcctgccagttgtaaatttagggctaaataacttaaacattgtgtttatttatagttaatactaaaatgctaacaaaacaatttttgccactttttttttttaataaatgaagcaacctatagatagaaatgtcattagtaggagtgtaaatcgattgggttgactatgatccggtctcatttgtattatgtattgatctgttctgtcttagatttaacttgacttattcagatcgagtttgatcagattagtactttattttttttttgtctttttcttttaaagaattttatatccaagtttataatttttttttcacatctatttttttaggagctaataatgcatcataaaagacaaaagacaaattgttaattttgtgttcttaacacactcaaataatcatttcatccttgattgttgccacttttaatgaaattgtcattttattcacaaataagtcattgcaacaagttctcaatcttggcattatcaatttattttcttttgtttgccaaagtcaataaaaaggaaagagaatatcaattcttatcacactaaaaaaagtaattttgctttagaaaaaaaaaatactacatttaagagtgctaattacaacctccacacctgaaattacatacttgaatatttttttttttaattttttttattagaggtattcgttatagttacagcatcattcttgtaaattttttttaaaaaaatctaaatagtttacagtgctgaaaatagagtcatgatattctagtttatcatgcgtgttcaaaaaactttaaatgtattttcggcactgtaaactactcaaaaaatttcaaaaatttacagggatagtgttgtaagcataacgaacatcg

SEQ ID NO: 394138 - DNA, 1095 bp, Cannabis indica
gatcgggttagttcgggttgattggacgggttggtattattttcaacccgcccaatataaagattggacgggttacattttcgtcgagttattcggtttgcattattcgtcgggttatgtcgatttggtttgggcgagttatttggtttggacagtttacaaaaacttatatacatccctagtttcttcatattataagatgattatgatgaacactgagtaagtgttctagtggtaaatgttaaaaggtaccagtagtgtctagtatctttcaaagtattatattgctatttttataattaagtatcggatcccatataactaaatataataacttttacggaatattattaactaattgcaagactgatagttaatagcaatgctcaaaatgtttatcctaaagtcattttttaaaattttttaggaagtcttaaatataaagataatatctctcagcctaacctaaccacctcagaaagttttgagaaaaattcgtgggcaaagttagagtactcattgttacatctaaagagaggaatcacacatagtagtcctctctaatagaatattttatatatggataaaataaatctgattgattttatacatgtataagaattagttaatattttatttgatttacaaattaaatatttgataataataaatattctgaaatatataacctataaatattgttaaaatataagtatgtaagtatattctaaatattgttaaaatattctgataattagtgtgacacagatattgatgaagtatataacctataaatataaggtaccgctttctaagttcactactaattctctgaaaaacagtaaaatctatataagagagtaagagagagcttagaagtctgaatactcacattaattaactaagtttttttagatcccaaagcttgtgtgggattgaagctcaaaggaataatagttggaggtatttcgatctacttctgtatacacgtatatgttcaattttctgtattattctgcatttcaaatggatcatatatgacttcatctccttgaactctcaactttaactctcctctggcatcaatagtgcttt

SEQ ID NO: 394139 - DNA, 1052 bp, Cannabis indica
tgtctatctttctctgaaattttgtttggctaaaatagctcaatcctttatgttaccctcgatttgagctcttgaaacatcttgacaggatctggttttggtttgttccacaaccatttgtttctcatcctccatatgttgcaaacaagtctggcaataatagcatccattaccattttccttgaacttgctcacctttgtctcttccaatccatgtgattagattgaagagagagatatgaccatagttctaattaagccaagcttttaagtctctgtatgcaactcctagtagcagaacactcaaagaaaaggtgctatgcattttccttgttatcacagtacaataaacaggtctgatcatctattattcccatattgaataacctgtccctggttttcaatttccggtgcattactaaccacaacacaaagttgtgttttggtgagtccaatctgctccatacctgtttacaccagtgtatgtttgttcctgatggtttcagcaagtagtatccctgcgaactgagtaattttgctcctccattgcctcctcgaattggtctatgagcctaaccaaacacttccagtaccagctactttgacttgaaggtttttaggcccaccatactgcatcatgtaaatatacactattgacccatttcagccgtaatgtatcttctttatttgcaatcgcccacacatatttgcccatagcagctttattccatgcaaccacattcttaaaaccaataacactagctgatttagatgatttacattgagtagggacaaaattaccgttacacccttcaatgtattctatccttaaaacacttagctacatataaatgatatttcagtgaactaatataatcactaaaatgagtgctctatcatttatctctattaagccaagctcaaaggaaatcatcatttcacttctgtgtccgaatagaagctatagattttgtatttatgattacgctcccactcaattgaaataccatgtccttaatccatatgtcacgagaagatccattggtcgactt

SEQ ID NO: 394140 - DNA, 1677 bp, Cannabis indica
tgctatccttaaatgaattctcgcccccacctttttagagtacttgttgctcttggtgcttggtggttaagatttttgctcaaaaaaaaaaataatatattagaaccttactatctaagaatacacagaatatatattgtaaaacttttatttaaaaataaacttaaaaaaatcaaaatactaaaagtatgaatataataataattataataaacaatcaataatattatattataattataataaaattattttagagtaaatataatatttatacatctattataattttgtaataaatttatacatctattattattttaaagtaaataaatttgtaatatatatataaatattttattaagatataaataaaaagtttatttataactagtttatattgaaacttaaaaaattaagaccaattagacattattcttaaataagatattttttttttgtaaagattaaataagatattcttaagtcttaatatattacagtatgtaaatgatcatgcatatgcatgagagagatatgacatcaaagttgactcataacaatacaaaagggaaaaaaaacgtgcatttccacgcaatttaggcgtggttacttccgaatatgtttacccattgaccttattaattagtttcctaatcgttcttgccaaaaaaaaaaaattagtaaatattaagggtgaataatgcaatataatttaaccgaacaaatctaatacagtttaattacaaaaaattaaatattcaattataattaatgttaaaaattagattctaattgtattgaatcaattattgcaaaattaaattaaaaatcaattcaatctaattacatttatatattttaaaaatttatttatattaattcatataataaaaattaattgaaaaataaaaatacagattaattatatttttagtgatttttttgttaaatttgtaacactttattattgtatttatttattttcatgatgttttattatattttattataaggagtgctaccgtcaacctcctgttataacctcttagtcaacctctacgcttgaaaatatacgtcggaatattttttttttcacaggagtgttcattatgcttacaacatcatccttgttaatttttaaaaattttcgaatagtttacaatgccgaaaatacgtttgaagtttttttgaatgcgtgtggtaaactggaatatcaggaactctgtttcggtattgtaaactattcggaatttttcaaaaatttacaaggatgatactgtaactataacgaataccgctatgaaaaaatatttcagcatatgatttcggacgtggaggttgactaagaggttgtaattagcactcctcttttattattagtaatattgttgttttaattatttttaacgctaggtaaattagacttataagaattatatttttatagagtattaaatttaaggtgattctacaatgcaccatttacttgttttggcatctagaaaaaaaatttagtttaattttgtttcatattcatatacgttatagctatttaagatatcctacaaaattttgagaaattcggaataatttacaatatagaaaataatgttcaaacagtctattttacacgcgtataaattataaaatagtcacgcgtgcaacacactgctt

SEQ ID NO: 394141 - DNA, 985 bp, Cannabis indica
cttaaatatcataaaatgagttagattaccaaaaaaatatctatactaatttaattaataaactattttctaattaatttcttgtattttgttttaacttattttatttttaattaaaacaaagattactaaataaataaaaagtaacgaaattgtatctttaacaataaaaatacatactttttctcaaaactaaataaataaataaataaaaacacatactttaacattaaattaaaacgataattttaaaagttactaattgattaagtaaccaaaagtcaatcaataatataaaattttgttttgatttaaagttttgttgttttatctcttgataaaatatgaaagaaactaaagtgtagcttttgattacgataatcttcctttgtgaagatgacgttgcttttgattctcaaatagattttgaaagtaattgtaaatattaagaaaaaaaaacttcaaagtatattgaacaacaatgcaacataatgttacttaaatagaaaattttataatatagttgtttatggtgtttaacttttttttttttttatatgatgtttaactttaagatatcaattgtttaaaaaaaaattaagatatcaattagtttcattatttaggtgatattcttataatgacatgtaattagtagatatattaaattttgtttaaatttaataatttgtttctatttaattttttaacaaaattataaaagaaactaagaggttgattttaattatggttatattttttcggtaacaacaaaaaataaatacttcttgtatattaaaataatcatattgaaaaataaatcacagtagtattatttttaaactaaaatgatcaatggtgtgattggaaaagatttttaaaataatagagaggagagagaaagaatgaaaaattaattaaaaaaatggttgtggaattagagtgacaatgtcttaatttttcttttattttttttaaaagaaaa

SEQ ID NO: 394142 - DNA, 653 bp, Cannabis indica
catgtattcatattttatttttctatagcttttactttttctgtgtgaaattattactgtgagcctcaaatttgattatcgaaaatctatgtaaacagttggttatttgaaaataaatgacgccatatgctaataaacaaacacgtaactagatatgatatgacgtcggttattttcaaataatcgatgccatagaggggtttttatactctttaattttgatcctcaaactgcctttaaatggtatcaataaatgctatagttatgatttttattaaaaaactgcttctaaatgtcaattttgaaccaaaccagtatttttacagcctttaactacctcttttatataaaaaaaaagtataaaagaatagcctctaaatatttttttcgtaatagtgcttacttccaaaataccatgagattatgtcaatgatgttatgcccattgccaatgatttaatcatcaccttttaaagatatacattagtatttgtataaaaacatatatttttgtttttaatatataatattctatgatttaattttctgcatgcattcgatttaacattcagttgttggcaatgataaaaaagaaagggaaaaaaaatagaaaaatacaaaaaaggaaaaaaaattacaaaaatactttgggcc

SEQ ID NO: 394143 - DNA, 671 bp, Cannabis indica
tgaaagtaacttacaaattttaacgaaggttactttcaactaattatcactggtaggcacgttagtttatatatattgttcaatacgttttttttttttgggaggaaatggtttaaatttgtagctgaatacgaacccgccatttttgtttttcgaattgtctaaaattaccgaaataggaaatttatttttgattccctccaaatttccaatattcaaattaggcactataagtagcagtcgcattttattatggtcgctctgtcagggtaatttttattttcatggcggactgcgaacctccctcgttctctctgggctttgattttggtttcgaatcggagccccgtatacctgatcatcaggaacactccaatccccctcaaaaaccagctccagatcctcctgctattgagccaagtacgcctctcgatgacgacgaagacgaattcggacctgaagtcgcggactcggatatcgacacccgaccatacccgcctcgggttttcaaacggctcaggcgaggaaaaccccagttggccataatgccgctgccgctttgtggcgatggagaggaagatgtcgaggatttctcctcacaagaagatatcttacgaggtatatatctatacattcaatgcttgtacgtttagggtttgcttttttttttt

SEQ ID NO: 394144 - DNA, 1272 bp, Cannabis indica
aaaaaaaaaaaaaaagatgatcatattattgttattattacatttctcaattttaaaggataatattaataagtgaggcatattggcatgtgatgtcccattcacacgcaaacaatttcaaaagggtcttttggttgcgtgaaactattctcggaagaaattaataccatacaagtaccctaaaacaaaacaaatttatcttcttcaatcacaagtgtgaagtaagtaggtaatctcatagagaattttatgacaaagatatacgcagattattatgacgtaaaagttatcatcatggtctcttattgtcttaatcggttaattggaatatttagaagtaagcttttaatagaaaagggaagaaaaaaagtgggtgggtgccgttattgttaagcagagtatgtgacgattctgtgtttaatctttattatgcactttgttgttagtaagatgtaaaagtaaactaattagaaaagtaacgacaaatctattattaaaacaatatatatacataaaagcaaataaacaagcaatcacatacctataaaacaaaagtattcccattacccaccaccactttaaaaatttggtatggttgtaaatatttatgttatattatatgtaattatataatgaattttttttttaaatattacaatataaatttaaatttattatacttttttttttcatcttttatcttatatcaaagtatctattttaatattacaatttaaatttgaacaaattgcacttaaaaaatatcttcttgttttcgaatagagtacacgtgtaattctaagttgatttcagcttagctactataagcccaatcgcaggtccaacgaagataatagacttaatcaatcagcgaagtcaagccatcaagatattggacaactggtgtgtcaaaacaagatacacctccgacacaatgtatctccagatggcatcagacaaatcttctaaatgagggattaatgggcatctagactgttggattatcttttaccaggatctagatttactaacaagtatgtttttaacatcctaaataagaatttctaaaacaataaaaataaacacataaaaggtatgagaaaccttacattggttgcagcaaaattgaatgactccttccgctctgatctctaacccttgtatcctttttgtcctagagtatcaccaaaatctgagcccgaaattccttcagttgtttgtgaaattccgtatttttaatatttttcagtttaattatttaattaagtgatt

SEQ ID NO: 394145 - DNA, 790 bp, Cannabis indica
cttggtggttgtccttcgtcgatggtggataccgctcaaaatggggtttcttggtggttgtaccttcggtggtggatatggatttcgtcttcgaggatttaaagggagattaagagagtagacaagtgagggagatcatgggtgggtttcatagggattatcggcactgctggtgtgtgtgatagagaaaagagactgaacgcgagagatgtagcgagggtttgattttatattaattagttagctatacgcggcggtttaaaaccgtctggtatactataggcgactgtttaaaatcgtcgcctatagtatacctaactgttttaaaccatcaggtataaataactattaaaaatcacgataaactcataaaactgtcgtagattgccctcccgagtgttctaaaccgtttgaaatagccaattttttccgacggtttaaaatagtcacttaatattattagcgactgtcctcaaaaaatatcctttttggaatcgtcacaaattctaacttttgtagtagtggctcttgaatgcaaagaataaaaaagtatttttttttctctaagtgctcaaatttgcggatccttttcataggccatgggtgaccccttatataggcaaaaatgtcaatatttctctcttcaagagacacgaccaacgcggagctatctcaaccgtgtccttggtttttgaaggtggttgaagtttgatttttgtgataatatctcgctatttttgtgggtttgtaactgtccttgagcttcttgcaggatttgaatatttgaatt

SEQ ID NO: 394146 - DNA, 878 bp, Cannabis indica
ttgactccaacccttcctagttccttccgagttccgaccttaattattataagttaaagctaccaccaataattagccatttatagattttatttatggtatatttatagcataaataaatatatagtccgtaattccatatcctagctatatgtatatatgttaaagaaaatgaagcatatatttattcgaatatatattaggaaaaggaaaaggaaaagttcgaattaaattctagctaaattaaaaaggctgccatagaggccaatatataagggtgttataataagcaatctgtgatttttgaactctaaccaattcaaacttaatcatttgagatcaaactaaataaatctgatgtaaataatttgttaaattcagaccctttaaataaaattctctgattcaatcacaccgttttgaaactattgaatgcaattcaaattaaacaattccgtatattaatacttaatatatagttttttttttaagatgaaatattttgtggataattttattaatattactatgataataattttttattgttatttatgtattataaatttattaaaagtaaaaaaaaaaattattgaaaaaataaacaatcattataaaaagaatttagaacaacaaaatacaaatcatcatgacttttaatcaaactaatcattttgagtagattggtttgacttgattatttaatttatctagtttagttatgaatttttaaaaaactgtaatactaaaccaaagataccacgtatatggattgtggctggcttgtgtttaagctctaaatatcaatgtcaaaaaaactagaggtaactacgtttggatccagggccggccctaggcataggcgggctaggcccgtg

SEQ ID NO: 394147 - DNA, 815 bp, Cannabis indica
tatatatatatataaattttactcctttttcttttgtgaatcagtacacataaaaaagattgacgatatacaattagtcgttgatgattttttggtcgaaaattgtgagctgaatggctccatttatatagttaataattaaagacgaaaaggtctttcggcaaaggaacttaatatgtgtctttctctttctctttctctttctctctcaatgctattggtgtcttacaactcaaactcaactatattcatacacatgaattaataataatctcgaggtgtaaaaaacattacaaacctcaactgtcaataaagattatgtaaagataattcatgaatatatatatatatatatatgtttatactctcataactgtataagttccattaagttttcttttgtatgaatattcattatttatataataataaagaaaagaaaagttaagctctccttgttatgttttatatcacatgctaaaatatagggaataatgtatagatctgtaatgatatttttttgttttagatatgtgcgtaaatataatagataatatatatatatattgtataatatatgtatgaagagatgagagagagagagagagcagtcaaagatttttgtgtgtagcaatcattaaagtggtaagtatgtctttagccatatgaaaatgatattttaagaaaaggaagggttaagggaccaccaaatagagattggaaaagaattggtaaaaaggaaaagtgatagttgggatggatgagaattaatattggagtaaaaatactaaagaagtaccaaaaaagaaaagtag

SEQ ID NO: 394148 - DNA, 1320 bp, Cannabis indica
tacacagctgatacagtgtaatatcccgaaaaatatattgatattttaattggacatattttattaaatatgtgattatatgggtattagagtaggattataatcctacttaaactaattacgagttgattagcaaaatatgaattaatgaataataaagcgcaatttattaattacggagattgtattggaatatgtggttatcatagataccataatttgaataaaatattttcaggcttgacaattgtggaactcgacagaatggtcagaaatgtcacgatggttaaaattgtgttatattggaattataccggactaggttaaaatgttgagaagtaggtttgattgggaaagttagaaaatgaccaaaatacccctagaatgtgtttagtttaagtttagggggaaggcaaaatagtcattttaccatgtataattttagtttgtcttatgtgagttttcttaaccttttgtttgctgaattaaagataaaccttaggtttattctttgtttttttatttaagggtaggaaattcaaattaaaaccaaaagaatgaaagaaaaggatacatatattttctctctctctctctctctcgagaatcctagaaaccagctaaaaactaagtttttcttctttaatcaaccgattctagactgaattaaagccaactttaggtgctgcccaagcttggagataagtcttattccttccgtttgattttctaggtttatggttaagtttttattgggatttcttttgatttcggcttgtgtaattgttgaggttcggagtatgattctaaggttaaattaggtttgtttaattgtgaattggatgattttcatggttgttaaagttggaaatgaaagaattaatgtttaagaactcaagttcgctcaatcatggtgttttgtttactttgatgaatttctgggaattgattgattgtttataatgtttttatggtatggaactgttctggaaggtgtgagtagatttgttggtgaattggttgggttttgatgtggaaaatcaggatttcccaccctgctacaaaaattggttagccaattttacaggtgctatgaaatcgatcaaccagtttgcctataggggaaaccctagttttcggttcgaaaccaatttttcttgaggtgtttttcagagcttggattaggatattctagggatgtttaagctaatttttaaccagtggggagttagaatttgtccggttgtgaattagagattattttggggattggataagtgattaatcaagttacgttattcgtgacataggacccgggat

SEQ ID NO: 394149 - DNA, 605 bp, Cannabis indica
tttttagaaaacctaaaaaatgtgaaaaaacattcacgtaaaaatgtaaatattttaccaaaaaaaataattattccttaaaaaaaatgggaaaaatatgtcaaagacccaacttagaagcacaaaaagtgtacaatacatcatttcttatgtaagcctacgaagcacttagctcaagccttctagcactagaatgtggatgggccttgtgactagcccaactgagaaagtagcccatggttgagtctaaaaacagcccaattggcttcaagcttcacggcccatcagggccctatctgtttcgtgttgaaaaaagccaatacatggtttctgtaatacctaattgctttattaaaaaggaaaaaaggaaaaaaatacctaattgctttattaaaaggaaaaaacaacatgttttttatttcttatgttttataaacatgtttatcaattaaataaacataattgtataaaaagtatgtatctagtagtgtcacacatatatatttattatatgggataatttcaccaatgcacaaaaacaacaaaaaacggttttacggaattttaaatatttttacgattttttgattttatttacataaaat

SEQ ID NO: 394150 - DNA, 712 bp, Cannabis indica
tatatatcatgatttgttgtattactttagtattccttcaattgcaattgatatatattaattataaatagtagttaggggcaggagacattacattaataatgtacttgtgaaaattatgtttaacttagaatatttattattattaattaaaatcaactgcaggtttttgaaagcaattaaaatcaacaggttggctcttttaagttttaactttactataacttctcaccatttcaacttggtttatgttcgttttaattataagctaaggttgataatatacactttcctttcacaaggccattaattgatactcatttgagaagtttttttttatttgggtgttaatatttatggcttagatattgaagaaattattaataagatggagtggtggataaggaatattggtaataagaaaaggcaaatacaaagaaccaatcaattgttgaaaaatttctttaagagaaatgctataaggtacgagtagtgtgtagtactcttttacgtgttaatattgctattagtgtaattaagagtatctccaatagtaatattttttaaggatgctaaaaatttacatatcatctaaacatataatattttattttatctctcttttacattatttttggcaccttaattctaaaaacactcctatgtataacaatctttaaaaatgttataattataatctcacacattatta

SEQ ID NO: 394151 - DNA, 916 bp, Cannabis indica
ttttgaaataaggttatttagcttaataacccgactaattatgctacaagatttgcccgatttagcctacataaatcccaactaagctggaaagtccctatatgcacagatgtccacacagggacttgggaggaaatgttatcccaaatttttccaacctgacgtggcatgtccacgtggctagcaccaattccacatgggagtacagctcgccaataagaaggccaagtcatctactcaacacttcaaccaacgagaggtccgagtacttaggaggaacaattaaatgatgaactaaccacctcaagggggctggtcggccacccctggccgaccttatggccaacataggctagctagcttttgggcatcatatggccgaccaccatgcactctgtagctgcatggccagccaacctttggcctagtaggttttcgtgcgcagctttcatttgtggatagcaagtcaaaccacgaattgggccttaacaaccaattaaaatagagggagaatatcagaaacttccctatttttgaggggaaatttagtcatttgtactttattaatttattatgtaaataatagctttatgtacctatttttaggagatattagggatgtaagatctactatattaagggcattagtcaatccttaaattcataagtctcaaaccctaagccttaagctccaagtctgataactcatctcatctctctctcacacgcccattgctctactctcacttaagatttttcaactgtggttctcacattgtaatcttaagagagctactttggattcaattactatagtgatgtaagtggtataatctctggtatcaatacaactaaaatgggagtaggtcgttatgttaggttttatgccctaaataaactccatttcaatgtaatc

SEQ ID NO: 394152 - DNA, 1379 bp, Cannabis indica
cccaagggcctcgcttcgcactctgggaggatagaagcgcaaactcgcagaactgatctctgcgagagaagcttcctaaatgcagggcacgagagagatgtccgtcagctagagactctctccattctagaagatggaaccttctgctcccgcgaggaaaatggaccgttcactagaaggcatcagtctagggtacgctgttggcccgcataagttcagttcgcgcgtgccaggctacgggcctgctaaccgcgcctttttatgtacgatgtatgagattgtctcccacgccacgctactatatggaaaatatgtcacctacaaatcgaacggtgggggttcatccctatgaagatttattcgacgtggcccatttgatggagtcggcctataaatacccccgaagatgcacaaagtaggggacttctctttttcccttctttggcctttcaccttggaaccgaagactgaccctcgtaaaacacattactgtaaccccattaacaattccagaatattcctactaagctttcttttcttcatgaggagcttggtaaaaaggagaaaaagtccatccattttgtatttgtataaataatgattggctaaagagcctaataaaatggactcgtggactaaggagatttttcggtgcatgaaccatgaaaaactctcttgtttgttattatgctatttataccttcattactttcctaagctctaagattattcggttgccaaaaaacataatacgaacctttagataagagccccaatagttgactagaaccgatcttggtcaaagttactcgttgattgtaaattatcactatcaagtattaatcgtcattgcaagtatgtttccataatgacagggggcattttaggaagacacgtgtgatccgttattcatccttgatcatcctgacgtgacttttagtggagtcactatagttgactagaaccaatcttggtcaaagttactcgttggttgcaaatcatcactaccgagtatcaatcgtcgttgaaagtccatttccacaatgactagggacgttttaggctggcacatgtgatccgttattcatccccgatcatcccggcgagacaactagtggattcactatagttgactaaaatcgatcttggtcaaagttactcgttggttacaaataatcactatcgggtatcaatcatcgttgcaagtccgtttccataatgactaggggcattttaggatggcacgtgcgatccgttattcattcttgatcgtcccatcgtgactactagtggatgttgggatttatgccctaaataaaactcatttcaatgtaatcagatttacttattaatatagatcagaaataacatttaatgtt

SEQ ID NO: 394153 - DNA, 525 bp, Cannabis indica
tttaattggggtgaagcaggcaacactaattgcctgcattaatgatactctaacaataaacaaaatttctgtgactatggctatcaacacagagtcaaacatgaaaattgcatctcccaccatgagtaaggcaaatcataatttaaatctttgggctttcagttagctactaaaattttgagacaacatttattgttataaacttgaacaactctaatgcaataactcaaaaacataaaaatctgtctaaacttctggtattatattttcaatctctataattttttttaatccttatactaatttaccatggtgactggtgatattttaagtgtgctataggaggtgagaaggtctaacaagatttagaacttacataattatataaaaaatgtatgtgaatttcaaggataaatcccatttctaaaagaagtctaagacagttaagagtatatatgtctattgatgcacatctttcttacaagagcccaaatgtcaattcaaaaagatattatgccaaaaaaa

SEQ ID NO: 394154 - DNA, 674 bp, Cannabis indica
caattctggagattttattgaaccctaagtgtattatgtgtgatttatgtggaaatttattatttcgtgatcatttttgctcgataacgatggaaatgtgaaggtttggtcattagagtcacatgggtttgattttgaatcattttagcgtagacaattattaatgataatcagaatatcgggattaggcggagttatggtatttgacattttagccctaagcctaagattgcttaagctttaagtaagggcaaaatagaattttttacctaaagagttttatttaattggtggattatttagtggaatctgattattatgttaagaataaaagaataaacttaagtttatcctatttcattttaagttagaaaatcaaagtaaaagcaaatctttctctcgctcttccttttctccatttcagccctagaaagaaccagagaaaaccaagtagcttcttcatcttttttgggtgtttttcttcaaaaaattaaaggaaattggtgatgctaatctaaagtaaacctagtacttttatttttaagtttatttaggctttttagttgttgagcatgcaattttggaaactaggttctgttcgaaccattaaaggtgggaatagttattgttggaatttattttaccaggatcttagatctactcacaagtatgtt

SEQ ID NO: 394155 - DNA, 627 bp, Cannabis indica
tgtacctttttgcttatcttgctttcatcccacttatcttcaataaaaaaatctagtacattagtacattgtactagacaagttttaacaagtctcccaatgtacctacctacttcattttttcttgcttgaaatttctatgcttaaattaagactgatattacaagcaaatcttaaatctaaagttatgcttaattcatcaacttattaacatatatataacaaatttaacatgtctttgtcttatttaagcataattattgtgtcatgagttaaacctattaaacgtattaacctaaacctaaacattcaaaaatgacctaaacctaaacctatttatttcatgcagattttaaattgtgttatcctgtctgatctaaattattatccctacttaaaaaagttcctgaagctttacttttataaaaaagtaagaaacagaaccaaagtactaataagggattattagttaaacaatgattaacccttttactccaaagcttgaaattaagaaactgttttgtgttttattttgccatcatgagcaggtcaatcaaaaaagaacttttctttaaagaaacaaatccacatatattgactagtgactactagtaagtgaaaaattat

SEQ ID NO: 394156 - DNA, 692 bp, Cannabis indica
aggtatcttataaattttaaaatttagaataatatataatatagaagtaaatagtctatttcagacgcgtataaaataaaataatcacgtacgtatgtaatagactgtatgaaccccatcttcggcgtgttaaatttagtaggatataactacaactaatgaaaaaaaaaagactaaaaaattattttaaatgtcaaaacagataaggtacactattaaattttctaaattattttaaatggaaaatatttactacatattattaattaccaaaaaatttaaaattcttactcaaaaatttcttttaacataaatcattaatagttcgctaaaactccatcgatcttggaataaattttgtctgaagcatactgttcattgctccaagtgaagaagctcccataatattgaactatgcttaactctgtctcctattcttttcatctttgtttaaaatatcaataaaatctccaagtacgatccaaggatcaccacttgcaagatcttgtaaacttttccataaattcttccttcaatcttcatcattaaagccataaataaaggtaacataaaaactatgcttattgtcaacagttgcaacaaataagtgtataagttggcttgagcagctcaaaatatttaacattaaaatgtaacggattctaaactactatgattctcccacctttgtg

SEQ ID NO: 394157 - DNA, 545 bp, Cannabis indica
tgatccgcgacctccatcccagaaagcgccggcgccatctaataacaccataaacaatgctacagaaggtaacagacctccatccctttcattattttaatgtttgtgttacacagtaaacagagcaaattttattgttttgcaggacaaaagagtagtcacaagtctagaaatattatcattgctgttgtggccacggttgccggtgtggtactaatcatcttcttccttgtgtgtttgagattaaggaagtcaaagaaaaatgtacaaggtaggtggagaaaaaattaattactcttctagttcgggaaaggcttcacctatatattgtgctctgttttggaacatgtcttaattttatgataactctatagtaatgtaagcctattaacaatagaaatctatcagatttcgttacacctattgtgaaggcaaaatagaataacatggctaatttcttaaatgtttcacaaacagattatgatatattctcatgatctcatgaagcatataacttattatttgtttctgatgcatgaagctat

SEQ ID NO: 394158 - DNA, 1060 bp, Cannabis indica
actataaatggaaattctagaaatataacttattatgtatattattttttaaaaaataaaaatttaaatatttatatgacaaccgaaattaaacttaagtattataaaacaattaactaaaaaaaaataggataaatactattttggatcctgtaatttgcaaaaacttccaatttgaccatctgttttgttaaatgaacaaaatggaccatgtattttaccaaaattgtacaataggactctgaactgatttttttgtcaaaataaaacttaataataattcgatctagagatgttatgacaaaactaattacattttctgtctgttcgtgttagaaattgtgtttaaattgataatattaaaaaaataaattattgaaaattgagctcagagttttatttttaccatttaacaaaacagagggtctattttgtcatttaacaaaacagaagcttcaattaatactttttacaaaacacaaaatctaaaatgatatttatgaaaaaaaaaaaaataattacagccgtacacatatatgccctacttatatttattttgatatatacgtccacgtgctaaatatacttctatctaccaagcacattaacacttctatatatagacactccatatggtattactctatcaagcaaaataatgaattgactgtctctctcttcctccattttcatatatctctctctctttttttctctctctctctctatataaataatatataaaaaatggaaaagagtgaatttgttgtaggaaaataagagatggtgtgagggtttattcagtattatattttgtgttgtttttggggataagtgtgtgtggatcatatggagatgatgattataagcacccattgtccgtaatagccatacacaaaacccagtttgctcttcatatatctgcctctatagaagctaaaccagctcttcttggcttgaaaggtacccccccacgtgaccactcacgtgctactgtatatttcttttattcattaaggtgctgtttggtaacacttttgttttttaatttttaatcaca

SEQ ID NO: 394159 - DNA, 1003 bp, Cannabis indica
agtcgaaggtccataagtgatggtgcaaattgctagttgtcactctgtggcccgatatttttgcgggttgaccattattagcttcttaaatgttgagtaatttttgggttgccatgtatatgagcggaaggtgactcaatttcatgatggcatatgcgtgagttatatattttgattgttttattactttatttttttaaggtaagaattattctttttatactctttagtatacaaataatttgtatgctttaacttctttcctttttgaaaaactttaatttctaattaattataatttatttcagttttatatagttaatttttccttttaactcacattttctcgttttttaattttatttttgattgcaatatttatatatatttagtacgtttttgtaattttatttatgttattaattaatattatttttttctctttcctttttagtaggttttgtttttcctaattctttctatttgtcttgatttgatttggcctctttggtggttatctgtattaatttttcaatcttatttgattttgttttatatgatattaattaataatttagttttgtttaatttattagtattaacaacttttcaacaaagacagctggaatctagagggttggctgagtcgagttttatgcgtgattaccgtttcggtattaaattttatatttatttattaataaattaggttatttaaattattttctctactgttttaagtatagtatttatattgttttttaaacgtttttgttgtttttgatatttgaagtaattttgtattgcaatgtaataattagtagtttgttcttttttaattttaattttattgtcggtattaatttgtcaattttttcatttaatttgattgcatggtattaaatttaatataatttaagtagctccattatttctcaaacttttacatagagatttattttaattcaaattaaatagctattaaatgctttctattattatt

SEQ ID NO: 394160 - DNA, 592 bp, Cannabis indica
agagagagagagataaatgtatatattgcaatcaatgataaagcaacattattatatcaatactttattctccaaaaaaatacattattatataaatataagacctattagagtactctcacattactaataggtagaattaaattactatatataagatgaataagttactcttcctgccaattggttttgaacttttgagatagaactactccattcaccttagctactttcatttcaaattctaacaaagatcagttctgatttgatttggatcttaggaaaaacaaatttttaggctatttttgtaagaataaataatatttttaaaaattattaaaaaaaaattatttagacctctgagatgagtggaccttaagcgcgggcctaaccggccttagtttagggtcggccttgtataaataatattacataataattagtggaagtgatatatgtgtatgcaatttttttttttatagtaaactaaaatatcaatcgttgatactataaattattaaatttttttaaaaagtttacaaactttgatattgtaacagtaagaacataaaaaaaaaatagatatagttat

SEQ ID NO: 394161 - DNA, 715 bp, Cannabis indica
gagtattatatataaatatatatgcaaaaatttatgtatatacaacaatacggtgtgaatataaatataaatgtatatatgtatatatataaattattattttaatgcatataaaatataaaaattgaatgtatacaacagtcttaataatatgcacaaaaactattaaaacaaaagttttgtttagttggcgtagagaaccgatgatgtatatatatccacatgtatatgcataaaattaaaaacaaacatatacataatgaaaactgagatatatagtttgctctgataccaactattaaaaattttatatgaaaatatgaagcatatataatcatgtataaatatgtgaaattaaattaaacatatacacgatataactaaatgatcgaaatacctctagcgcgctattaattccacataattgctttgatatgcaaaataacaaaaaaaaatttattagtgtggttaatcaggcttccagctctctctactatttttacagattgagtactgagcttgggaactgagaccctatatttatataggtgagagaccttccatcaaagtctcagtcataattaattgtcacaatgttttgacaattaatttcaaaaattaaatcgagaaattaaatatttgataaatcataatttaaccatatataaatataaactaattaattgtgtctagatttaatgaatataaaatattc

SEQ ID NO: 394162 - DNA, 1843 bp, Cannabis indica
cttttgtatccctattttactctgtataaatggcagcatttattctttcctttgtaacccttgagagtatcaatagtcattaaacgagcatctattttctctttttaacttggaggaaacctcatgggacatggttcccttttcttctgattttagccttcctcaggctgagggggctcctcctcaattctctcatacactaatgggattgcagttggatctacttagatgcccgcatcttccacttccctttttatggaaatcaatatttcttgtattctcttattttgttccatctgctttgccaactctgcctcatggtcaacacccttttacgttagctcaattaattctgtatagttgtcttgatcatagtcttcgtattcttcttggtttgaatattttgaattattagtgtctttctccttcagcatccaccttagaatccccctcttcctcatctggatcctttggctcatctggttgttgtggatgtgaagtgttttttgtctttaccattgtactatgaggctatttacgacttcctcttttggtaagcttcctgcagctctcaatgaaagcaccaaaatattgattgaagtttttcgtaaccaataattagagttgtatgaattgattaatgaatgtttgaagagaagatttatacatggttacgtcattaatgagctttagtccacgagtcactgtattgataagagtctttattacataaattttttctgaccgatccgttttttatacattattgaggtatttataggctcataatggtggtaaaataccactattgtcgtgtttgtttgtaccataccttttacaatttctcaaatctgatcttagggcatgattgcctacttttgtgatgggttttgggttgtccataggtgtttggtgggatttgacttatccctcatttatgacttgacgactcatttatacagtcgtcgattgatgtatgaggtctcgtgaattctgggaatgatgggtttaaacccttaaacacgtttgtcagagtaagttatcagatgctcttccccatgctgcattaaatgcgtgtacagtgtttcgattctcgagggacgtgttatgtttcatcaatcctcctgtacccttctctggacagacttcactcacggaggaaaagaaaaaagatactcgttgtccagcaagaccctccagaagatggctgttctgccattactctttcgaaatattagactccgagagtaattaaggtgatgtgtcttgttcggtagatcctacttctatttggctcgctcctggactgccacgtattttgggagaaattctaagcaactaatcttaaattaattacttacttaaaataaattaatttttaattaaaatatttaataaaacaattaatatttatatatatttatttttaaaaaataaataaaattaatttattaattagttttaataaatttttaaattaataataactatttaataatgatctaaccattaaaaataaatataaccattatcttctccacaaataaattatatatcttcttcttattatttacttgtactcccctttgttaaattctaaaaattttaaaacagtataaaagatttatttttgtaaagttacaattaattcccaaactcaaaataaattaggggcatttgtgaaagtaataatcaaagtaagtagtagctacacatagttgtattgtattaaatgtctcataattatcaaaattaatttattactatgagaagatatataagatgattagtttacaatactacgtcgatctatttaaaccaaaatagataatatatatatata

SEQ ID NO: 394163 - DNA, 789 bp, Cannabis indica
tttgttgtagtggcaataatttaacatttaatattccaatgaggacaataataaaacattttagagcccttttttttccttgaaattatcaatatcttctttttgaattgataccataaagtaaattaatggaaaaatataaagtagactaggggaggatatgccttcatgtttttgcaataaacaaaattaataattacaaaaggagaaaagagaaagaaagaattgacaaaatgtgcaccacaaatttgtacaatatgctatatatgtgcaccacaaaatttgcaccaaatagtatgacaaaattttcagaaatgaatgagtagtactttaaattcttttgccaaaggaatgataaaagaatcattttgtttttatatagatagtataatagagctatgatgcttattcatataatcttgtaatagtgatgacaatattaagttattaaagctttaatggtgattacattatgattattgttacatcaaaccaaacatgacattattcttaagttttcctaagatagaaaaccaatgatcttcattttatttctaagtgtgatgaaaaagctcataacttctattatttcttaaggcgataactaggaatagccacaagatgtttagtcctagcagtagtgataccaaacacttcactcatatccaactccgaagctaccatattatcaggtagttcccaatcaaagcaatgaacaagctgagccaccatcaacctcaccacaattagaccaagctgcattcccgggcaccctcttcttccagaccc

SEQ ID NO: 394164 - DNA, 521 bp, Cannabis indica
agaaagaaagaaagaaagaagctgctcattcctatattgttccctctttttattgactttaatatatttatttagacttacttttctaaacatatcaaagggaatagatcccttctaaataattttaaaaaataaaaggcttatttttttttttctatttttgttcactttaatagattttatttagtttgtaaaaaatatattttaagctctacaaatctagagagttttttaagtaaaaagtaaaattaattagttttaataaataaatatagggaaatttacatagtatgttaacttttgttatttttttacaaaaatactgccaggcggtattttttacttttttactgtgtttttttataagtttcatactgcagtatactgtgttaaattttcactggtgttctactggtgttttattggtgttctactgtttttttgagttgtactgttttgtgttttactgatgttttataaaaacacagtatcttcgaaaagatttccgtgtgacagtattt

SEQ ID NO: 394165 - DNA, 1562 bp, Cannabis indica
tctaaggaggcgcttctaggtctgactatgtattgtggaacacctttactggttggatcagagcctcaatggttcgaagaaagttcatcaacaatatcgacatagcctatgattttaacatcgagcaaccgagaaaccttcttcctctaccccatggagagagaagggcacttgcacgctcacctttttgggttttcctgccctctaaactttatacactattaagctgtgtcttttatgatatacgactttaaaataatacttctcgaaacataaattttaaagtccttccattacattcttttaattcaattttatcgtgaaatgaatgacacgtgcggtagatatataatagttgataaatagatgcaaattaaatactttataacttttatttaatgattgaaaaactaaaaatataaattattatatatataaagtcatttattctattattcaataattttaaaaaataaaaaataaatattataaaaatagaatatgaaaaaataaattatgttactataaaattattataaaagaatataatttgatatatagtgtaaaaaatttagctaacaaaaattaatgttaatattattcatatatttataacatcatatcaatatcatcatgatgcatgtatacatattatatggtgcatgtgatgtgaccagagtcattgtatatgcatgtaaattaaaaagagccaaaggcatatatatattactattaattgatcaataatgtatatattataataagtcattaatctaggtgatttcagctgctaacggttggaaaaaagccaggtaggtatacctctccttctttcctttgtcttttcaaaatcactgtacgtgcatgcctattattcttctatttctttctcctttttttacaaaatagaatggtacacgtattaatttgtatatacatatataaatattatatgtgggtgaacagtattattggtaaagaatatatagtaatgtcgttgtgggttatgttatgtatatatagggtgtctggtgcaatttataccatacatcatgatcatatatatatatacaatatacagtgattattgggttataaatttaatactaagtctcacatatatatttgatcttcacagtaggtcacacttattaaaattacttcaagttattaaatatgccatttagagtttttaattaagtaatgagctaccaaaaataagatacaccttgttgatatagagatattatcccatcaatctattcaaactctcttaaattgtatacgcatacctacacagtctcagaatcattacatttaaccttcctcaagctaagtaagattgcacaacttactcaatattttatttttatgaatcatgagactactgattgtcataagcccgataccaacacaacaaatatttatttaaaaagaattagttattattaatggtataggacgattggtacttttcttgggtgccaaagaggatcgaacaatatcctaaatctaaagtgagttctttcttaatttagtgaagagaactaatatataagtaa

SEQ ID NO: 394166 - DNA, 1983 bp, Cannabis indica
ttttaaaagaaaaaaaaaatttaggccattataatgctttatgccagtgaagattaagcaattttatcctatgtggtttgcgttaagaatttaacagttcataatttaacaaagtatacttttcgattagacaataaattatcccaattcaaaaaagataattacaaatttttacatcataaatttatgagtaattataatctttatcttaaaaaaaagtttatactatggacatgcttcaaccacgaatatggcttatttcccattcatttttatgagtttttatctttatttattaatgatacatcatcaacacataaagttgaaacatatttatgtaataaattttttaaattaatcatatattaattcaaaataattcacacttactaaaaataaatcttttctgtactatatttgtttaatttggtgagagcttcattatcaaattaatatatacactaaaattgtagtttttatataaaataagggcaaatattttttttattatgataaataaacacccacaaattaaaaatttggtacgtcacaaatcaaataattaaaattgggagtgtcaatctgacaagtaactagaaaaagatatgggtatggggatatttatattatgtatttgtagagatcccttgatagtgtgggaatcaaaaagtggatcagaaagtggcaaaacatgacaaacaagttgagttggtttgaagttgattcttaagttttgtattggaatgaggtggtatggttgtcaattcataaaaatatcccaattttaatatcttcaactttaatttcagtggagtatttgatttttttttttctaagaatattttaaattttttagttttaatacgaatttttcttttttcataaaaccataaaaattatataaaaaaaaataattaacaattttgtctctaaaactttcgactatactcattctgccacataaaatgtatagttaattaaataaataatcttcctaaatttttacatttacaaaaatttactcattttgttccgtttcttcacattattacgtttaaatgctaacatatctttgtaaaaattagtaatattgtttcataaattttgacaactatcaaatcctactcctcaaaaagaaaaataaaaaaaagattcaattttttttttaaataaattttaaaaaattaatttagattttaaaaaaattattttgaatgattaagaaaattaaaaaagtaattaaaattttaaaactaattaagtaatttaaaaaattatttttttttattacatggtacatttaaaatgtattaaaaagttaaaataattttatatttttattaaatttggaattatttttatttattttttaagatatgagtttataagtataaataagtgatttttcttcaaaacaaatcttagtttgtttaaattatttattagatttttaaaaattttggttttgattttttaagatgtgtgtttataaataaaataaagtttgaaggtatttttttaaggaataatttaagttttttttaagtaatcttaatattttttatgtaatttaatatttttatctgattttttaataacttttatgaatttttttgaaattaatagaacattataaaatttaaaattattttttttaaaaaaatgaggcgaaattttatattggtcaaagtgtaggaggtcaaaatgctaatttttagcagtaaaagaaaccaaacctaacaaaatgaatataataatgtagctgttatattttaggagaaatttttaacaaatcgtatattttaggaggtatgatcaagtagtgttgaaacttcaaagtaaaaatactaattattttataaaaaaataagtggcaaaaaaagaaaaagaaaacttataaaaatattagaatttgggttaatttttgcagaaatatcgtcccatgaattttttttttttaaaacatattggcttttataaaat

SEQ ID NO: 394167 - DNA, 1499 bp, Cannabis indica
gtggaggcccaaggtagttcaggtggtttggccttattgtggaaacaacaggacgatggaagaattcttggttactctaataaccatatcgattttcttgtggagtcttcggaaaaaggagcttggaaattgactggtttttatggggaaccagttcggggtcttcgccatcaaacatggcaattgcttcggaccttagcaaatgatcgtactcagccatggtgtgtcattggggatctaaacaacattgttaggcaagaagacaagagaggtggaaggttgtatccgcaaagtctcataaacggttttcagcaggctcttaacgattgcaatcttgtggatttggaactttggggtcatccattcacttgggagaaagggagagggtcaaacaactgggtcgaagtgagattggatcgggctttggttaatccttcatggagtagtctttttcaaggtgcttctctttctaacttggaaatttcttcttccgatcattgtccaatttttctagaaccggagccatgtaatgtcttcccttctcatcgtaagtttaaatttgagaacgcttggcttaaagaacctttatgcttggagatagttcgggattgctggaacagtgttggtgacgctgaattttcaaggaagttatctctttgtgctgagaagctgagtgtgtggggaagagaggtgactggtaactttaaagggcgaatcaaccgatgtaaaaaggagttaaagcaattggccaacaaaagagactcggcatccattcaaagacataaagaagttaaggaggaattgtttcggatccttgaccaacgtgaaaccttttggaagcaacgagccaaacaactttggctaaaggaaggggatcaaaatagcaattactttcacaaggctgcatcaactaggaagaggaataatcaaattgtgagtttgaaaaatgagaatggggttcgggtggattgggagcatggcctttctcaggtaatgtttgattattttacatctctttttcaagcttctaactcgtcgtgccaagaggttattgattgtgtaaaccagtcggtccaagactatgttcatactgagcttcgggctcctatcactgaagaagaagtgaaaaaagcgattcttcaaatgcatcccgataaaagcccagggcctgatggtatgaccccagcattctatcaaaagtgttggggaatagttggtcgtgatgtggttagtgtggttaggaatttcttcacttcaggggaccttgggagtgagtgtagcaaggctaaaattgtgttgataccgaagaagaagaacccggaagacatgacacaactccgtcctatcgctctttgtaatgtggtttataaaactattacaaaggtcatggtgaaccgcatgaaacccttcatgaatgatatagtagccgacacccaaagcgccttcataccgggtaggctcatctcagataatatcttgatctcgtttgaagtgcttca

SEQ ID NO: 394168 - DNA, 567 bp, Cannabis indica
agtgttcaagatgcaaaaaggtttcatttgagccaatgtagagtcggatcttgttttattgcagggtagtgggtcatctaaaaataacctacccacagttgagaaaattgatgctaaaggagaaaagtgcacgggtcctggcaaagtgccagttatgattcaaggggacctggatatgtccttcaaccgattcaagttagaatttatgggcaatattataatcggaatttcaatttatattggcattaaacattgtactctcaatggggggacatcaaaagatctaaatggactgtgtctgtatgttatttagtggtaggccatctgacaggtagacagattagaaaaaggacaatgtgagttaagtttgctagtatacccaagtagaatataggacatgagtagttaatggaggcatcgatcaaattgattcaaataataaaatattttgtttcggagtgatctagcattagcaacagtggcacaattgatgagtattgtctagaatcctaggtgaattaaaggcggggattgtgtagtaattttgagattatgtaggcgtgggac

SEQ ID NO: 394169 - DNA, 1490 bp, Cannabis indica
acatatagttttgtttttatgtgtttttttagttaatattaaaaatcaagtattgaatagagatactatttatgatacccactcctagtctaaccatgattttttttaactaatgtgtcaaagaatcgtgttgtaaataatagttttcttatggttattattttataatattattttttttttcttaatactgaaattttaataaaacaataaataaaaaattataattaattaaaattagattgaataataaaaatattttattcaaccattatatgtgacaaaaaactaattttgtgataaattaaagcaccatgcgacggttttatgaactgtcgagaattctttggccgacagtgtaaaaccgacgggaatttagttttttagtagtgacaaagataataatttgggtacttaagtgttaggaatataataattaagtattttaaatgcgtacagaatagtttgagttactttttttttttttaggaaagggtctcaaccaccaaacaccaaaagcaacaggtactctaaaacggtgggggtgagaatttattcaaagatagcatcagctatcaacatatcctaaatacaattaggactccctggctaccaaatcatgctactacttgctgttaatgtaaatttggccaagacatgagcaacaccattacaagatctcttacaatgagcaaaactaacaactttgagcctattacaaagactaagaatatcatccaacactagaccgaacgaagtgataacaaagatattgtttttagttttcagcacaatactcaaataatcagattcgataataatattttcatacccaaaggaaagacattgagacaaagtttttctaattgccaatgctttagccacctcaggcacgaaacaaccatccaaacaccagctcactaaggcacaaacaaagttcgcatcatctttaataaccatgcttaaactacagtaattgcctgaagagcatatagccgcatcaatgttgactttgagacaacctagaggaggggtgatccatttagacgcttcaggaggggaaatatgccacatcaagggtaagccataagagttagccatcgccaaaggaggaggaagaggaggatgcttggtgaacgaaccctggttgttatgaaacgtccctagaaatttacgagcccaaaggacagtgagagcaatagataaatccacattattatagacctgttgcccctgatttctcccaaaatacgtggaccaaccggatgatgacacgaggacggaaagggattagcatttgataaaacggctaagtctccctaaagcgcaggagtaccttatgcctcctggagaaggcatgtaagtctcgtatgctcccagagagctagattgcaacaaagcacctctgggtggtgtcagatcctctctgagcagtcatctcacatttaatgccgcatgggaggaggcatgttgaaactgttgggttttat

SEQ ID NO: 394170 - DNA, 735 bp, Cannabis indica
taaaatttaagaattaaatatttaaaacaacctcaaatataaaatttcacaaataaattaatatagttatagagtaattttatagttatttctttatcttttggcacgcataaactagttaacaaagccttgcttctcaatcttttcctttctactttttaatttctctctcatctctaatagtaggttcatttttggtttagtctcactatttttatttttcatttttcatttgaatctcactctcatctttcatagttggtttattggtgttagtggaaaagttagggtttttcatttctgtcgagattatgttgaatgtgttgttgtcgagatttttagtttggtttttgtgttgctatgacgattaccagaagctcattttatctgtcgcttaagttttttgcccttctctttcttttaagtgaaacaccacatttagatgaaacctccttttaaactttcaaaagtgattttttttacaaagccaactttatcttgcaaatcccaaaactctctcaagcatttcacttttttttactcaattttgagcaaaaaaaaataacaaatattgctataatatatttagggtcctcaacactacatattattatggctaattaataatttttcctcctgaactttgacatgtactaaatcgtgccctctgaattttttttaccgttaaaaattcccctcgaactattgagattgttaaatttaaggacttttgtc

SEQ ID NO: 394171 - DNA, 701 bp, Cannabis indica
tatataatatattaaatatgcggttggcgggcggggtactcctaaaaactcaacccgcgaacccgccagaagggtaccgggttgaacccgacctgctcgaatatatttttttttttaaaaaaaatttgcgggttcaccggtttaggttcgggccggttgctcgggttcgggtcgaacccggttcaaaatgttcagtcattgtcatatttataagttgggaatcaagttttcagcttgacctggacctgttacagttgttttatgttgatctaagatccactgataggataaatacaataaaatataaggaaattacatggttatccactttattttatttgttttaatttttacttccatttttatatcatttaagatatactcacttttatagatgatgtcacgttaatgtaaattatatactagacttaagtagagagtaaaagtatattcagcaatctactcaaaaatatgagtatattttaataaaatataatatacgagagtatttttgattaatagatacaaaaaaaaaatatttttcaacttatcccataaaatattgacctttgggcttagtaggtgaggcccgggtaacatatagtcgtcatctgtacaactccagtggcattcgtacagttgccgaaggtctcgtgacactacaaaaaataactattttagtgacaaacttttagtcacaa

SEQ ID NO: 394172 - DNA, 723 bp, Cannabis indica
ggccaaacttcaatcaatagacactatgtggcaggcaagcctgcaccttgcaggtgcatggctagcaagctcttgcctggcaagccattgatgtgcaaccctcatgcatggatagaaagccaaattgcgagtcaaggcttggcagctcacaaggatccatgaaaatattagcaactttcctattttcaagggataattatgtcatttaaactttattatttaattatgtaaataaacctttatttacctacttttaaagaatattagagatgtaagctctactataaaatgagcattagataaatcttaaaatcctaagtcattaagtctcaagccctaagtgctaagactctaagctttaagtcttaagctctctgctgacctcgcttgtagctaatgacagtgagtctaatttagtaagcgacaagtagtttataacgattaaaatatagtaaagcaatataaggacacaggaattttatagaggttcagccccgagcaattcagtaatagcctaatcctcgttatttgcgttaactcaagaataaggaaaaaggttccttttcttatagctcttacaacagtatctctaaatataatttcttagacaatatctctcaactaaaatttttgcgaccgtctgcccaatgaatatgtttcactatttatagggctacgagcttggagaggaagtatttccctactcgttacaattgatataag

SEQ ID NO: 394173 - DNA, 666 bp, Cannabis indica
  modified_base (10)..(10): a, c, t, g, unknown or other
ctaaaaaaanaaaaaaaaaaaaaccaaaaagaaaaaacagaaattaacttataataagtgatatattataataaagacttttataaacttaattagttaattaatctccttgatttccaataagtgtctgcacatatataaatatataaatatagaaatgttacgggggaccttaaggcgttaagcatcaggaggtagtgcaatttaatattaatttctatgtatttttatttaataaataacataaaaaaaacctgttaataactattcacaattatgtgtgtgtcacattgatatgttgttagagactttaaaatgactaataacaatactcatataaatatcaattcaaaaaacatgtaatgaaaatcgtggatcaaacttcacagtcgaccaaaaaattattattgtagaagatattgatatttattaattatatatatatatttaggattaattttatattacttccatattataattatattcatagatagtgttgtaaagtggtcgatttttttgagttttatgatgtaactaacaaaatatacactcttgtttagtctcattgcaattaatacatcatcggtatactttataaggaattttttttttaaaaattattaaatgatttttagtttaataaatttgttttttttttttttt

SEQ ID NO: 394174 - DNA, 555 bp, Cannabis indica
gctcagttgatccattctgtccttctgggtgttcggaactactggatgaaccttttcttgcttccccaaaaagttacaacgaccattgataaatgttataggacttttctttggggagtgaatggaaaccgtagtaaaatgcacatcccctcttgggagaaactttgtctccctaagaaatttggaggcattaggtttagggaagggaaaaaatggaagattgctctaatggctaagtatctttgggctattttgagcaagcaagataacctttgggttatatggattgatgccatttatcagaaaggacaaagcatttggattgccgactttcatcatgatgctagttggtatttcaaaaagcttctttggctccgctcaataattgatgaagacgatgtcaaggctgcggtgaggagaggtaaattcttttgggattttatgccctaaataaaatccttttcaatctaatctaatttgttatcaataaaagatttgaagtcatttatgtttacatgtagttttcatgtttatggtttgatatatacaaaatct

SEQ ID NO: 394175 - DNA, 1020 bp, Cannabis indica
tgatggacaaaggaaatagacttcctctcctagtcaatgataaatgagtattatggcagaaactataccaagctaatatcgactttgggagttagatgccatatgatgatagggctgtcctatgaaaattggaaacaggtcaatcctgaacgtaaaaataagagttggaaagatatacaagtaagcaattatttatgagaattttgatccgtgtttgattaattcaaatgttaaatctaatcatgtttggttttccttaaaactagatgggttttatagttcgagatgatttcaaacataattgcatgatcattgttgggaagttaatgaatgacttcaagaacagaatgacaaagacatcattatgcccgctttagaagacaatgatttacaacggttagcatacgtccctgaaaaacatcctgaaattgacaaaaaggattggttgaaatttgttcaaactcgactaactcctaaatttcaagtaataattatatttgtactaagataaactttcaaataaaagtactggtagctaacagtttttttggcattgtaggaattgagtaaggtgcaaagggaacgttcagcaaaaatcgaatccagaaatcgaagtggtcagagtagaatgatgaacgtaagggaagatgtggtaagtaattaataatttctaacaatgtgcatcaaaatataatagtactcaatttagttttacaaaataatatagaaaaaggacattgaggttcaagatcccccacgtcaccatgtttggatcaaatctcagaccaagagaacgaaacttgtcactgattatgacaagaaaattgtcgaaaagatagtaagtatatattaatcgttgattaataataatgagttaaacagtggaaaaataggaatttttgtgtgcataatagtagttgtttaactatattgaagattgtaaatgagattaaagaattagttaaatacaggttgtatagtttaaagaataggaagttttttcaagctgaaaaaggcatg

SEQ ID NO: 394176 - DNA, 519 bp, Cannabis indica
gttacaaagacttaacaaaaaaaataataatacaacatcatgaatcagtacacgggtatcatcagttatagtcaaataatcaaaatcaaataatcgcatattaataatataagcaaattcacaaattcaaattaacacagatactcatcagttcaagtaatcacaagtatataaacatccaataatactcaagcacttgtctaataagacaagttgcatctgttactttataaaataaccacactcatagttgtctaataacacaaccctgacacctaacctaacattcaaatatttatgtctttatctaataagacattcctgatacctattccggtatccaaaatgtcactatcgttacttaatgataatatatataagtgacaagtaaaaatcttacaacagtttcagtttagagtcatgaataatcatcattgtctaataacaaaatatcttcatcattttgtcgtgatgaattcaacatgtaagtatacatatcgttttaacaagtaatactca

SEQ ID NO: 394177 - DNA, 1208 bp, Cannabis indica
acatactacattattattgtatataaattgtttttgttctttttaggatgaattgtgtataaattctgactggctttaataattattatgcatgcataatttagttgaaaggttagaatttattgtttttggtagataaataaatccataaaggggatagaactataactacaactagtcggttcctataaaaaccaatcaaagcaaacaaattcatcaactcattattaattattgccaactttttatttttattaatttatttttcttagtttggtgaagtccaaacatgttgtctataactacaaaaagtgaaaaaaggcttctcctagttgtgttgtggtcggcaattctcatataatttcattttaaccaattaaatcaaatcaatataattaactttaaacattaattttgtttttcttctttctgattgtcttattatttttggcattgctattagacacaccctactatctattcctattagaatatatatagtgtgtattttgcaaataattatctaaatttttttataataattttattaatttaaaatatgtaaaatagaccgataaaatattatcaatttgtcaatttttatcgatgttaatttatttttgtttattgccgagctttataatgaactttgtccttaataaaaacttagatatttcccgaaaaaaaaatgtgtaaaatcatatacttattaataataataataaataaaacttcataatactttagtattttttttgtcatcaagatcagacaatttaaacaattagtaggtttgtctttggacatagacaggctaagcctgtgcttagggcccacctagccccggagcctgaaaaaaaaaaaattctattgaaaatatatatatatatttactaatttcaaaaattttatatttttttaaaataaaggtccaattttttttttcttatgacccactaaaatttagaacaagccctccaattaggttccatctccaatatataagccaataatatatagctaagaaactaatcattttctcactatttcaaaacttattatttgaaattccgtattttaatattcccagtttgattatttaattaaatgattaattaaatgcggaataataaaactggtactgaaaacagttttctgtagttacagaatgcaactctgtaactccagagaaacccagaaaaacaaac

SEQ ID NO: 394178 - DNA, 1186 bp, Cannabis indica
aaatttattattaattataatattagtttaattaccgtaatatttttaatttataatactttcactgttttgaattatcatacacttttctttaaataatataataaaaatattttttttaaaaaaaataataatagaaagattttttttttattttaaatatgtgtaaagagtttaaatttgaatagcaatattaagaaaaatttattattatatagacacatttagtataagataaaaaataagagagatatttgtagtaaatttaaatttaaattgtaacgttgttatatagtcacatttaatataactaatttgaaattagtgttcaccatatgttttggattaagttgtttgttaaccaacccactcatgtaaatgagctacttgcaggctgcctgatcttcctccgccgaaaattccttacagaatctgcccaagtccttctgccatcatctggagatcaagaaagtcaaggagaaagtgaaaatacaagtccctgagaatcaaatatacaacaatattacgacttcctttacagtcaggttcagtctcatccaacttatataccacttattggaaacatcttcagccttatatagtcttcaccatttgatgatcaaattgttcatttatctatacaaaattcgattttacaaaggaataagggaattctgtaatgttgctcatcatgttttagcttttcccttttttcattgaaatcactgtaaattataaaatttagtgttctaatttcccaattatcatttagaaaaaaaaaaaaaaaaaaaagaagagaaagatttgatatttgctcagcctttactttttgttttggtaatctccatattggcaagaccggctaataaattctttcacgcaatgattgttttgaaaataactcatttactttgtattacaagactaaggtggtgtttggttggaggtaataaaatggaatggaatgaaaaggaaacaattttcattccattcctttgtttggttgcattttaaagtattggaatggcattccaatggaatactctttccaccaatttggttgaatgactattccattttaaaaagaaaggaatgaccattccagtaacaagaaaaaaaattaatagattttttattcaatttttttaatgtcattttaaattttattcctattcctattcctatt

SEQ ID NO: 394179 - DNA, 1121 bp, Cannabis indica
tttgatatcgttgccattataaagaaattttctaaagggcaacactagtgcgtagcacctcgggtcctatataacttaaaaaataaactttatgaaatatcgttaactaattataaagtaacgcatataaaaagtgctcaggtgcctaatagtaatcttctattataaacttttcttttaagggatttggaacagtactccaaagaaaagaaacaaatggactgacaaaataacgttccttcccaatatttgatcatataaaatgttgggtgaagatgtgatatgggcccgtacgtattactagtgtataggtgttgttactgttgtaattgtgtagtacagccttacgtactcagataagatacgataagatattatggtctgctgcatttattatattatttcccaagattagtatcatgcattaattggatagatttgagaaataattcgtaataggatatagaatgcatgaaaaataataataacaaattctattcgtaatctcaacaataatatttaattagtttttattatataatatacatttattaagaaaatttgatattttatacatgatttaagagttattagttaagaaaacttaaactctaagtaattgttagaatatgtcaactttacctaaatctcaaaactacccctctcaaaaattccacacctattctccctccttcgcccaatctaataaacctagtcgtcccaaccccaaatcgtcccaaaagctggccacacccgcacggaggagacccaccagcccacgatgctcccccaccgacccacgacgcaccaccatcgttttattttttttaatgattttgtttgtgattttagtgttaaagatagatcttgttagatttaggcatagatttaagttttagaatctcatatttgtgattttgggcaaagtcgatggggtccgatgtaagtctgatggggtccgatagggtcgaataaaactgtgagtttgcgaggtagaagaccgatgggggtttgatatagggtccgatgggggggatccgatgggtccgatgggttcgattgtgtccgatgaggggtccgattgtgtaaatgagggtgatgtaaatggagggtattttaag

SEQ ID NO: 394180 - DNA, 738 bp, Cannabis indica
ataaaataagtgataaatatcatcgtttagcctagcgcgcactaagatagcttcataaaaagaatagaagctactaaagttatatcattttatatcaagaattgtatttttgcaatatttgtgcaatgagcggggtggagtggagatacataacttgtacagtaaaaaaatattaagatgactactattaatgacacaaaactctcaatttaactcattttctttcttcgatgcagcatgaacaaaatgaactgaacaaaaaataaatgcttgtacaacttgctaaaacaaatgcattatagtacttaccatactctctgagggcaaatctttttcacttttacctggggcttagtgacaaatgagagttagtgtctactactaagtgcatataagaactgaaatagatcattgcaaaaattgctattaccttaaaatagttgaatagtacaaggcactggacaaaaatatgtcgccgaaaactatattaacacaagacttaaatcactaattataattataattttgtttcagacagtataaacacagtggaagagatattcactaattatattgacacaacttatatcactgttattcatcgacaacaagcttttaccactcatgtcttttagaagagaatgatgagttttattttcttttttatctaatgaaatacttttccattcaaaaaaatatatattattccttttcatattgggaattacaaaagtcacc

SEQ ID NO: 394181 - DNA, 1252 bp, Cannabis indica
ctttatcctcctactgcacttcagaatgtcacccccgaatctatggttttttctcctttttgggtacaaccttataggcttccttttctaagtaagtcaagattgttagctaaatctttggggaatcttttgggtgaatttttgactgttcatgaggactcattgaatgaaggttggggtccgtttttacaattcaaagttcgtttaaatataacgaaacctttgctccgtggtaagatgattacattacccaaagtctgggatgaattctgggttgaattctgctatgaacgtctccctgattattgtatggaatgtggcattattggtcacttatatcagaaatgtccaaagttcttggaaaatcttgacaatggtattgaaccagagttggcctatggacctatgatgaatggatctgcactaccatcttcatcttatgaccgttatcgatctgatttttccaaaggaaatgcgtggcccttactcactcgtctggctaggaactctcttactgctacaatcccacagatccattctcgtcctcctccacatccaacacaattactgactggagagtcttctacttctcaagcaattccctctgctactgctactgctactgatcatgtctccaccacagcaccatcctcaagggttcaatcttttttctcaccggctttacttggacaatcttctttgatctcctctggtttggttcaaacttcagcaacacaatcacctttcacatctggtttgaaatctccgattatcaatgcttctacaactaataattcggttgcacatctctcgaatgtatacacacctgatgttggctatttatttgctcctagttcagtgtccacatttaatcatcccattgccacttacccctgatgacatctcccacttatcaatctcattaccctgctctgactatgccattttccactcccttatattcaacatcccaacctattgttaattccaccacaggtctcaactctacttctcagttatgtttagatcaggaaaatatccacccaaactgccagtttaaacgacaacatgactctaaatctttgagacaatttcttaagcgatgtcggggtaatcatgttctcaagcttctcctttgtcagttgaagtggactctctccattcagtttcggatgcttcttctgattctgatgagatcattgacaatgcagcgatggttgctatgcaatcccgctcttcatcatgaaactct

SEQ ID NO: 394182 - DNA, 1160 bp, Cannabis indica
atgagcagcaaaattacaagttttacgagcatacacaaaattacagcaaataaaagagggagaagacttaacacaataggagatatagctctcaattgcccaatgagaactatatccaaccatagaattttttataaaaaaatatggcaacatttataataattgagcaatggccatgctgtgtaataaataagcatatcatttatagtttcttctagctatttctttttgttatatgttacctatatactatataataatctcatatgatttatatatatagagagagggagggacgagatctaaacagagattagagatatatccatacaaggatatatagaatataaatatacattccaataacaataataataatatggtgataattggtgtggtagtattatttggtgtaattattattattcatcattggtggcgtaatagaaatgcaatactcactaattggccaatattggggatgttgccgaccctggtatacaatttgccaaggctacatgagtttataactgagctaatgaccaaaagtgggggaacatttgagttcaaaggcccattgtttagtggcatggatttcattctaacatgtcatcctttgaatcttcaacacatctacaccactaaattctccaattatcccaaaggggaagaatttagagaggtgcttgatcctcttggagatggaattattaatgttgattctgatttatggaggcttcaaaggaaaatgtttcagctatggacacgaactcatcataactttgattcatttgttgcaaccactctccataagaaactactaaatgacttgattccatttcttgatcaggctgctgaaaccagaattcaggtatgtttatcaaaccatatatagtgtgtattacacttaaaagtctttatctgaagcattgttggtttaactgttagcttaatagaattatgagtaatattttttcttttgggtgaataagaagaataatatattgcaccatcaaaatattactcagctgcaaaaaacccagcagctattagcctataccatatattgcaattataatttttatttgttactaatatttttagccgtgaagtttttaataatataggaatgatgatttacctttagttataactttttt

SEQ ID NO: 394183 - DNA, 774 bp, Cannabis indica
tgggttaatgagatttggtcaatcagcttagtttgggtactacaataattttaaagagatacttgttacaagaaaattgttaaaaggtaatagtggtgcctaacacagcatagagtgtatatcgttattagcacaattaattatcaggttctatataatttaatatattaatttttatagaatatgttatacaacaacttcaatatttattatatatagccagtaagagggtctatcaaagatgggaaagtcatgcaaaatttgttaatttcctaaatttatatataaatgattattttaaaaatatataattggaattttttttttttgtaaaaaaaataatattttatttgcatgcattttggcatcaagaaatagcatcagcatcagttaaagtctgtcactaatagttccatcaccgaggaaatatgagacaacttgaaaattgacaattaaaaataattcattcttttttttaggaatagaattttattaatcaatcaagcttcaaccattataatggataaaaattcagcagagcatcaatctcagtgaaaacacaatctataagaatggacaagagtcacgtatgtaaatgcaactttattcacagagggttcatttggtacgccgtataaggatcatattgtattaaataataaataatactatgtttggattaatcaatgtattgtattaattattacgagcaaattttttaatacaatatatgttatattatttaatacataataataaatggtccgtattagc

SEQ ID NO: 394184 - DNA, 850 bp, Cannabis indica
atatggacatcgggcccactatcaggtcgtatgtcgggcctatcggaccctgatcaaaaattatgacggataattaccattagacctacatcgggccctaccaagccccaacaaaaaaatagaattcaaaggacaatcgggccctatatcgagccccatatcgggtcataacaatataaaattcaacaagaccatcgggtcatctatcgggccctatcaagccccctatcgtgcctatcaggccctcatctaaaaaataaaatggagaaaatacatcgagcctaccatttggcccaacatctggccctatatcggaccatcggtcccatcgggcctaactcaaatggatagacaattagaccgactatcgggcccaacatcgagccttatatcagacctttgtcttcttcgtagatccatcttttacatcacagatagtaaatctaaccttaaatctaattcaaacctcacaaatcacagaccctaaatctatcaataaacaacgttttaaccctaaatcaataataaaaaaataccaaagggatgaaatcttaccttggccgacattgcgtggtggtgggttcgatcaagtagtcttcgtgctcagatgggttcgagagataaaatgcttttgagagaaagagagatgtgaggaagagagagaatgtgtggtggtgggttcagtcggtttgcgtggtagtcatgggtggtcctcggtgagagaaggatttgggtgaagctgcatatgttctcggtattcaaattatcagaaaccgatagaacagatcccttgctctctctcaaacaacttacatagataaggttttagagagattctcaatgacaaaca

SEQ ID NO: 394185 - DNA, 1485 bp, Cannabis indica
ataattagtctaatttaatatttgatctaaattattttcaaaaaaaatatttgatctaaatttaatgtattttatattgaattaaaatatgaaatttaaaattaaattacaatctgtattaagaaaatgatttcactgttgaccataatggtagaaatgcttatgaaaacatatcagtatttaaattttgcaatttaccaacaacatgtaagaataatgtaggaagaacaaaaaacaatgtgtattaatgaaaacataaataattaaaagaaatggttacggtgtataagagcacatttaatgaagatgtaaattggtgatgcattattaaaatatagctcactttataaaaaatttattccaatatattgtgctaaaagttgtgtcaaatttagcatataataaaaattatgttaaatttagcacacaatattgtaggagtggcaattcaggtcatgacactacaatataagacgatctcgatatgaattgttacgtgctagggtcataaaaaatagacgcgggtcaaaattaggtcgaactcgaatgacacaattatcatttgggctaggctaggattcacgcatgtgacacgaaatcgacacgaattaacccatttatatccaatatatatttattttcatagaaaaatatataacttaaaaaaaaattacttacaagagtataaaatagataatttatacttgatggtaagaattttatttattgtattgagtattagtgataaattatttttataaaaattaaatatgtgatactatatattcatgttgatcaacatgtattgtaatatgagtatagtcaatacgagaacacgacatgagaacacgacgagttgggttaggattgagatttcttgatacgaaatatatataggtcggattagagttgacaattaaacatattaacctgcataatacgaacacaaatatgacacggcaacacaaagtgctacccctacaataatatagcataacaataaaatttaatcgcaataaatattttacttttatattaacttatattttctttttattattttaaaattatattttactataacatcaaataacagactttctttagtaataaaatttaaaataaaataattataaatttatattttacaataaaaatattaaaagagtattaattggatattaaagttaaatcaaattttgtaattctctgttgaagtatataagaatactaaaaatttattgtaaatatattataaatttatttttatactaaatatagtattatttatacattttcaccaaagatgttataacaaactagttttgttattaaaatgtatatggagacaatataaaaaataagagcatctctagtgaaatgctaaaaaaaaatagtatattgctatattttaatatatttaagaaaaaaaaaatatgctttgagtgttctaaaaaaaaatgtgctaaatttggcacaaaatat

SEQ ID NO: 394186 - DNA, 1022 bp, Cannabis indica
aaatattaatattactgtatttttcttcccattttctattcttattattgattgtgtgttggacacaatgaactacttttgatgacgtcatattgacttctcacatcatgatatgggacagagtgagcatctaatgataagttttataattttgaatattgatttcttttttaaagtttgtttggacccaagatagaatatggtgaatttaatagtttatagtttgtaaacttaatagttttctttttcacttttttaggattttattgcaatttgttcaaatgtaacattgataatttataatttaaggtttatttttcattttttaggattttatagatgtatgtataaatgtatttttgatactgtatactttaggtttttttttttgtatatgatagggttgtatactgaatggtgtactataattttttgcatttaatttattttattgatcatatattttggtattaatataattttgtttgccactaatatacatatcatttttcatgatgtgatttttgtaaaaaaaacatttcacttatccaagtgtaagcaaactacatcactgattatcatgtcagtgtgaattcattgcactaataaattgtggggctaaatagtttgaagcatatagtcatgattattttctgctgtgttgacaatactataatcatgaataactatatgttcagtatttaataaaatttatatgttaaacatataatcatgaaagtaacatgtgaaccaagcaacatataatgagtaaataagattatattaaatgagtattatttaaggcataaaaccccaacaaatatagctctaaactttattttcttatgggttactattttagaccttgtattttgcaagagttaccgaatggactctcaatcttgttaaatgacaaattggaccctttatttttcaaatgatacaaaatagtgtcctgaactcaatttttaatactttttttgatataattgttgggttttatgccctaaataaaactcttt

SEQ ID NO: 394187 - DNA, 728 bp, Cannabis indica
cagcatgattcggccactgacgatgccattggtaccctgcttaacgccctcctcgagatttcatcaggcgttggtgagggcaagtgtaactccgcagggttggcctcgacggggcctcccaatctggagggactttctcagcccgagaatctctcgactgccacggtaggccaaaatctgggtccttcgtctacctctcatgctcggacttcttcttctcttcttggagcgtcgtcgtcttcccatctcgccatttctcctattttggcgcacccctcaaccttttctccagatcgaggctccccgcccttgtccagccatcccccgcgggccaagactgaatgggatgagatccctgcttttaggattaagaaagatgtcccgtttgaggagttggttgagaattacttcaagtctcttctggatgccgtcagaaaacttgatgatgatttttatatctcccaagggcgtgactccattctgaaggacactgctatctcagggataaaggtaatccatctcctacttgtattttattttactttatttttgttactatttcacttactattgttttatttatattatatgtatatatattttctttaaaacgagtatcagacgactttgaggtgcgcccatgctatgaaatttgccccgcagactgatagggagagggaaagcttggctaagggctattctcgttataagaaaaattacgaggcagc

SEQ ID NO: 394188 - DNA, 856 bp, Cannabis indica
aactcaagacaggacttcatgaaggtttattttacattttctagtctggtgtagtgattttcaagttcatacttaaaaagttttaactatgaattttggcccactaacttgtgtgacaagttatttcacaaaatgatatctaataattttaaattgacttttaagatcacatatcatttaacgaagagaataaaattagaatttttaaaatcggataaacgagtaaaaaattatgcacgttttagttcaaaaaatacaaattttgccactgtaagccatctgtaatttcgattgcaatttggaattccagttgtaaacaatctagaatttcggttcccatttggaattctggatcacggtagaattccctttggaatacgtactaacggctatatttcaccccaatactatataaactcgatttttactcaaaaattcaagttgattgagcatatatttcataccaaacctattcaagtgattttatgagctcccaagtcgaaaatcttacaaaatatttttcacacaatttgagccaaaatttgtatttatttctttaagtgtgcttactaatcgctctatcatcatacatctagaatgagtttgcttgtaattcctaatacatttccaaattgcgattgaggtgaggttggcactgatattgtaaacaatccagttagagtgagattgtcactcactacaacatataacactaatagcggcggacctctccgccgctattagtatgaaaagtggccgctaaagggtaatagcggcggacctcggccgctattggtccgccgctattgcttggccgctattactagtattagcggccaaaaacatggtccgccgc

SEQ ID NO: 394189 - DNA, 1237 bp, Cannabis indica
ttttttttaaaaaaagagttatgcataagttttgaatagtttgattagaaggtaacgctctataattagttagcgatatttttcaaaagttactacattaaattatatgatacctgatacttaattgcaccagtaacactataaaacctaaaagaatgctcggcacaaataatatcttttaacatatttctctttaaattatttaataatgaatgcaggttcacacttccaagagagcatgtgtttctgtttatccaagcattgtacaaaaaggcattgtatggttttcggccaaatacagatcccaaatacaaaaatattataacaaaacaaaaaccaccttacattgcagaaatggatgatccatcattttctcagttaattgtaaatagagaatttcattatgggtaagattaattttgataattaattttactacattttctactttacattattatctaaactattaatcaaaccataactttgttcttatttcccattacaatttttgatatattttcagatatgaggtgatggttgagaatcttatggaccctgcacatgttccatatgctcatcatggattaatgagaacaaggctgcctggtaattaattataatttattaagagcttaattttggttttggttatgtttttgaattcatattcttttgctaaatatttttcttcacgtttaaatgaatttgaaaagctttgaaaattaagaattaatgatgagatataatgagacctaattacaaattgtgtctatcattatgcatgcagttgcatgaatcaactaaatactcatgcacttaaccaaatctgtctcaagtttttgaatttaagatactcatgagcttatatagtcacatttttcattaattaatttacacatttgaaattgttatctttaacatcattaattaatagaatactattttagatcatgtattttacaaaagttattaaataagactttttgttttattaaataacaaaatgaactttatattttttaaaattgtacaaataagatcttaaactaattttttgtcaaaataaaacttaataataatctaatctagagatgttatgacaaaattggttacattttctatatttattcgtgttagaaattatcttaaagttagttatattaaaaaataaaaattgttaaaagttgagctcagagtcatatttttaccattttaaaaaaatatagagtctatt

SEQ ID NO: 394190 - DNA, 845 bp, Cannabis indica
agagagagagagagcttttgaacttaagagcctagagcttgaagtttagaacttagagtgtctagaacttagaacttgaaacttagagagtttaggtttagtttagtgctctttatataggagagcttacaaaggatggtaggttgatatctcttaaaatgaggagacatcacctatttcttatacattaaaataataaataaataacatgttagttaataccccaaaaataggtaaataactgacgttgatctcctattttcgtgggttgttgaaactaaattcgtaactggaagtgttatacaacttgaaagctacagaggcacaaaaagtacctgccagtagagaggatggccaacctatgttggcaatagggtcggtcaggaatggtctggcaagaatccttttgttggccagtttgttgtctctttgtctcgcttaagtagttgaactcctcgtcaactggtatgttgtgcatagtgacttggccttcttgctgacaagctgtactccacgtggcatcattcttacctatgtgaatataccatgtcatgtgggtaaaaattaagataatattttatgaaaatgatttttaaagagcatatattatgaagaaaaaaatttgaatataatctatccagttataaaaacaaattagaaaaaagggcatatcaaatagagaaaaagttatttatcaaaaaataataaagaaaaagaaaaagtatatgaaaaaaaaagtacaacgaaacaagattggaaatagtgtgaatattagttctgtgcaatacaattaaaatcaagagattttttctattatagaccaaaaatagatgaaatttacattt

SEQ ID NO: 394191 - DNA, 943 bp, Cannabis indica
tttttttttttttttgtcagtttgtttagttttattgctagttttcctgcactttatgtccatatttcttaaagacaatattctcggatgtcgggatacgtttgcacaatcctaagactagccccgtgaaccctacaaggatgcaagtgtgcatgccttagtgggagacccgtgtgcgagctcacgtggaggtccaatgcaaaccaagcttggagtatacgtgtgtatgtgcaggtatatgtgggagtagtgagatgtgtgtgcgagtatatgagggagtggtaagacgtgtgtacgagtatatggaggagtgatgagacgtgtgtacgagtatatgagggagtggtgagacgtgtatgggagagtatatgggggagtggtgagacatgtgtgcgagtgtatgggggctcgcatgcgagccgtgtgtgtgtaatgtggggagtgttgtgtgtgtattaagtgttgggggctcgcatgtgagcccatggggggtctcgcattcgagccactacatgtgaacgtacatcaccaaggcgtgtaagaagaaagcgttcaacaacaccttctgagaactctgaaagaaaggaggtacgagtagcggcaacaacagacttacgagatctgaggacccgaccaagggtacactacaaccactctcttgcgacctgtaatcagagaccacacactgtaaccactctcctataacctacaatcggggaccgcttccctgtaatcagggaccacatgcttgcaactagggaccacatacctgtaactaaggatcactctcttgcagtcggggaccagctgataccaaataagggtacgaggtgtcagaccacctccaacacctgccacagcagcgtgaaagcaacgttttgtccccatgggaccactttgtacaccaggccattagagcctataaattgttgggttttgtgcc

SEQ ID NO: 394192 - DNA, 688 bp, Cannabis indica
ttattatttttgaaaaatatttatattttatatgtttacattttttttagtaaattagtattgttttcattaaattttaagttgtgttttggataataattagtattgagtaataaataatgtgtaatattttaatttttatctaatttatgttttatacatttaatttttaatataaactttatatttacattagggagaggatggagattaaaatctgggatattggcaacaaaacgacctgaagtatatactttgtaacacttaaccccataaattaattttttggtggtaagacctgctgaaccatacttctattatgttatttacacttctgttagaaaagtgatgttgagtgccaacgtgtactactcaagtgtacatgtaatgactgcttagctttattttgaaaattcgcacataattaaggatttattgttagaaataggctttaaattattaattttgtaattatgaagatatatttaaattttagatgtattaattatgttacatataaaattttatgtttttcatatttatgctcggtaatggtggaagtcacttagatatgatatagtatcttagaattagtgggcaaatatagttagacatttgaaatattgggagtttttgggagttatggattaggagcattttacccttaagtggttagataacttcatgg

SEQ ID NO: 394193 - DNA, 1533 bp, Cannabis indica
cgtttttagtacaaattattaatattattaatttcatatcattagttgttacaagttaaaaagtttaaattattttgatttcattataaactttaatatttgcaactaccaaattttaacagtataatagaattttggtaattagataaatattatatatgatgtgatttaatctaaaaaaaaattataattaagctttcatatttatttttgcatttttatattttgtactgatttattaaataattttaaattactaaatacaaattaatatttacaaaaatagcatgataaaaatatatattaaaaataaactcttttacaatcaatttaaaagtagacattatatatgttattttttgtattatacatatagttatatatataaaagtatacaatgcttgttatatgagtgcacactatagacacctcaaaaatatagtgaaaatttgtgattcatctcttcttttaagttaactcgatttttttttcttcacaggtgaacacaacacaataaacattgtgtcataaaaagtaaactaatacgatatggtcatgttaatcttacatgatacaattaacatgatatttaaacatattatactcacgtcatgttaatcttacataatataattaacacaatatatatttaaatatgttatatttaaatcatgttaattttacataactcatttatatttttgatgaacttataatctatttgaccacataaattaataaataaaaaataggttcaaattagttatttgaaacctatcataaatttgatgatagattaattaatacattgactaattgcatgctaacatattattgatttgtttattacatcacatattaaaattttccatttgttttaatgtgggacgaatttttttttgaaaatattgtgtttttttttaaaaaaatattgtgtattttttatactgggtactattttaagtttcctccattgttccaatattgtttaattattttattttgtgtttcactattgttttataaaaaataatatatttgaaaaaatttctatgtgatataatttttgtaaaaattaattaaaattttaatatttttatataagtttccctaatatatagtagaaattacgtaaattatgaaatttttttagtgtttatttttttatgacataattaaataatgcatttggtgtatgaattttgtattttgttgaatttttatgtatatttttgtaaataaaaccaattttatcatattttatagttttttcgtatctcactgcaaacaattactttgacaaagctaagtcagtttctcgtccacttctaagttctcatcatcggtgctgatctccaccacccttctctcattcagtaaacatgaagaggaggaatcataacccccaataacatgaggaaaggcctttccctcgatgccttaacaatccaacttcaataataagtactaacttctatgcttttgttccttactttcgatgatacatgcagttttgtgtatatatatatatat

SEQ ID NO: 394194 - DNA, 1556 bp, Cannabis indica
agtatatcatgtaaatttcccgtaaatatatgaaatacattacttgaggcccactgcatgattctggctcgtggggcgaaggtttctgtacagatggggcccacacgttctggataggtgtcacacgcgggtaattccacagcagacaaaaattttagacaagcatcattggacaaagaggatgtattccttttggtagtgtacgcactatcatgttcggatataggagacaaagtctgaattggtgggattgggagtcagagggcagccacggcacccctcaaagggcttctagaggcacctcttggaattcctctccaagtgcatcacaatgttcatccagagggtttcgcttattccgtctttcgaaaagcaagaagccttccgaattcaggtaagtctcatccttggaggcgatgcttctaggcttcaaatgggctcgagcccacctcccgtctagaggaggccttcttatgtggaagggccttggcccaggcaattcgtggttgataattctctagaaattccatgtgtcacccttctgaaaacacgaatgacaccagttttagcttttagctatagctcctccataatttcttcaataaactgtttctttatagtgtaccaaactttttttttatcatatataacttttttaaaaagtaacttttagcttttttaaaagttgtgccaaacggatccattatacctgattagatatataaactctgacaacaaaaactcatgaaatcgattccaactgaatctaaatgcaaaaattaagatatccatgtatgtttcatacatcaaaaacacctaaaatatcgactttaatttcacaaaacttttcggctataaacgtctttttaagaaagtattttagattttcaaggtttttcaaaccgttactatcatagatcaatgaaaaatgaatatggaaagagattaatccgatttttagtctaaatgaacacgtataaaaccattttggattatcgaaactctcggccatgaacacgtactataattttagcccaaccagaaacatcttgttcaatatcaaaatgaatgggcttttgcttagattagtttataatgtataggtaaagagatttctaacatttgtatgcataaaaaaaatatagaaatcatgattaaatttaccaaaaactttcatactttaacgtggtcttcgtactaaaatcatgatttgaaaccacttttaaatttataacggaaaagtgtgtgtataagtgttggtttataaccaacacgatcttttttagtgtcgattatgaaccgatacttatattcagtgacggacctaggatttttactttgtgggggctaatttatcataaaaaaatatttatagctacattataattacttttactaaatttatctaattttgtgggggtttttctactattttggcctataattattaaataaaaaaatttacatttaattttttaaaaggcaatatttttgtttgtggggctatagcccccacatcaatcttaatgggtccgtccctgcttatacttaactgg

SEQ ID NO: 394195 - DNA, 746 bp, Cannabis indica
aaccaagagtcagaattcttataagcacactcgaagaatgatgtgtttctcagatatttagcttttagcaccttacagcacagcgattgatcttcgttcaagagggcccatccccacttagcaagcagatcttgattcatttctagtgactttcggaaacctaggccaccccttgacttcgggaggcaaagtcgatcccaggccttcaaatagaggctcctgttacttgggtcacaaccccaccagaaaatatctaatcataccatcaattttggaagccagcttttttgaaagcttggtattctgcatggtatagaccgacatagctagcccaacatatttgatcaaagtagcacgacccaccttggacagagtttttaagcttaaaggaatgaatgatctcttggaccatcatattattatcatgaatactatgcccaggaacaaaatctgcttgagtagggcatatcaaccgagggagaatcggtctaattctattagcaatgattttgaagatcaccttgtacaccccattacacagagaaatgggtctgaattgagtgactttcttcgagttaagcactttggggataataatattagtcgcatttatgcccttatgcatgttcccagtctagaaaaagtccacaacatcctcacaaaaatccttacccaccgagcaccaataatgcttaaagaaaaggttctattttccttctcacaccaccagggtgatagaatcagat

SEQ ID NO: 394196 - DNA, 944 bp, Cannabis indica
attttgttaatattatgtgaaaaattagattattatttatttttataacactaataattataaaatattataaaactaaaaaaactgaaaaaagttatttatataaaactttgatatttttaccagcacattttgtagatggcgttggtaaaagtaacttttgccaacacattacactattacgccgataaatgtaacttttatcaacgcaattttgtgctgataaaaagtattaaagggaagacttttacacagcttgttatgccagcgcaaatataagttgcactggtaaaaatatgttttgccagtggaaagatgcgctggtaaaactgtgacctttttgccagtacagttcacgagatgcgatagtaaaactaactttttccaacgcattaatgaattgcgctggcaaaaataacatttcttgtagtgaatccctttctatctatggcattagagtttcttttaaagaaaatcttattctacattttagcaaaaaccaaattcttttttattcttttgcggtttggttggaggtaatgaaatacaatgaaattgaaagaaaataattttttatttcactactttgtttggttgcatattaatgtatcattctaatgaaataaccttttcattatttttgtagaatgaccattccattttgaaatgttacccactagttcggtcgctatagggtattagcggcggatttcggccgctattggtctaccgctaatgcgtggccgatactaatagtattagcggccgaaatagggtatgtcactattaatagtattagcggcggagcattagcggcgggaccccgcctctaatgctctttgtcactctcaaaacatgaaactgacaaagagcattagcggcgaagtcccgccgctacaagtaatcaaaaaaaaaatatatttttctaataattttaaatatat

SEQ ID NO: 394197 - DNA, 580 bp, Cannabis indica
ggttgtctacttcatatgtaatccatgttaatgtttctctaccatatatatattgtacagcactgaatccatgtccttaaattaacttgatatctgtggtggacagaagaaaagaaaagtaggactgcaagaatcttattcccagttttgagaggaatttttctgacttgggatttaaggaaattaaactatcgctgttgtgttcatcaaaccccttcaaagctactcataacagattctataactttattagaacttacttgctattagggatgcacacccggtggggaattagcggggagtgttctcccgtccctatctccattaaggattttaatctccattcccgttccatcctcatttattaatccccttcgaggacgcggtggggaagcggtggggaatccccaaatgggacagggaaaggggccagaaatcccctattgtaaaaatgaagtttatttttaaaatttaaatgtaaaaaattattaaattacatgaaagataaaatattacatattatttactattcaatatagtaattattatataaaaatacaacttcaaaaattgtaaaaat

SEQ ID NO: 394198 - DNA, 325 bp, Cannabis indica
atttctatataaatggctatcacgcattcatcgtcttctccatctcctcctgtgaaaaaaccctttttgaagaaacccatttgttatcccaaagttttcacatctgacgtggcacttgcatgtggcatagtcatgctggcctttaacatgacaagggatttttgggaagaagtgtgcctggcagatcccatgtgatgttgatattagtggtttgtagaaggtcttctaggaagaatctggccagaccatcaacatgtcagtcagagaagggaagattgacttaccttgcaagaatttttcacaagtaattgttggaaattatttt

SEQ ID NO: 394199 - DNA, 878 bp, Cannabis indica
gcgaaaattaaaaagggggatcttcatcactgatttatgccttgaatttggggagcattaactgcggagatgcgtgtggatcactaagctccccagccatcgaatgaagctagtgtttttggaggttagatcgtggaccatccatcattttttcacttgtataaatgccccttatgaactcaagttaccacttttcattcgtttcccaattttcggacccttcaaagcttgtaactttctcaacactctttgagatcaagaaccaaaatcaaagctaccttttcttcttcaccctggaaggtgctgtcgatttctacattcaccttctattgaggattcgagcgtgagaacttcaacatcattaacttccagtgttcgtgagtttcacgccagaagaggaaaacaggattctagattttgacatagaacttgactcgttgataaccctagcatcttgtctctgagaaaggtgcgatcgacttttccagccaaacctagcaatgactattctaatgctttctacatcaagtatgtcgcttctttagtctatggatcatatttttgggtttgctaattacaagttatttttgcatgttctgttctaagatgcgattagggttttgtctgcgtgatgtcatagcagttagatttgggtattatgaaacatgctatttttagagttcactattaggaatccttaagatcgagtgttttacggcagatatgctggaaaaaatttcccatgcccacttcattgatcttcattctactcttcctcttcatcattcgtgacttcctatctggaatgaattgttaggttttatgccctaaataaaactccatttcaatgtaatctattttattcaacatcaataaag

SEQ ID NO: 394200 - DNA, 677 bp, Cannabis indica
gtcattacacaaaatattttctgatattgacgatacatcaatcacgcgagataagttattggcatatgcccacttcactatattatactattaggtctcaaaattacataatggagaaatcttgataaaaattacaatccaataaaagtttagcagtaaaaatacaattactaatataactattaatctcttactgtggtgacagtccgcgatgatagtttctgagtcactccctacaattacaaaaccatagcccaagcctactgaaatctctaaagcaagaaaacaataaggtgtttcaccgatgagcttatatgaaaaaagaaaattgctgacaactatttacactaacgcacccaaatagttactagccaccgttgaccttaaaaaatttaccaaaataaaaattaacaaaataaataaattttattgtatataagtatggaaaattactacaatgcacccccttaaaactaagatatattgatacacccctactctgttttagtcatccaaaataaattttttaggttccaaattttttactttcatagtcatgtacgtcatagttatttaagtacatcctgcaaaattttaaagtaaattcggaaaagtttactacacgccgaaaactaacgttcaaacagcgtgttgcacccgtgactattttattttta

SEQ ID NO: 394201 - DNA, 770 bp, Cannabis indica
gtatcattctcaagcaaggaaactgatcgcccatgttctcataaaaaatttcatctcctcgcatgaaactcttctccgggaattaattagccctaaatcacaacggtcgtacagtcttcatcgacgagaatcgttactacgaacaatctccatccaacgcttacgatgttcaatacacgacgaaaacgagcgagatcggagatctgatcaccacggcgagggaacagatcaagaacgaaaactgtccagttcaaagtttgctcttctccgattgtaaattagggttctaaaaaaactaaacgtgaacgcaacagtatataatatatgtatgtatatatgtatatacttttctataaaaaaacgtgatagtcactgccttaattgcttagtgaacaaccgtctagcgccgcttttcctcggaatctgactggactaacacccatggtggaacatgctatctttaaagaagattaataagcgtgattcaaatcgggttggttcttgaatcaaagaaatcccatgacactcggtaatattttcaatatttgtgaacaagaagacaaattttagagactaattcagaattcttattaagttttttaatgagaaatgatagtaaatggccccaaatcataggactatgttagtttatgtcctcatttcaaaaaaatatagcaaatgaccctaaatcataagattatgttagtaaatgtccttatttcaaaatcattaatttttttttttagaattagaagcaaattatttaaata

SEQ ID NO: 394202 - DNA, 952 bp, Cannabis indica
caataagaaaatcaaccactacagactggttaaaaatctacagagaaattgattttaaacaaaaattaaaccttcaagtacaatttaaatttcataaaactaattttcctatattcaatttatagattcataaaatgtagtctgtaagttcccaatcaatccaaagcatgtataatccaaaatatgtgtattacttcaatagctaatgtaataactattgcattacagtgtcttctaaaatttcaatcctaaattttttcacaacgattaaagtaaattccctttcatctcgcactacgaaactagaaatattgttttaaattttagtttctaaacagttgcattatagttggatgtcctttttattcatgctccgataattgacataacaataattacaaattgataatgatacaatggtttttatcttatttgcagttatttcatatcgacaatccaacgcaagactctcataaaatacatttataatatggtccgttttttatattttaaattgattgatttaacgttagtttgcaacgttcttacagttgtttcctcacaaaaaaattattaacgtacaattgattgttggtcaaagctaacaaaaacatattagttgcctaatagttgtatatcagttgcctaatagttgtgctgctacaatattattatctaaaaatataaatttttacatataacataattaatacacttagaatttaatgaaatctttgaaattgagatagtataaccctaatacctatttcttaaaaataaggcccgcaatatataataatcacatttaatcatataattaaattaataaattcaaatttccttactaagccatattctaagtatgcagtgttgggttttgtgccctaaataaaacccatttcaatatataatcagatttaattaataaagatcagaaataacattttatgtt

SEQ ID NO: 394203 - DNA, 1582 bp, Cannabis indica
ttctatgtagaattctaattgtgttgcacagaaggatctactactgtggggacttgattgattggccctccttaggggatgttgtaaattttgaaaagatatgggttggctggccataccctgggagagtgtatggtgaagatcagccatgccttgagaccctggccagccattcccaagtacgggagttggcccaagccggccaggcttatgctcggttgttgtgcttggccggccagacttgcattaggcagggtctggccgcctagcactcctccatggctagccagacctgcaaagggtagggtatggccgcccaagatgcttctttagctgaccaaacttgcgttgggtagggtctggccatttgtgactccacggtcgactggtgttggttgtgtgttgattggggatagatcacaccaattgttggagtttggtatatctagatgtctaaagtgatcgatctcacttctcgaatcaccattttgggtgtttccacctactctcggtcctcttcgatccaagatcaatctctgtgcacctcgctccccttggggaggaagtgatgtaccctggtcggccagtggctgtagaatgggggttgctgttgagccagagatccttggccagccccccaaagccgctgattaccgagatctggttgttcacgtcatttgacctttgaggaaaggtctgtcttccctattgtagggaaagatctgccctagttcctaaggaacccgacggtagtcttccttaaattggatacctaaggagatcctagcctcttctatcagttttctgattgaaccgtcttattagatcgctggcctcccggttacggcgatctaattctgcttggtgagatcgaaggatgtactcttggtcatccatccatcttagaaatttgcgtctctaaaattagcaatgcatggttcttcagtaaggcctgcatggcctacagcttccctgagtcaagccaactcaaggtcttttcctaggtctaggtgaggctcgccaattgctggctcacccactcccgggcctgtctctctatcgtagaactggagttgaggtccagttgttgttccagggggttgtttcccctgggcccttcctttagtgggaggcgcaaacggtgggtctactcttggaggtgtgggtctgccacttggatccatcggggtgctcgtgtcaggttggccaggtgtggtggccagacttgttgcgcctgttgtggtgacaagatttaccacatctgtagtattcatggggattctagttctgactagaacctgagtgcctagatctgcgatttgtgggtcttaagaaagacccgaagatgcagaggtgtgacaggagttcttcttgtgtttactatggcgtttgatcagatcatgatatccactctctcaatgaaagcaccaaactgttggcctcaaaaagtgatcaaccgacagcaaggtcgtgcaaatctgatgcttgccacgtgtgtgcataaataagaatgaaaagcaatagacaataggatttgttatagaggttcgaccccattatgataacgagtaatgacctactc

SEQ ID NO: 394204 - DNA, 1096 bp, Cannabis indica
tctaagaaagaaggttggatgccaattgccaagacttacaaaactaccgaagtaaatcgaaatctatttaatcataagctttttccatatttagcttgatcatcgtgttgcctttcttaccacacttattatctatggagtgaattctttttttcgcaaccagtgagggatccaacactaaaattgtggggggcatactttttttattttgtgaaaagggagggtgcaaaaagtaaactaaatattaaaactaaagatgttgttactaagatttaaacacttttataaatgtgttgagatagcttaaccaacatgtcaaagctattattatgtttgtttttatcattattaattacatatatatgttcattcaaaaaaaaaattacacatatatatatgttataattaatcaaaatacatatatatttttttcgatttttttttgggagtgattgcctcctcttgcctttatgttgatctacccatgctcgcaaccatattgtatatattctactatgtatcttccatgaacagaagttgtttgcataggggataaaaggattgagagaacataaaaaagtctttttttgtaattccccataataatatgttgttatgttctaagtttttgacactccaatatgcattttagcaatgttagtgaatatgtgcacaaattttgtagtgggagacatacaaataacatatctacatagggtttcatcttgttttcctttttgtaattgaaatagtagaaatattatttagttaaactattatctatttatatttgttataggttttgttaatcaaagaataatgtgtacttggtggttatgacttatgagtgcatcaaaatgagaggtgggtttagatttagagcaaaagatatatgtgtggaaaagcaatattgggaaatgatcaattattaacccttttttaagaccaaaaagataagctttatcttgcttgagtgagtggagtggattaattaattaaaggctaattaggatttttgccctctgaactttgacatgtaccaaattatgccccctgaacttttaaggtcattgaaaatgccccctgaactattgag

SEQ ID NO: 394205 - DNA, 584 bp, Cannabis indica
taaaaacttaacagcctttgatgtcatttattatttggtcatgtggcatttcaacatgaggtatgtatcacatttagggcatatatatgcatattattaatgaggaattgctatatagttgatattacctaggtttataaaataaatggaactaaatctacacgtggggtgtaaggaggttttagtggaggaagttatagtttaaatgagcaaataatttgaaacacctaaaggaatgaagcttagatgtgtgcatatggggtctaggacgttactttgaaccattctccaagtacgaagaatgagtcttggaggctatatgtcattctatgattattccacttatttattaagtaatttttaaactttaaccttaattaattagtgcgtggtggtatggttaagagtgaagtgtagtttagtatttaaggcctataaatagaggatttgagctcacttctttctcattcacttaaaagataagcttcagataaaatactctcataatctctctctcaatcttattgtgctctctaattaaagctaccatcaatattttcgattaacctattttgttcccttaa

SEQ ID NO: 394206 - DNA, 1425 bp, Cannabis indica
tagtaatcaaagttatcacctggccaaatggactaaacagctgcctgatatcttttttggttgcctcaaaagcaatatttttgacaagcaactttgtggaactcttatccttctccagttttttcggagcctgtccatctttcttggcatgagagagctgcaatgtgagagcgtgtccttccaaaatagttccctacacagaatttcatacgggtgttaagatatgtttccaacttgttatctatgaggaagcaaaatgtgtttcacctgtaaatctcttgccacgcgtgtggccgtctccatggtgtcaaattctataaaaccatagcccattgagacgttcttcccatttttcatatgcttttttacctgcagtaataggatagaaaaatcatcacaaacggacaaaataataaatttggtttggtcatggtaaatattcaggggtatagacggttaccttgacacttaaaattgaccccttcttcatgtgatctataaaatgcttcttcaaactctcctcagttgtcttgaaattcagattcttaacaaagagagatcgtgactgaaaaatgtgaccatgaaatgaccgaataagcaaacagttgattacagaaattccacagccatacaaattgtactaataacaaaatgtcatatttttcaagtacttggtttagcttgaattacaggctagttaatattcattaacattgaaaggaaatttgaacagctttgataacaaaatatgaaataaatggagtaataatataaataccaccaaacccaccaaattttagtgaccaaaggaatgagacaaactaattataaatttggtaaggcaaaagatcttcataaataaatttacatggtccaattaagtcaaggattggggtagtgtgcgcaccgcggtgcgagtgtggtggggaggaataagaatagaagccagggaaagagtgagggatctactctgacaaacatgatacatccaagttgaaagcttcatgaattggggccgggtgtgtctgtgtgtttgtggtggggacggggataaagagtggccagggaataagagaagagagcaagggaaagagtgtatgaatacaagaatttgctactaatcgtgtctaatgtcaaatgaagaggtgaaagagttgtgagccccacattttgacttagacccaagaagaatgatgagacttatataacaaacatatttccagaataaagagaagaaaaaaaaatgcaaaaaatattgaagtcacctcacctcaactctatcaggatcagcatccacatctgatactccctctaaatgttgctctaagatagccctcttgacatcacgttcaccaacaacctcactagtcttttcatctccctcgggtgttggaatttgactaagaatattagcaggagcccatt

SEQ ID NO: 394207 - DNA, 644 bp, Cannabis indica
tattggtcaaattgtacttttgttgatagcaatgtccatactgctattaacaaagatataatggtcgatttggctattctattttaatgaagttctctcttctcattcaaaaaaaaaaaaattacaagtaatatttgaatccttgaatagtgtaaaaggtttcaccaaatagttgttgtggtttggcttatgagttcgtaactatcgagtgaagaattacatatacatatattatagcattctctttaaattctcgtatttaattatgtaatgcttgcaataaaaataaagagataattgcgacaaaaatccctaaaaacttagagttgttacagattaatcctcaaccttaaaaatttgcagtaatagtccccaaggtcaccatttttgtaagtacgtaggtacccaattaacagttccatttgttctttttaaatataccatgtgttaaaagtttattggtccacatcataaatattatttaaaaataaaataaaaattctttcttttattttcttattttctttcttcttcttcttatttttctctcgcttaatgcccatccctaactgtttcaactagttaccaaaaatctaccaccaccaccaccctccagccatgatatgttcatcgacctttctcca

SEQ ID NO: 394208 - DNA, 755 bp, Cannabis indica
gactcaggtaaagggtgtttagttgcaagatatgactttggttttcttattccactcagggatcgggtttgcatagggtgagttcttgtgactgtgtttgttggttctagaataggtgatggatctggtatttggtttggtgaattttgggatagggaaagagatgatgggagttgatcacttgtatgatggtgaggtggtaagataggagcaggtggcacaattcgggttgaggatgtggtgacaggttggcatacagctgtcgggtggggaaatgtggaagtatgtggtggtagtgatgactcagtattgaccatggggattatggtgggtggaaaatttgccataggaggatcaataagagaaatattagtgtcacatacattctggtttgtagaaaaggaagtagaaggaaaattagacaaaagatcagtagttacctgatgtggagatgaagtactttttgctgggaaatgttgttcattgaacactacattccttgcaatatataatctgccttcattggattcacagagatagcctttatgatgtgaagagtaaccaaaaaatagacattgttgtgatctaaagtccaatttgtgattgttgtatggtctcagatggggaaagcaggcacaaccaaaggatttcagaatattatagtcaggttggctttggtaaagtgtttcataaggtgataggtattgtaggacccttgtaggcattctatttattgtaaagacagctgagctaaa

SEQ ID NO: 394209 - DNA, 642 bp, Cannabis indica
ttttaaaacaacgtcacatttaatcatttatattattaattagtcattgaaccattaagataaaattaaattttaaattaaactaatagaataaactttaaaaataaaaattttaatacaattaatataccttaaaattttaaattgtaatacaaaaattaaattttaaaataacttttaaaaaatctagaatagaaatacgatcacgagtattgttcgagagagaaaagagtgggtgactctatcttctccgatcacgggtatcgttcaaagttccatcttctttgactgcgggtatcgttcaaagttccatcttctctgaccacggccatcgatcgacggagtaggttgagaaggatagggctatgggtatgtgattgtaaaccactacaagaagtcgcggttcgttcatcaaagacggtgaagaactcaggtcgaaggttcaagtgctactgtagattcaaggtttgaattgttgccccatgttttcttctttttcgttgtccaatcgttttagatataaattttgtatctttgatattaatccatatgaataaacacgattttaaaattttcacccaatttctcatcaagaaaaagttttattttcaaatcaccccctttgatgtgaaaaaaaaaaaa

SEQ ID NO: 394210 - DNA, 602 bp, Cannabis indica
taaatatgatcaattgggatgattaatatattaaaatacatacttcatcacacaaaaagtaagccacactttaccctccttgtatttgtatatatataattatatatcgctcaatattgttataaatcggttgacttgtcaatgatattgttaactcaattaggtcagtttctagtgtttaagtcctatcaattcattcatatttatatttgccacgatgatatattaggatgagtttatccattatactgtgcgtcattgtccatttttgtagtttggaaagagagagagaacaaatttatagccattcaatttgtaatgttggtgtacataggctagctactacaaaaccctggccttgttaatttgttattgttataatatgaattttctttattttgagaaagaaagaagaagcaaatttattgtataatagcattagtatgcaaatgtaacgacttttattacatttgcagctaaatataaggtcgaatatatgaatgttatattattttataatataacaagtatagattaaaatatatggtaaataaaggtgtaacttatacttttgtaatttaccactacaaaaaactgttact

SEQ ID NO: 394211 - DNA, 594 bp, Cannabis indica
aaaaaaaaactctaaaaaaataattaaagaaaatatataaatgtaaaaatttccttgtgaaaagtataatgtaaaatttagaaaaaatttagtatttggtgtaaatttctcattattttttttttgaaatttgtgtataaatctattgtgtaatatttataataaaaacttgatatttttttgtgaatatttcacatttgggtttgttgtttattttggtttgatttttgttcaagttttttttttttgggtgtcttttggatgtgaaaaataaattgtggtgctagtagtgggtggtgggtggtggtgaatgaagaataataaaatttagaagaaaaaaaaagagcacaagaagtagaaacagaagaagaataacaataaactataaagtgtaataaaagaaaaaaaaatatatttattctttagtgtatgagaattttttttaatttaaaaatatttttaaaataaatatattacatggagcaatgtaagtgtgccatgtctatataagtgtacacataagcattctaacggtcaagttattttgtgagagatgtgtctgttaggatttataaaacacttaagaaatatata

SEQ ID NO: 394212 - DNA, 1642 bp, Cannabis indica
tagaaggccattgagtatcgaagtaaagctcaaatcattcactgggcttgggctcaatctgaatctagtctggcctttcgcgaccaagaaaacttaggcccaaattggtatagtaattatctttcgaaaaagaagaatagagttagatatttttttttattttcataattttttattaataaaccacatcaacgtaaatagttttcgaacaactatattttattgtatacttaaatatctttttatttattttttatgtttttacatgtaataaatataatttaataatactataaaatattttaatattatttttattgaattcatgtaaatttttatttttatagaaaatgataaataaaaaaaaaatcataacataaatttttatatatttataattacaatgaattaaatcataatataaatattattataatgaaaattttattaattcacatcactttaacatttataatttattaaaaacttagcataaatttttgcacaactgcaggtatattttcttacatcacaactataactgtttttttccataacacaactgtatctagggttgtttttttatatgttagacaattataattcaatatttttatttttatgtaggagtgtatgctgtgattataattttttatcttataatttttttctaaaaattttatatgattgattgtgtaaaaaaatatgatttaaaaattagttgcttgtgtattatatatataaatgggtgcattcttaatgggtattacccatgaatgggtaatattaaaaaattttgagtttttatgattaatttctctatttaattaaaaaaatttctcatttttacattatatgggctgagattggtccatcagttgaaaaaaataataataaaaaaaaaggtttttgggcaaaaaaaagtgataaaaaagttgaatttgacttaaatatttgtttatataaacatattattgatagtgtaaaaagatgtattatttgatattttcttaattaagtagctaaattaagcatagaaattcaaaattctcttttattattcgctatcggaccaaaatctgatggtttaatatttttaaaattaatatttattgttaaatttgtttattacccattaatgggtaatacccattaagaagtattaatgggtaatacccattaatatataatttgctattataaatttaatttcaatgctatattttctttttttttttttttttttggtaaagaaatggaaaaacaaaattgatttgatggtgtttaacttaatactcctccaaaaagagtgtttgggtacactattatttgtttcgacatttatgatggctatttagtttttttttttttaacttatcgtttacattataattgtttgtgattacttataaatttttagattattctaaataatttatagtagtgttaaaaataaagttttaataattatgtactatgggtataaaaaaataattatggatgtaataatttatttgaattttatttataagattgtaaattattcaaaaaataaaataaaatttataaaagtggttgcatattactaaaaatatgaataattatgaaaaaaataaattaaaaaataagaaaacttacaata

SEQ ID NO: 394213 - DNA, 1770 bp, Cannabis indica
ttttacatttctagctattttacatggaaaatttgagtttgcatgcataaatcccacacaacaaaacaatctccccataatacacagtagaaatttatgttattacttccccttttaccatagatagccctctcattatcttcataacctaacttcccctctctttctcttctcatttcctctccctctctctttctaccagccaccaccaccaccatttctaaaaccgctgccactaccaccatctagagcaaccaccaccaccaccaccaccaccgtcgagagcagccaccaccactatttactgaaaaaaaactattgatggagttggttatttatatgatgcaattaatttttaacagatatacacatttgtacttgtgttttgttaattatttgcctaagaattggatttcaaaatttttgtattttttttcttcttgtagttgagttttttgctatattttgcgatagtagactaaatttgaggttagggatgatattttgtgatgattttgtattgtttgagtaaaaaattaaacatttttatattttgtgacattttgcaatatttgactaaaaaattaaatctttgcatactttgcaacgttttgcgatgatttggtgatgaaattgcgatgtgtgactaaaaaatgcaaatcacattgtgaaacatcacaaaatcatcactaatcacacttaagatttcagcttttagtcacacatcacaaatacatcataaaaattatcgcaaaacgttaaaaaatgcaaaaggtttaattttcttagtaagcatctcaaaacttcatcctaatatgcgattcggtctaccatcgcagaatatcacaaaaaattagaaaactagaaaaaaaaaacgtaagaaatttaaaatccaatttttgagcaaaaatcaataaaatacaagcacaaatgtgtacatctattaaaaaataaattacatacatataaataaccaactccaacaatattttttagcaaaccacttgcccataattttttggcaaatggtgatagtggtgttggttgctcttggtggtggtggcagcagttttggcaaatggtggtggtcatggcgggtagaaagagagagaaggaagaagtaagggagaaaggaaagttaggttagaaaaataatgagatgtttttttggaaacatgttaaaagattatacaaacgtcatgatagaaggaaagttttctagccaaacaagttgttcatccatccgaaaagcatgtactgttaatctatgtgcagtcgtatcggccgttcgtcgtgcatgaattatggatactcttagaaatctaaaaaacaaacttgcaataaccagaggtatatttttgatataagaggaaagaataacataaatttctaatatgtattatgggtggtgtattttgcaaggctcaagaaaaaggagtgccaaaggacaatattattgaaaacgagggggtaaatcgtaaattaagaaaaataaagaaagaaatagtggacatggcgcgagacaagtggctaaaccaaatccatttcttcagaacgcaaaacgaatgaataggtttcgtttcaagtttcactgcttcagtacaatcagactgatcgagtcgaggtttcgaaatctcagagcttgagaatcatatcatcaatggctgccattcccggagtttctttcgctttctcttccaaaccttgtggaaaaagaagacccttatctgcttccttacctttctcccattctctatctcttcttagtac

SEQ ID NO: 394214 - DNA, 899 bp, Cannabis indica
tatctcttggggaacagcagagtcagactttgactacgagcccaaatcttcttaaccatgaccaacccaaaagggcttctctaccgtagatgtgacctaatgacggttgatccaacggttgacaactcatgcagggtcttacgatctgagagatttagagatattctaatttgggtggtcggcaaaatctggttggtgcaaacttaggggcccatatcattttcccaatcccacccatttttcatttttcaatattaataatttaagtgcccgaatttcttagggacccattagccaatgtggtaggtgtttaggcccatcaaacccttccttgaccaatttcaaatttcaactccttatcaagaaataaataaatataacaaattgttaaataaaaagataatgcattaacctcacattcttaaattgaaaatagttaataattatgaaaagttgtataattcatattctttagtcaaaaaaagaaaacgctggtgccaatgtgtcctgcactatattgtcctcaatttaattgtatagttcaactattttcatataatttccctcttttttcccttaaattttcttacagatattatcatataaattaatagtggagaaattctatattggtaccttagagatgcttattgtcttctgcacttgttaaaaagcaatatgattatcctttattttcattttttttttctttttttgttgaaattgtaggagctatatactcaagagagactagaatataggccatcatcattactttctctattagtgcatttttttaaaaagcattgctattgagtattattgtatctaacatattctataggtgacgtcacactttaaaaattattttgtaacgccctaatgctaaggcacgctac

SEQ ID NO: 394215 - DNA, 702 bp, Cannabis indica
atttaataatttattatttttaagagtcttattatttattggattataattcatgtattttattttagtgcataaaaatatttataaaatttaaattaatttaagtgagtcatttatatatatatatattagattacatataaatagttagcaccatcaagaaaagaatatcggtcattaaatcactatatattaagccttgtcattgtacacgtttgcttgtgctattggctgaccccctctaaaattcaattcttactccgtccctgattggatcaaaatttaatagtttaatatttttaaaattaatatttataattaaatcgtttagtaaccatcgtataatacctattgaaaagtgtttaatatacatatcacaacaaactgacaaaaagttatggcaatgtaattgtaattggctaaaacatggatgtttattaataggttggctaaattggaaagatcttattaatacaatccaaaaaaaaaagtaaaaagacgaaagagaaaaacacactaatatgactagtgtgatgcatgattaggaacttattttataacttcaaattttttaggatcttaaattaatgaaataattcgtaaaatgaattttttatcaattttttttaaaataatatatgttgctatttatcgtctaattttgataattatttgtaggcttgttatcctaatttttgcact

SEQ ID NO: 394216 - DNA, 1255 bp, Cannabis indica
cagatcaggagcatacaagcttcttgatagacttaggcctgtattactacatagtcacgccctttgggctgaagaatgacggggccacatatcagaggcttatgaataaaatgtttaaagatcttatcggccacaacatggtggtctatgtggacgacatgcttgttaagtccaaaaaggctcggggcatgtggaggacctagaagaatgcttaaacatcctctgcaactacaacatgaagctcaaccccctcaaatgttattttaaagcaaacccagacaagatccaagcccttttggacatgaagtcacccacaaccatcaacgaagtacaaagccaaataggacgcattgctacactaagcagatttgtgtctaagtctacttataaatgtgtatccttcttcaacattcttagacgccacaaaaaatttgagtggacaaaggaatgtgaaactacattccacgtgttaaagaaacaatttgcttagccactagtgttgcccaaacccttagacaatgaagaactatgcgtgtacttagcagtcacagagcatgctgtgagtgctatcctcacaagagaagaaggcggtgtacaacaacctgtatactacattagtaaaagactaatcgatgttgaaagtaagtaccgactcatggagaaactgacctgcagcttgctcttggcttccagaaactaaggccatacttctaggaacaccctataaaggtgtacaccgatcaaccattgcggtaggcttaacaaaacctaaagcatcaagctgaccactcaagtgaaccactaagactcgccaatataaggccacctgtcaatcgagcatggccaacaaaggccaagctcttgctaacttcatggctaatcatagaagcatatcccccctaatctcttaaagtttaggagaaaagaaggagccagagaagaagtgagagtagagtaaaacaactcaacccaaaaggtgcattgaacacctgcccgatgcaggcatggcccctagggcacctgaggggcaatggatgcataaggcaacaaggacactttcaaagcttctaacaacgaggcttagcatgaaactccaaatgctagcctcaagctagcacacgaagcgcgggctgaacaactagacatacaccatgactctcaactaatcgaaggttatttcctaggtgaatatacagcgcaatacaagatgatgatggcctactcatttcaatataatcatatttacttattaata

SEQ ID NO: 394217 - DNA, 848 bp, Cannabis indica
ttgtctagacaataacttttcaattaggtgaagcctttgaccaacacttgtcctcattcacacgaaatccatcacagcaactgtacgccacccaatggggaagtttcctactaaccaaccgtcagatcgtcatgttgtagtaccagcccttacagtgtgttaagtatgaagccctaggtgggtgaagggtatactgtacccacatgtatgcctataaataaataattttttatgtacaagggggcaaacaattttatacaaatgaaaactctgctaaaattcctactagctttctctttggtcaagagaaacaaagggaatgcagagttagggtttatattgtaaacacttgtattattcaaacactcgtttgtaaggcaaatataactaactcgtggactagagattgttaacgcctgaaccacataaaaatcacttgtctattatttattattttatatatttcttaagctatgatttatttgtttcaaaaatatcagtaaatattttggtgctttcattgaaagctgaagaaagtttgctagctgtcttaccacctcaaccatggtgaacacttgaaataatgtaagaaagaaaactcatctgaataatgttatggaggagacagactcccttgctcccggtctcaaattaggtggtgtaagagaagaaggtgcaaccaatgctgagagtcagggagggaacgttgaaaacttgtatgatagttttgatgataaccaaaaccctagagatagggaagggtaggatgacgactatggctacttgaaggacgggtattacaaagatggttactactatgaccatgacccaaactgttgggttttatg

SEQ ID NO: 394218 - DNA, 748 bp, Cannabis indica
gaacctgtaccacgaacccggacgcaaacttgaactcagaccaaaaacttgaacttggacccagacctagacttggactcgtaccttggattcggacctgaacctgacccaaactcaaccccaacccagaccccgaccccgaccccgaccaagacccaaccccgaaccctgacccagaccccgaaccccgactcgaacccaaactttggactcggatcccgaacctcgactcggacctgaaccttgaactcggacactactacaaaaaagagtattcgcgacagttttaaaaacgcttgttttagggaaccgtcactaaaaaaattaagtgagtgttgaaaactgtcgggaaaaataggatatattctcgacaatttaaactgtcggaaggtataggcgacattttttaaacgtgtctcaaaagggaatggcctacggttttaaaccgtaggcaattctcatgcttcaattttacgcgtttcgaatctgaaatgtcatttcccacatcttaaatttcaaatttttactttcctatttcatttccctccttttaagatatatccccccctccccccaaaaaaatatcatttctaatttttcaaagtttttctcctttgcgaccacaagccacgtcggccgtccgtctcctttactgtctctcactctgtctttcctccgctctcttacggtagcataaaggtaagcacaacattcttttttttttgttgtttaaatttctattagtcat

SEQ ID NO: 394219 - DNA, 979 bp, Cannabis indica
cgagggcatgatttagtacatgtcaaagttcggagaaaatttgactaattaaccttttactaatgtgacgattgtttatgtactaaaccgtctctcacgaactttattatctactaaatcatactaactgaactttaatatgtaccaaattgtgtccccttaaattttcatccacgtttagattttctttagtaaaattagacaaacgtttttaaatccaacaatctcaataattcgaaaatagttttaatgacctaaaaagtttaggggaaaaaaaatctacattagccttaatttttatatgacaatttatatcatagctatcaaagattttttttaacttattgaaaataatgttcaaactatttgtgaattataattttgtattgtagccctgtttgaccgagtttatggttttttttacttttagctttcaaagctcttcatgagaaatctactaaaattgttttttgttaaaacagttttttaaagttaaaagctgaaactctttagttatccaaccattaaaattatttttaaaagctcaactaactagggtctgtaaaaattattttaaattttttaaaatttgtagaatattttatctaattataatacatattatcatataaaaaaatgagattttaactatttaaatataaaaaacacgaagacatatattgagacaactaattttaaggttgtatagcactatagaagcaccctgtataataagaaatactgctaaaagttgaattaaataccatattttatatgatttaatataatcacttttagaataaaaaactatataaacactaaattttgaatttttaagcgatataaatctaataattttttagttatataaataactaatgtttgtaaaattataatttttgtttaattttagggaaatttacaaaaatactggaatttgagttaacttttacaaaaatactgtcacacggaaatcttt

SEQ ID NO: 394220 - DNA, 984 bp, Cannabis indica
gtgcatacaaatattttattgaatgcttgtactcatccaactaagtacgcaaacggtggcacacttggttgttctagacatatagttactttacttttcttgtagatgtagatcatttaacatttacaatcacataacaaatcagcctgatagacctatcgagtggataactcttatatgtctagaatagccagacaataaataatgtgcatactacgccataaaatttattgaaagtttcatgactgtaagagatccaataccataattaacacaaccggtaaaataattaataagtattataataaatattattctttattaaatggcatataataatagatcttagttgtttatctttattttacaaggtaagtttcccatatcgtacaaataaatgttatcgtgatcgatggattctttacgtgaaagaaaaagcaaagcgacaacgacttccatgttgatcagtgtatatatctcaatatattgttattatatagatttataaataagtttagataattattagtactagtttattgattgttactagataaatttgtaaaaaaaaaatagattatattagtgttagtttaattattattactatataaattgtaaataaatttatattattagtattagtttaattatttttattatatagatttgtaaaaaatttaaaaattaatgtagggaaaaaatggtagaaaatttgtatttctccctattttctaatgtaatgactaaaaaaccgttgctaaaaataccttttaaattaaaaatcgtcagatgtactatatgttggaatttattttaccaagatctagatttactaatatgcagggccggccctgaaacaaagtgggccacatgaattttttttttgggcccttatgttagaaaaatatggtatttttcaaaatcagtaaaaaaaatatgtataattttaaaagaaaaaaaaaatttgggcccctgggctgg

SEQ ID NO: 394221 - DNA, 797 bp, Cannabis indica
gactgtagcgattctctctgaactgccatctttctaggctattttcccggctgtgatctagcctaggggttcacatgcttagggtttgtataaatcgtcattttacctacttcttttctttgtgctattgctgtggctagggtatcttgcacccgatgtatggcaacaagaattttttatttctatcctgccagcatctggagagggcctcttcccagtggttaggggacccccattccattttttattcagggtttaatgtggggggttaattgatgggttccctcttatttttcaaatgagtgaagttctcaaggaccttaacaattacgatttttatgggtttgacctagaaatcctcgaacttctttttggagacatatgttgaattctaaagtacaatgccactcttgttggcacatctgccccagctatattggctgcacaagttatccctttggaggtggtgagcagggttccagtgccttacaaaaaatacacttattgttctaatggttgggaagccgatgagctgctttcatccctgacgtacgcccaccaactggagaagatagtcttcgagaacgtcatcaagcctactggttccagagtatatcattgcctccctagggacaacaaaacccccaatcacaactataatggttttagggcatcaaaccagactcatctcatgtcaagagccatgctgccactccaagactacttcattcaattttttagtttttgttggactagctccataccaattaattccacaagcttatcgcctgctttca

SEQ ID NO: 394222 - DNA, 825 bp, Cannabis indica
aatcaattaaaattcacagtagtaattttatcatttttaaaacttttcactaagttggtgaaattaagaaaatatgtaaaataaatatctaattattaattatatattttgttgtcaaattaataataaatatttaaatattttttatttaaataattctctaaatataatcatttaattaaaactagtctttcaatactaaaaacttaattgattataacaataaaactatgtcagagttttaagttcatttggacttaagtgaacaaaagagaaaatttaagcccaatagtcatctagttggatggcaagaaaattattttcttatttgtatttgtatttgtatttttcatttaattaataagagaaaagggctataaaaagaaggctatagacgagcttttcaacaaatcaattttttagtctaacatgttattttgacatgtggaaataataataataatcgactaaatttgaataataccaaataatcaccatttaacgtttcatcttatctttgaacgattatttatcgaatcgtctttctgttcgatgcttgtccttcttacaaataacgtagatgaattattcttctcgtaaagaattatcccaaatgaggtttcggataatttttgtctaatacttataggaaaacttttccaagatactttccaagccaatgcctggagaagtcttgtcagcctacctcgcagtgtccgaatacgcgattagttcagtactaatctgcgaagaccaaagtagacaatatttggtgtactatgtgagcaagcatctcctgtgtaatgaccgctctagtaatgtgga

SEQ ID NO: 394223 - DNA, 1398 bp, Cannabis indica
acggaccattcccactcgaccaccgatgaacccatcccacggaccgaactctctttggatcgttttttttttcgtcggatgtgatttgggaaaaatttgggtttgattttatcgggcccaatgcaggcccgacaccgatctgatggtattacagaaaaattaagaaagacaaagatccgatgggcccgatagtaggtctgatgcctatagtaaaaaatagaaattgataagtaaaaaaataaaatttgatatgccccgatgttgggctcgatagggtccgatggctataataggaagttattttaaggatattatgaagtgtatcatatctcagcaatatcaaataatatgaatttatgggaaaatttttaagtatatataaacataaaaaaaatcaaattccctaatatatttatgtgagtgaggcatggcgtatgagtagtagctacctcatcaatacattccaagtgtctacttcacaatgtcacacgttataacctcaaactccatttcacacaccctttgcgccacgtgtacactattattcaacactcatcccaatactcacaattatatattcaactcattatatttatataaacacaatttgactaaaccaaagatgcagcagaagaataagagtgatcatcatatggaagatgataaggccaaatccaataatgatgatggtgatcatggtgatgagcagcagcagcagcagcctcctttaatggctttaaaccatgtgtcaagggtgtgtaaaaatgtggaggagtctatagatttttacaccaaagttttggggtttgttgagattgagagaccacctgcttttgattttgatggagcttggttgtttaattatggagttggtgttcacttggttcaatctaaggatcatgaaaagttgcctcaacctcataatttggatccaatggacaatcacatttcattccaggttaacacaattttatgctattaaaatgagtattttagtacattttcttatcagttttgacagtcttttagtctaatttttataggctaattttgatttttgtgtcaaatttttaaatgtatcaaatcatgtttttctttaaggctgttgaaaattctttagaaattaattaagatggttggatctatggattttttttttctaattttaataagaagagtttaacttgatgaaaatttagagggtatgatttagtatcgttaaagtttgatttggtagatattaaagtataatcaccgaattagttgaattagttaaattgaatgattttggaaatcatgatttaatacataaataattaccgaattagttaaattaaataataaggataaaagtctttataatctaaccattttaatagttttgaaagaatttttaac

SEQ ID NO: 394224 - DNA, 1042 bp, Cannabis indica
cttctacttttaaaattaaagattattcataaatacaacaaaaataataaaaaaaattacaaaaatataatttattagaattttaaatatttttacgattttttttattttatttacagaaaatatggtcattttatgttgtactattattaatttgttgttgatttttgttatctgtatgttatttttttattgttgttttgatgttatttttatgttacttttataattaacatatatactttattatgtatatatattaattataaatatatacatttttgaaaatcaatataatgtagtcttcatatatttgtttgaagttatttattatttactaaaaatgataatttgtgtaaatgtctctagaaaataagtataatgtcttcatatatttgtttgaagtttttttctttttgatgatgaatatatttgtttgaagttatttattatttataatgtaaattaagataaataatccatgagtatcttacaaaaaaaattaatgagtagtgttaaagaaataatccaaaaatttatgttggatttgactataaaattataaaattatgatcatagaacattatacaatgttggtggactatctagtcaatcaaatgttatttatttatttatttattaaaatgtttatatatattttagattgtacaacttgcaatttgatcctataaccatttgagttaatttcgtagttaatcatataattggttggttttcttttcccatcttttcattcacaaatttatagtaattataactaattgacttacttttgattaattacactaacaacgtactcaatatataatttctataagaaaaatcaaattatagttttaatttagaatacatgtacaaccgaacacaagtgaaaaaaaaaaaaatctattagagcctactttttttcttttcgataaaatgaatagaatcacaaatgaaagtcttttctttcaatagaaaaaaaaaagcttccataaaaacatatatttgttataaatattattaattatgtggatgtcca

SEQ ID NO: 394225 - DNA, 654 bp, Cannabis indica
attaaaaaccaatggcttaaagggagacaaaccaggtaaccatgggtcattagcacaaaaaagagaaagaccatctccaacttcccatctcaatcctttagattacagtttcttgctccaaataattccttgtcaagttagtgaagggtaagagccatggccagcctccaaaaatgatgaatttataaagtatctaggcttgagaattcagttcaagaaagatgaaggattggaataaatcctcgaagcatgtttgacaagtaatgcttgattaaaatgaacaaaacttttaaaacttataccaccttccaccttagattttgcaaagagcttttcaagtcttccaatttattcctaatcctgaagaattcgacccccaccaaaatttattcatcattacttcaatttgatgaataagagattcatagagacgaaaacaactcattgcatatgtaggaatgaattgtgccacaacttttaggagaacttcgtttccaccaattgagaataattgttcttgccatgccgaaagaagtttccaaagcttgtctttaatctcaccaaataggattttttatctcttccaaaatacgaaggtagtcctattgggctttatgccctaaatataactctatttcaatgtattctctatca

SEQ ID NO: 394226 - DNA, 1752 bp, Cannabis indica
ctgcacgtgagtgttacaatgtgactatgagggggcgaccccaaccaggggcacatatattggttgtaagtaaagttaatgaagtgggaaacatgggagcaagagaggttcttgaagttgaagagatagaccctcgtgtgggcgatgactggactgacctcgatcccattgaggaacttgaagatgtttttcttagccccaatgatccaaccaaaaccataaaggttgggaagcacctgaacaaggattttaagaaagtcctcatctagctcctctgtgataatcaagaagtgtgtgcatggatgcactccaatatggtgggtatgattctgaacgtagtaacacacgtgctaaactcaaacaaggacacgcatgtcgaatgaaaaaaagaggaggttacttgatgaagccagatctgtagccttgaaagaagaagtcagtgagctcttggccaataacttcattcgtatagttcaaattgagtagtacttggtcaatttattttatttttattccaaatccttactgactattaatatttttgtttagttcaaagtttgaataaaaatatttatttattcaaaaaatagttacatttatattaccaaactcaaaaataagtaaccaaggataataatcaaaccttagttacttgggggtataagggtatagatataactatacttgtttctaatcctacaattttcattaagatttttttttttaaaaaatggtgaattttgtaaaatcacaaatacttaaactaaaagttgtaatggatagagaagggatttaatcacagttacgtgataagcacttcatctagaaaaagaatatcaactctaaaaaattagtaagttgaacatgtgactcgagagagcttgaagaaaaaactcatataattagctatttaactaagaataacttaaaaaaaataaagtgtattcggtacttctataaaaagtgaccatgaaatggaaaacataaagtcatcatgcaaatatataaatagcttgaagtgtaatcaaatgaagcaaagagcacatgcgctcttcataaatatctcagtaggctaaaactctcatggaggagtaccacaaggttggttaggagggaccacaagaagagtgactttagcccgaggtggtacttgctctactacctcgttcaccatcactgaattttccaccaaatgcccaccttgggaggatgaggtgggtgttgttgtgttaggaggaagagaggcctcccgaagttgccttgctctaaacttagaaacttcctcatctctatactcttttgatatgtggaaaagtgtgatatttgggttgtttttccaaagcagttagaattggtcatcaaagagtcgactatacacatcatctcttcgatcagtggttgtttgaagctcctctatttttgtaccaagatcagtggcagtggtctcagactccatcatttttgtttgcaatttttgagtttgttcttgaaggcatccctctccttttcaactctgaagacttcattcatttaatgttgtgcatcaacttcaaagttgttttgctcgatagtctttgtaacaagatctttagttgttgtggcaaggttgttcttaagatttttgttctccacctcaagctctcccaccttggttttcaaggtagccatcttctctcgcaaggtatgatatgtaatacccggaattaagaaatggattagcaaaatcctaactagataattatgtataatgga

SEQ ID NO: 394227 - DNA, 570 bp, Cannabis indica
aaagaaaaaagaaaagaaaaactcagctacagtaaaattaaaagccacgacactagctaactaatatgtaatccaactaatataatctaacagcagcataaataattaaattgattaatgacactgtagctaatttttatttatttatttatttttatttttttgaacgaagctaatttttttttattattattattattttgatagactataggagtttgtcacataaatgaagcattcatttttatttaacatcttaaataccatcattacccttttataataattatgctcacaaataataaaaatcgaggttagataggtttaagctaccaagagtatcttaatgatagtaacttttaaaagtgctatatatcttcatatcattcaaatatattatattttatttttctttcttctacattatttttgacagtttttaaaaatgttataattataatatcatacattattatttatatatatgtataatttttttttctttattaaactattatatatattattttttttattataaaaaaatacatagcatcaatgtcattgtgt

SEQ ID NO: 394228 - DNA, 655 bp, Cannabis indica
cagactcaagacaatacaaaatgtacaaacacagaagaagagacaaacactctttcctctacacaacaaagactctctttcttacaaaatatgagtgaaatacaaagatgtgaaaagagttacaaaacctaccaaccattatgagtatttatacataatatactcatattggacaactcatacacggactagacatgtctacaactcatagaaaactttcttaaaataattcttcattcaacacataattttttgttatgtacctacagaatcgtgagtactaagcgcgagtttccttttatagaaaagaaaacttcccaatcgattttcttcaataattaatacttgatcaaatcttcaataattaatacttgatcaaatcttcaacgaattatgccattttcaattagttgttgttgaactttctttttagactagttgttaatgactgtagacacttgtttaattgtttgagcacagtttcttttttatttgtttatcattctgcttacagaatgactcataactagctttgttagaatttcctatgtttttcagattaaatttttagtgagatatctatttttactaaatttatgtctattttgttagactatttatcttcttaatgaaattctatttccgataaaaaaaa

SEQ ID NO: 394229 - DNA, 1256 bp, Cannabis indica
actgagaccaaagagttggggtgatctttagtgtcggttttttaaaaacaccgtccctcgaactgacaccaaaagtctattttgtagtagtggggccagatcctcaaaagaaaaacaaaccgaaaaaaaattgtctaaacgcccacttagaaagattatgagcgaacaagttacgagagcgagtgatccaaataagaaaatccaacagctccaaagacctccaaaacacacctgccaaacgccaatcaggagccttccgagcattaacaccaagcaccaaagactgagagtccgaggcaatcaccccctggctccaaccacgtgaacgacacaaatttgatgcatgatacaaggcccaggatttagctttcagaggctggtgcgactcaaagttcaaagccaccgcctgggacactaaacattcctattcagacaccacgattccagcagcgacatgcatatccttaaaaggtgcatccacaaataaacctacaacacgacaatactactcggggtctcccacgcaacaagaaggcaagaggcagccatattgactctagcatggacttcactaaaggtaggactgatatgattgtgaaaccacggttccgagcggaccacaactcatcacacaaacaaattccaaaacgattaaactcaccaatttcattcacatgagttccacacaagaaattcgggaataagagccatataaccatatctctaagggagtcgaagctcagggactcacttctaatagaccaatgttggaaacatacaactagaatcatcaccaattctagaattccaattaaccattagaacgcattgcactcatactgtcacaaacttagagagacaaaatatttattctttattgcttttgtacaggaagcttacaatatctactcaatgactaactttaattactaactgtataatatatttataggtgtctaatatggacaagaaactaatggtcataattgtcaagacagttaaggcctaactactttaaaagtgtatattacaaggacacaacaaatagaaccattctcaaccttgacctgtaatatacctagggaagaaaccttagaactttaacccttgttgatgctcgaaacatttagaatttggagacacttagtgaacttaacagtaggaagagattttgtaagcatatttgtgttggaaattattttaccagaatcttagatctactcacaaaacgatgaaataaaaacatataaagttta

SEQ ID NO: 394230 - DNA, 1399 bp, Cannabis indica
aaaaataacatagaaaaattaagggagaattgaaaagaactagttgaagaaatcgatccgggtcgtcacaagctagccgctcttgaagtcttctcctttgtttctagggctccccttatgaataatcatcaaaaaacatgaactcctttctaattgagccaagttttttctttaaaattcgtgaaattataaaattacccaaaaacttgtcaggaaggcttcgtcgagacgaagcattttgcccgtcgcgatggctaaagcatcaacaaaaggagaaaactgtttaccaactcccgtctcccgtcgcaatgggcttcgacagaaaatttctttgtacattttttctcaactttttcatttcttgtcctctattcttgtgaatacttcctttaaacatttgaggacctgaaaccaaaaaatcaagcgtaaaatagcccaaaaactaaaaacaaaaatcgaaaactatccgataatacgacctaaaacttagactaaaattaacctaacaaatttgcatataaccctaacctattatatttatatctcttttttcttaaccacacacgatgctcaaacttctttctcaagcataaatgattctattttctaattttctaagcttttcttcatgcatacatgattattttattcaataattataaatatataatatatgtagattatatattttatgagaacaatttactatttgttcaaataaaaatctatcataatcataagtaatcgaacattagcaatacatgttcaaaacaatattattcttaaccacatatatacctatactcttcgaaaatatatatcttaaaaaaatatactgcaaaaaaaagtgatatggtatatattaaatatttttaatatttagttagagtttctaattctaaaagtggtattaaacacatcaaatgataagttattgtttttttttttttcgtatttttgatgatgtatgattaaggaattgttataatttttattagatcttaaaaatgtgttaataaaaatatttgaacttgaagatggaatctaagattaagattgagatttaggaaagaaaatagtgacaactacaagtgagatataatgattacaataagtgagatacagtaataacaacgtatgagagatactacgatgacaacaaattagaatgaatgagatttaaaaatagtgtattatgagaaagtttgcttatcaattcttattatttctcaataatttatttcatacatgtaatttaaaatttgttaaacatcccctgggaagcgcggtttgtttactagttttataaatagaggtcatattgtttacttgtgagagatatagttgaaatcaattattgttgttagaaccttgtgaggatatgctcatccttagacac

SEQ ID NO: 394231 - DNA, 649 bp, Cannabis indica
tctcattgggagtcttcaatgtcactttctttgtcactatcttcagaagactcataagatacattttccctgttgttcccatgttcctgatcattattggaaacaaaagaagaattttcgtcacttcccccctctcccgagtcatcttgggaagtagggggagagtcttcatcgctactttcttgttcgagatcttcttgagaaatagttatgggaattgtcatcactatatccctgcttgagttcatattgagaaacataagaggagtctgttgtagtgcagatattagttgtttactcacttaaattacacatttatgtttgtgatccataagttacaaaatagttacttttttgaattcttatttatgttacaaaatttagtttataataaattatatgctatacaatttattcaccaaacagtataatatatattattctcttattaacatatatttgtaacattttaatttatattatattgttaaataatataataatgtatataatatacaatactatatatgagagaataatattatatatactagcgtctatatattgagaagaagagaagtgggtatagtgtgcaaaatctttttttggtaatttagatgccaaaatattttttatttatggtgtgatt

SEQ ID NO: 394232 - DNA, 526 bp, Cannabis indica
ccaataaacacccaaaatctttcgtttgattgacatcttcatctgatgcaaccttcggccaaccaccctgcaaccatcgtctgatgcaactaccgcgcaaccacacaataacaaccaccctacaaccatcgtctgattgtgtaagtgatagtgtaagtggtattttagcaattaaaattacataaaaggtataaatgttgtccttaccttatggaagcatttttgtaaataaagcgtcaatttatattttctacgtgataattctttttatttgctcactattttggacaactcgattataatcgactctttattggctcactatccctgatcataagtggctcttctactctactttttggatcggtatttttggtggctatttttattttttggctcactatccctaaatcacgagttgctttgttgactttggttcttggatcagcgaaagtgtttgattgaaaaagtaggaataagtgagtgtatggtaaggtgcatgggattccatctcaaaactatttgg

SEQ ID NO: 394233 - DNA, 856 bp, Cannabis indica
aatttaacatgtgctaattttatcattatttacaattgatggatacaagtttatttttttaacatttctttatagatgattttcgacaaatgtttcataaattttttaacgtgttatgaaatttttatttgatattaatgagaatttggccccaaataacatgtatcatacacaagatcggtcctgagttgaaatatgcaataggcaaaaaaaaaaattggacccttaccataaagataaatagtattttgaaaaattataaaaaaatatgtatattttttaaaagatattttttttatttgggccccttaaatgagtgggccctaaggcctaatccgcctatacctagtatcgaccctgatcatgcatgcacataattttacacaataacccacaataatcataaattttcatccatttgcattatattctttatatctggacaataatacaatttgtattttttttcttttaaaaaaaatataaaataatatagttcatgtataattcacagataatttatattctaaaaagaaaaaattcacttgttcaaagagcacgagaaaatctcaagaacaatattagggtcgtggttagcatgtgggcatcgcaacactcgacctttgagagtctgatagaatcatgaatcagagagcatcagagattccaattcaaagtttggcccccctttttctctactcgctccgtagtgcttgagtagaatcttatatagcttatacaactttgtatttacattgttattaataaatagagcttgttatgaaataatataaaataatataaagtagatgagaagaaagaagaagaagatgaagagagaaagagaaagtgaatg

SEQ ID NO: 394234 - DNA, 780 bp, Cannabis indica
caagtcatggtgatccctactaatctacactcaaggttgtgagtgagtgtttatatatatacatatatattattctcttgttatatatatacatatattatattacatgtgttcttattttcttcttctacatttcttatatataatatatatagtgtatatatattgtatattatattgttgtaacatttatttaatctctttgttggtccttgtattgtattacaataaagttgtaatatcttgattttcttccattgtaataaaatctctaacatttattctctcttataaccactctaactaacttgtcagcttgtatatatatgctcagattcattcaatcattgagaatcaatttcaatatatcactcttcatttagttttcaaatttctctcaacatagtatatcagggtagttttttttttttttcctatttttctgctttcacactaggtcttctccgaccattttcctttcattcatagtttgttcaaagattgcgccactccaaaagcttcaaacctttaatctaacagtggtaggtagaccttttaaaatgagggagagcataattttttttttttttgttaaggtaaaaagagcaaaaataaagttagaaaggaaaaaaaaacaacactctttatgagaattgaaccatcgatctctattttatgtataatctagtttaaccattcccctaaaagtaatattatgtcgataaatatcactttttattacattacaaaaaactgctactttaagtgacaactttttat

SEQ ID NO: 394235 - DNA, 530 bp, Cannabis indica
gggcttttagccggggtgggattcagtaaaagataggagatgatggagtggaattattatgaaaaattgctaactattcgtaaagcgctacctcgtagtattgtttagcaatgttctttgattgtgtaaacattttcatgaggacttttagctggggtgggatttagtgaaaggtaggagatgatggagttgaattattatgaaaactgccaaccatttgtaaggcgcaatcttatgctgttgtttagcaatatgctctttcatcgtgtaaacatttcatgagggcttttagccggggtgggattagtgatggagtggaattgtagtgtgctttgccttgagcttttgagagttttcctggttcctcgaacatgggttatctctttaaattgtcctttcaatttcagcaataatattccatatttaagcctactgtttctcagcttggtgtttctctaagtttggtaactatcataccaatgtttaattcatttaattgggttttaagaaactgcattttgcaatttgga

SEQ ID NO: 394236 - DNA, 1020 bp, Cannabis indica
actctcctttgcgctatcctggtgtacaaagacataatataaaattggattacattgtttctgactctaaaacgcttgtggattatatttgtaatcatgctactcatcatttgcttttaaataggtttgcaacaaacattagaagcttgctgtcttttttccctaatgctactttcaggcacatctctaggcaagaaaatgaggatgctcatcatcttgcaaagtatgcattaggcttagatcaggaagctatctggaaagctcagaatttctctatgtaatttgtatcctgcacttctatcttcatcaatgaaatggatacacttacttaaaaaaaaaaaaaattctaagcttaaacataaagagaaaattgttatcattatgataaataatttctaagtttgtagggtagttggtagctattattgcagtatgtattgtttagtgatagttggcattaaattttttcttttctccaacaaaaaaaaaaaaaaaattaataacaatgtgtcaaagaaaaaaaacacaaatgatgcacttgtctatcatatataaatttataatggtcaattattatgatgataagtagctatagaacgtctaactgccaacgttacactactaaattattgtgtggaatttatatactaaacaacaaaacaataattaattagacttagttggtttttcctagctagggattttgctttagatagagatttgactataattatatatgactttatatcttcatatagaggaatgtgatgcatgtgttttattttatatatacccatcatcacaacaaaggctaaactttgtgatcactttgaaaatgtttcagaaattgatagttttctctgtatttacattatacaattaatcttcatattaaattacaaactttttttatgaacaacaaaatttattaacattttattatgttttcaaaaattaaaaaattatttttaataatcaatttcacatttaattaggaaatgatttatttattattttatt

SEQ ID NO: 394237 - DNA, 746 bp, Cannabis indica
ttgttctagagattttaatgttgcagcccataccttagctaaagtcgcttttattgcgtcctctattactatttggtggccaagttatctaaattgtattcagaatttattagtagcagatgctactcagaaacacattcttgaccccaccttttttgagtttctttactttcggtgttagtggttgattttgttaattctgtttttggcatctttagattgacaaaaatattttataaattgattatttatttttgactaagttgtttattttatttttgtaattttgtatttatattgattgaattatataaggtaggtagcttttctatatatgaaactaaaccataaagggtaagttgattcaacaaatatttatctatccagttatgtatatttgatcctttctaagtttcctaaaatatttgatcagattttttgtgaagaaaactgaagcaaactttccttttctacaaaaggaaagtcgcacttactgctcacgattccataggtatagaaacagaaattcctaggctgattgaagatctattttagggaagtatctagtgagttgtgatcttgttcaaaccgcgtatgagctattaataaggtgtatattgattataaatacaccttatagtagctaggtcttgtatctctttcacctctttgtatttaattcacatcttgtaagaaagagtatctttgttttgtagagaagaatgtgttcgtctctttctctatgt

SEQ ID NO: 394238 - DNA, 1068 bp, Cannabis indica
atgtgttcatattggtttatgtgatttttaatgattggttgtgatattaagaaattttctacaaaagttaatttgatttttgagctaacattattttatttggattgttggttaaaaattaagcaaatttaccttttacaaaacttaatttcaaataaaataaaaaagttataatattttaaagtttttgaaaatttggctaaggtttcccattcttgtgcgcgtagataaagtgattcactcagaccgcctaggccatgctggactgaccagcacattacacatcaacatagcatatgcaaataactaacactcgcgtgtcagccatccaagccctcagcctagattccatgcatctttcctccaacagatgtcttaagcccacgtgcatgtctttggatagacattgttaacttccagcaattgtcattcacgtgtgtcaccatgcacactgtctgagaaatcgtttgcatgcatgcccatgcaaagtcatgtccatctaagacaaccaggtagccaggtccagctaacatcccccaatgttgttccatgcttatgctgctgctccatactgcccctttgttgatgcacttcactcgtatgctgctatcccacaagctaacaatcgagtgatgttgaggtctgtcgagcggacctaagttagggtgtaatgtcctggaaaataaacaatatttaaatagacatattttattaaatatgtaattattttggtaatgaagtaagattatgatcttgcttagggtaattattgagaatttactcaatgaaataaatagtgtaatttattaattaaggagattatattgggatatgtgagtactgagtatatcagtttcgaaataaaatatttttcgggcccagcaattgtggaaatttagcgatgtggttagtaatgtcacgacgttaatggaagaattatttgggaatattccagactaggttagaattttattagaatgtcgggttgatggattagtaaaattaccaaaatgcccttaggttactttagagattatttagctttgagggtaatttaattattcttta

SEQ ID NO: 394239 - DNA, 522 bp, Cannabis indica
agttgactaaaaattaattaaaacaatatttaataccaagattctcttaaaaatttaatatctaaaagagataaaagctaattaactaaaaaaattaaatatattgtacactcatcaaatttacaaaattatataaacgggatataaataattaaaattcaaaatgaattctaataagaaaacattaacttataaaagaataaattataaaatgagacaattaaagtttttaagaaaatattatttgaacaaattaattataataataaatgcaaattaaaaaaaaaatatgctaggaatttaaaccactcaagaaaagtatcctaaaatatatttataaaatcaataatcaaaggtcaaaaagagaaaattatggtaaagagatggttctaaaaaccaaaatttcaaattttctaaaagaataatagaatatctcaacaataaattatagataataccctatagtgaataaaatacttataattatacaaataataaatcagccaactaataaacttagac

SEQ ID NO: 394240 - DNA, 625 bp, Cannabis indica
aaaagtaaccaatttaaaataacagatctaatccggtggagattgaattagatcaaaaacataaaatccgaatttaatagagatcatatgcactaggagtaaaatagtagaaattagattggaacacccaattgaaagcattgaaagcactgttcatttcttataagttttctatttgttaaggtctacgttctcccatagacattggaactattagtgctagtgctagtgctagtgcttgtgaatggagaaccagagcaacacttaaagcttaaaattgtttctgttctgagtcccattgctaagacctctctgcaagccaatcagggaacttgacacaggtttcattccatatatataatctttttttatatatatataaaatcaaactctctattcttgtttatctgaattgttcccttctcttcttttatttgttcacttcaaaataataataatggaaaaagttgagttttcaagtatttaaattcaaaccaatttactaagggctcgtttggaacgccgtattaggtcgtattgtattgtattgtattatattgaattggattatatatcatatttttatataatacaatattaaactttaatttatactaaaatatta

SEQ ID NO: 394241 - DNA, 1354 bp, Cannabis indica
cttaattaaaaaaatatacaaaaaaatatcacttttttatactatatcaaaaatatgttcatataaaaatatttaagtaaaactcaacttttacttattcttttttttttgttaaaaactttttttggtaattttttttccaatcgatggaacaatctcagcccatatgatgtaaaagtgagagattttttctatttagatagaaaagttaagcataaaaacttgtaggaatttattccctaatttaatctacacacagcagtacactaatcagaaaaaccaaggtcaattaagacctttctcacccagtcaaagccccttttgactccctgtagatgaaccaaaaaacgacagcctttaagttctgctacaggtcgttttaatcacacccatgaaaccctaaacatcagaccatatataaatatatcttattttctcaaacacttattcagtaactaaagaaaaccctagccaaacttcaccttgagaaccctagcagagctgtcaccttcttcgttgttcttccctgaagaacatgaagaacagcagtgaacatagcccagaaaaacctactgccccgatcaaataaaccccaaaattgagcctccttctttgttgttcttctttaaagaacacgaagaacacaacaatgaaacccagaaagacctgagatgaataaacaccttaaatcgatttagaacccaacccagaaatcatatacacacataaacacaatattgagaaaatgcagaaaattaaaggaaagaatgcaccagagatttttatagaggttccccaaagaaatctgggtacatcctcttcagctcgcctcttccactatagatcttcaatgatcaaagtttacaattgcagggatttcaaatacacaggtatgaaaatgaaattcccaaatattttacagtgttttctcctctcttttctctttgttttctcacttaaaatcagtactaatttctccctttttcaccttgatcttgcatgaacgatctccttggcttctcggatatctgaaccctaatcctagggttccaaagcttaacctcgctgtaagcttcctccaaagtactcagcctcttctggtgttgatcttctgtgctgatatttgttgtttttgatctggagatatattcggatctgatttgtgtgtcttgctctgttctgatttttttcttttctagttcttctgattttagaatgttgatctatatatgtgttgtaatagtggaaaaaacagagaaaagagttagttacaaagtttattaaactttgtgactaacttgctgatctgtcctaggtatttagaggccaaaggccacctaggatttattttact

SEQ ID NO: 394242 - DNA, 2011 bp, Cannabis indica
ttccaataccaactagaatgtattgaagctgagcatctccaccactcttattccctgatatacacactatgaacccaccttagccataaactctcttgcttatttgagatagcccatatgtacttgcacatggccgctttgttccaatgctccaagttttttattcccaaacctcctgaagttttaggttgacatatattgctccaagcaatggaccccgctccatgaaaaaccgcctgccctttccaaataaaagccctacaaatggcttctgtggatctcaagaccttcttcggtaagatcatcatttggctccagtaggcctgaatagaaattagcacagaattaattagtgtgattcttccaacaaacgagagattcctggaacttgaggttttaattctggatgtcattctttcttctagtaattcacattctttcccgatatctttttcccacaaatgggaatccccaagtaagtgaaaggtagatcttgtttggtgaagctcgagagatgtataatacgatttaccaccacctgctgcatgttactgtaataaattgtagttctagatgcatttggatataaacaagatgcaagggagaatgttttaagttcctgcaacatgtaaagaatactcctgaaatctccatggcaaaacaaaagcacatcatcagcaaatgctaggtgattaagtttaagatcttgacacctatcataaaatttgaaatgctctctttctccaaccttcctcatgagtctagacagatactccatgcccaatacaaacaagaggggagacataggatccccttgtctaattcccctcttagcttcaaagaagccatgtaaggatccattaaacatcaaagaaaatttgggagtagtaacacaattcattaccagttggatgaacttcttaggaaagtttagccctgttagcatctcttccaggaaaccccattcaattgtgtcataggccttttcaagatctagtttgatcatgcatctaggtttattagcctttctagtataatgccttaccaaatcctgacaaatcaaaatattatgccctataaaccttcctttgataaagccaccttgagactgtgaaattatctcaggaaggatgttattgattctagaactcaataacttggttgcaatcttgtaaattacattacaacaagctattggcctaaaatctctaatagaattaggacatttgaccttaggcaccaaggtaattatagtagaatttatctttttaagtatgttacctgactccaagaaagagagaactgctccacatatatcatctccaatcatcacccaattatcttggaaaaagttgctcgagaaaccatcagggccaggggatttgttcacaggaatactgaagacagcctgcttgatctcttctttggaaaagttctctaagaggccttctgcttgtcttggggacaccttgggacctgtgtttactatacaactctccacctgcctcctatgctcaagtctagtaccaagtaaacccctatagaagtctagaaaagcttcagtaataaggtttggttcatgaactctgctgccatcttgtctttctatagaaagaattcgattttgtctcaatctttgtgtaacgccctaatactaaggcatgctacagtgcttttcaattacagtgcaatctttgctaatcaaagaatttttctcgaaaaacgtgtcaaattaaaacttttatattaaataataaactataatataataaaatatttacaagtgtcgggatcccattttcaaacttttaaaagttaatattccaaaatacacatattacaggtcgcacagcgactaccaaaatacaatccccagatgtctcaagatcgaacactccaggttgcgctgcttggacatgaacaatctcatccgagctcaggttcactcctgtttagctttcgcctttcctttacctacacatggaagcaaaactatgagtcgacagactca

SEQ ID NO: 394243 - DNA, 1350 bp, Cannabis indica
aaaaaattcaaaactaaaccaaataataaaattgtaagggtagttcccttacaatcaaaccaaaagtcaagaggatatgttttacacaatcgaccgaattttcaaatatatcttacacatgagcatgattaatagtacatattattgatgcttttaaaatcatctactttggggtattcaggtgggtttggttgattttttaattgaacaaattaactcttctgtgaaattaatttaataattaattaattttcttttcaataggaactaataaacaattttttagttgtttatatatgtgcttagaaactttagtgccttctctttttctcaacgtgatctcacgtgattattttgatttagtccttaattagcggtacacaatgacgagaaaccaacaaaatactaacataattagatacactttcatatataatataagaaaaattattaagagtttacgtgcatgcaatttgtatataaaattaagaacttttgtaaaattaatttctttaattttattgtgttatataaacacgccgatccacttataattcgcccattttaattaattatgcatatttctagctatatagctatactttacctgatatttcttcctaactttcgaatttgtattaaaaattacataagcacacaattaatgtcaactctctctatttttaaaaaaaaaaaaaaaaactaagtactaaaattaatattggataaaccgaaattaaactaatagatgttcgtgaaatatatttattgaatagaactgattcaatccaatatttaatggatgttagatcgattagatgactgaaattaattggatcgaatcaaatgataacatctaacatccaatatataattatattaaatttagataaacttaaaaatatatttttttttaggaaaaatctggtattataaattcaaagaatcatttaaaatacttaatatggtccaataaacgtctttgcagaatataatttagtatataaaggtataatatatattattttatactcatcattattcatgttcccaactatagtacataggagagtttcataacatgataacattctatatatattttccttatcattagttatcaaaatcaagtacatataaatgtacgtatataattcaacaaatgtatattatatatttctattttatataaaatatggttatgtaacagaatttttagtttaacagtattttttcttatttcttacattaattaacataatatcttattagtttatagaatattctttattaattttataatattattatatatggaagaggtttcaatggttacatttttattgtaac

SEQ ID NO: 394244 - DNA, 657 bp, Cannabis indica
ttatatagatatatagatagattcgggttgggttggattacacggctcacataagctccaatccaattctgaccccatataagtcggtccactattttttgtaacatctctattcagcacaatatttttataatcttttcggcccaatttcaggttgagttcgcacttttgagaatcagaaaccagtcaaaaactaattaaagcactaacagacatatgatttcatttctaaaaaactaaagagcataatagcattatgtatagattatttcaaaaatgattattctaaaaaaatgatttattttcccatgagatacaaacaatagattacttacgcagtggacggagtatagaaatggtaatctagctcaggtggaataaccaaagtgtccggactatggactaccgtcgccgagagagaagaccgtgaaaccaagtcggagggagaaccgaagagaaggaaagtcttggaatctgactatactatatatttgagaggtggaatatttgaatttgaaaaatcaagaatttgggccgggctgggctgggcctactaagcccattagcttttttggattggagcgttgaatagctataaataagagcaaattacactcaataccctttttatattgtcctcttttatttttaccttct

SEQ ID NO: 394245 - DNA, 1434 bp, Cannabis indica
ttattaagataattttatataatctgagaaaatataaataagcattgactataagatatctcgccatacagccatttttagataaatgatgtcctaagtatattttttctattgatgacagaaactcttactccaccaccttcgtaaatgataaatatttatttggatcttctagtttatttttatttaagataaaaattgtattatatttagtaaaaagaaaaaattttgtgatatatttaaattaatttttagcgctatattctattcaatatacaatgataaacttttaatgtaaaatttaatatttttattaaaaatataaaaggtaataaattatcattagttttatgtaagtcaataaaaaataatataaataattaataattaatgctatagttaatattaataaaatattaaaaatgatataaaaataaaaataaataaaaattgtatatttatagtgatgtaaattttgtatcataacaaatattaatgtaccaataatttagcatgtgttaaatttatatcattttttaacacactattaaaccataaattttactaaatagattatatattataactttacatcacttttatttgtatctttattgtccaaattataagtgcatatcattattaattatagataaatatggtcttagcaagttgttgtttgttttgcattaattcgagaataactcattattattattatttgaaatggatataactcattaaattttatatgttcgaatttcaaatggcttattgtcaacggtcaacctcattctcagtaataatttattctccaactaatctaataaataagacgtacatattcaattaattttacagcctattgtcttttagaaagatccatatatttattaattgattatttcattaatgataatagatatctccactctctctcaactgttctccaccaaaatgctgccccatgacacgcaaatttgccgcctgattacgtgcgtacgtacataatatttatgtttaattattatatattatatacatgcataactattaatttacgtccaaaccaaaatatgcgacgattttctatatgtagttggtacaatgtgttggttaacagacaatacattaaatagctatatatagtgtattgtaattatttatgatatatgatcgtcacattcatacatttcagctcatcgtctacaaataaatctctcccttagtggtggaaccaaacaatggattgagaaggggccgaagaaagtgtatttttacctattttcttttaaataattaataattcatgaacttttaataatactagtggagtctcacgtgcttcgcacgtggctctgaaaaatatctaagcacaactattttaaaaaaaaaaattaatattttattgacgaaatttataacattattaaa

SEQ ID NO: 394246 - DNA, 502 bp, Cannabis indica
cacaaaattcaaatgttagaatatatttcattaatgctaaaaactatttgatcacattatttgataatgtatagaagttttgatacgtactcattggacaaaaaattgctcaaacaaagctctgataagatcaagaccctgtctaacacgtcttaaattacgagaattgcttcctgacgttttcactgtatgatttgctacatcacaatctaacatgctatgtaaagtctcgtgtgtcttcgatgcttcaataagattatgtaccttaatcaaacaaataatttatcattattaacacaaaccttataaaaaaaataagaacaattaatcacaattattttcggcaaaaattatataagttttaattaacaacttgatgaaaacaaaggtccttgaaagagaaaaatagcaatccaaaaaaatgttaactttttgttgtttttgggtatttatatgaaaaataataaaaaatcaacaacaaaatataaggtatcatggaaac

SEQ ID NO: 394247 - DNA, 1021 bp, Cannabis indica
tgttaagaatataggatcacactgatactctgtttcctatattctagctgtttattgttatgtcccttttatatcggttatgttggttatgactgctgtggctgttatggtagttatgtctgttatagttagagggtagattagtcaattctattaatgtctgtatctatatatatactgtactcctctcttattgaatgttaatgagaaacactttcagataattcttttctttaacatggtatcagagcaggttatgtttctcattctcgttcttgaaactcgttgatgcttagtcacccccttttcatcgttgatcatccatggaatcctcaccgactctctcttctgcaaccagccagaacagagctgctgcttctggtggttcaccatttaaccccgttgttttctcacacaaattagctaccaagcttgaccatgataattacctgttatggaggcctcaacttctttccgccattagaggccacaaactccagcaatacatctcagagacgttcactcctccacctcaatttctttctgaacaagatcgaatcactgataacatcaatcctgcgttcttggactgggatcaacaagatcaactcttgtactcttggcttctgtcttctatgacggaaccgattcttactcgcgtcgttagttgtgaaacttcagcaagattatggtctgttctctccacgtattttgcttcacaaactgaggcgaaaattgatcaattcaccactgaacttcagaatctcaagaaaggtgctcataatctcaatgagtatctcttaaaggtgcgttccctaatcgataaactcaattctgttgggcataaaacttcacaaaaagaacacatagctgctatctttcgtggtttgccttctccagattatgacacgtttgtcatctccgtaaattcaagagccgaacctattgatgttactgcccttgaagctcttcttctagctcaagaacatagaatcgaaagaaagaatagagatcttgattc

SEQ ID NO: 394248 - DNA, 528 bp, Cannabis indica
aatttattttgtatttttttagtgcttctctttagaatttaaccttcaattattgaagtgaactttttactattatatgtattaacttttaattatatatattttgagaaaaagaaataatttattaaaaaaggcacgaagctaaagagatcctctgttaaatgatagtatagttagttacattagttaattatttttctgttattgtgagatgtctgaatcttgttgtaaccaacttctcttctcctagctttgtatataaaagttgccatgtataatcagtgtaacttagttcatcttcatcaatagaatcacactggtttatttacttctagttttaacttttttctgttcttgtcctcaacatggtatcagatgcctaaacagtcctcgtcatttctcaatggccaattatagctcaaattttagaattctttcttctacttcgttacccaaaacaaacaatctcaccatcaatcatgtaaaagaccgcatatggtttaaataccttgaattattaaataatta

SEQ ID NO: 394249 - DNA, 1044 bp, Cannabis indica
gttttaacattctcaatatcattaataagcgtaaggcagtgggactcactaatgacatggtgcccatcctttctctttatacatcttagagcttccttaagtctcattgcttccaccataaacgggctccaacctccatttctacaaatttgtactgcttccaatacattgtcccagctatctctagccaccaatccaaacccgtaacaagcctcatctgaaaaattggcaccatcaacattaactttgatgaaaggtgtattcggtttagtccaatgctcaataaatctcccttgttgaccgtgggcagtaggagagattgaggacttcttctgagcattattccaagacacaaagttaagagatgctgttgacaccacttgaggacttcttctgagcattattccaagacacaaagttaagagatgctgttcacaccacttcctcaattgaagactgtttagagttccaaacagtgttgtttcgattattccaaatagacttacacaacattgcagctccaagttgatcctcatttttccatacttttaaaccatcatcgaaccacccagcaaagcttgttgcagcaaaagcaatatgttgggaattgcagcagccaatcaacagtggtaggaaaaaggacattcaacgagaatgtacagtatggtttcaagcaagcaatgacagatcgaacaagtgacatctagagggactttttttaatgacagttgaaagcaagtgcggagccagtttgtacacgcacaccataggaggtaacattttagtttcttttctatttaattaaccatatatgttaaaaacaaaaaaaataattaaaaaattattaaactttaaattttagcaaaacttaataaacaaatcaattcgatgagttagtaaaaaattattttataatttcatatttaaaaataattaaaatgtatttttcttaagcttgtgttatagatcaatttcaataaatttttaaaataatttataaacgtattaacactacaagaagtgtcacttttaccagcacatttt

SEQ ID NO: 394250 - DNA, 691 bp, Cannabis indica
tttaaaaaaaaaaaaaaataatttgaggggcttggcctagccccatagtatctatatatattatcacattcacacaatgtcccacaaaaccgagagattaataaaaatgatccccacaaacacgcacatatatattaattcattttaacaatatgatgttacatgtcttacatgtatatttatagtctctttcaggtcctcagagaagtatgaacaagaaagaaggaaatgattaatacagctactgaattacatgtaactcatcatattgctaagattgtttaatatatatgtatggtcaatccaaatgttatattacattttattagtgcatttgttcaaacacacttttttttttaattacacatactgttttagcgtataagagaaatggcaaaattttgtaaagttataattgttgtatacatttggatggaccaagaatccaaaaagaaggaaaattgggagttatgaacttgggcccccttttccttctttgtaacaaatagaacttgggcctttttggttgttcttttcccctaatttttgaggggaccttgtgtgactaaaattgtaaaccagtttcattttttttgaaatggttgtaaaaccagttaggatgaaataaaaataaagaaaaaattacataataaaccaaaattttttaaaaaattataaaaatatatcaaca

SEQ ID NO: 394251 - DNA, 1075 bp, Cannabis indica
tcaaaagtactaaaatttgtaccctaaattactacatacaacccctaaaactatcttaagtttaaaaaaaaaaaaaaaaacgataaaattcaaaatttccccagtatacgcgtgctcgccgcgaccacagcttcctaccgaaaaaattcgatcgtgtgttcaaattagtattttggccataacttcttcaatacaactcaatgtttagaatagttgagaacgaaatatacaactttcatgtttagctccaagtacagttctacttccaaaggtgtaaaaaattatatttaagtattttctaccaaaatgtgctaaattttttccaaaagactccaaattcatgattagtctaaaaatagcctaaaaattaaaattacactaatcaataatttaaaaaatcaatttgagaatattaatagataaattgccgtattcataagacaaaatattgacttatcatgtaccttttaggaattttacaccatccccttttgacattaatccaccattatgtaattagaagcactatttctaattactaataaatttcattaaattaatttaaactactcattttgtctttattaattttaattaaataattaaatagttgaaatttatgtaattatttaaattagaaatattttaaaatatttccaaaaataattatttattaattaatttctaaaaataattattatatacaatatataatatgcagttaggtttttaaaataattttaattaactaactataagacaagaaaaatgtatatttaggctagtataaaataatattataaaatattttgaaagtaagttataacagcctataactagtttttaagaaaaaatagttaatttattatataataatataaatataaataattatcctatttatttaaaatagacaattaataaaagagatgttataggtttataacaaattttttttaaaaaaatattattttcaaaaatatcactaaccacttttttaaaaatattattttatatagtatatatatctcttatttaaaaaataaaatatttagatatttatttatttgaaaaa

SEQ ID NO: 394252 - DNA, 1081 bp, Cannabis indica
ggaaccaggacacctaaatagaaaccttcaaggaaacactgagatctgaaaaaaataggaagaaaaacaacactccaaagccaaaacatccgcctgagaaggaccccaaccaaccaaaaacctcaaaagcgaaaatggtgggagcccaaagaagcccaccaacagcgccaccacgctgcccaaaaggatggaaccaccaagagcccctgaccggcggcgagaaccatctcaaaagagacgggccgcctccaacagcggcgaccgatcacgtgagaaaacaggtgccatgaaaccggtccccaagagcaacgcccaacacccacatgacccgccaacaccgaaacccaccaggaggggacttcctccaccacgtgtagcacgccgagagcaggactcccaggcgccaccagcccagatctggccggcggtgcccaagggtgcatatgaaaccctagaagagactttaagaagacgagagggaaaaaaccctagcagagaaaatgggtgctgaatattggccgagtttaaaatttagtgaaccaaaataaattctgagtctttatttaaataaaatattatttttaaaaataaaaaaaatattttttaaatgtgataaatttttttaactcctgaactaggtgaattatcaaaagaaaattcataaagaacacaaaacaaaataatccaaataacaacattaaagtaaaattgttaggtttataaattaaatcatcatttacctattttcatttttctttcatttatttattgtcatctcaaatagtacttttattttctcttaaatcttaatgttatttattaatagaacaacattttctctctcaaaaaaaactaacggggcgtttggttggaggtacgtaataaaatggaatggaatgaaaaacaaataatttttattccatttctttgtttagttgcattttaaatcattagaatatcattcaaacggaattgccttttcactattttgatggaatgactattccatttcgaaatggaaagaaagataatttaatgtaagatttgaaaaatttaacaattttttatcaatttttttatg

SEQ ID NO: 394253 - DNA, 1496 bp, Cannabis indica
aattaaaataacttcatgatttatgttttctattgattatactctaattttttaatatacacatcattccacttaagtattgttttacttaatttttatgattattttttaattctctttgagacatcatttttatttcaaaaatatatgtaatgagtacccacccgatggaaatccttcccccgttgggtaattctcggcttgtccccgctttaatttaaacaagtattagggcgggtatgggggtgaatttaggaagcggatatggggtgggggagaaatccccgcacccgccccaccctgtttacatccctactgggaagtctgcagcatatgctttggcctgtcttccaggaagcgtacgtctcattcggaagcacttcacttatgctgacgtggagatattgttatgaggagtttgttaagtcttaactaacttaacaactaattattggtagccaccgactttggattctatattgcagatctataaataccaccaacacttatctttctaaggtgtgattgatcagacgagttatgacttatgagaggtgatcttgagagagaaagattgagaggtacagagaggtacagagaaaagagatagattgggcttgggttttgtatgaagaatatcctgtagatgaaaaagattcttgggtaagagtgtgagagataaacactttgagagaatccattgagaattgatctcggctgtattgtaccctaccctattctaactcaatcaataaagacgatttcagtggtgttctaaaattggagtagagtcatagatcacatcaatttataggacttaaaccagtatatatcttcgtgttgatttcattgtcttattgctttactcgtttctgatttagatactatattcatcacagttttatctctgattgttgtgtgtgttatttgttaatcttatcattagtaattatttgttaattaaatttttagttgatttgaatgcactttaattgtaattttcttacaaaataattggtttattgacaaaaataccttaaaagggataaaaaagtctttaatataagtggtaattttaattctcatgagataaatgtatgtaagataattcataaaaataatataatacttattagagcatcttaatgcagtgctataaagatggtgtatatgtattttttaactcatgttaagaaaaaattaaacttcaatggtattatataaaaccatctccaatagatggtatataatttgagtcaatataactcaaaaataagttaatgttatatttgacctaaattttataatagtgcttaaattaatcgacttttttgatataaatgtgtaaagtcacaaaaatattaaatttttattagaattatataaaaccctattaaatatataaatcaaatgtaaacaattattaattacatcaataagtagtaaaagtgaaaataataaaaaaaaatgatttttattgtggtttaaaatttgac

SEQ ID NO: 394254 - DNA, 593 bp, Cannabis indica
actaacacttagtctttaatattactttcaaggcctagtgacattatcatcctcatgccttgttcagctaaccttggacattaaaagtgtcgattattgagttaacacttacccctagtcttcaagaattctcttaagtgttcataggaggctagcttttagggtgtcttttggatgccttgtgaatttctttacttgtcacacactccaagacatcacctctatctataaaaggcttctcttcattcgacttcatatcacctcttcatcattggcctagtggagatttgctagcctccttttcaaaaggtcccaacactactacaaaaagtataattctcgtcgatttttaagtgtcatttaaaatatacaccgcggtataaaaccgacgtatataccgtagttacaaatagttttttattagcgtcatttttgaaacgacgcaaaaaacaattttctacatttacaaaccgacacaaaatatttacactactacaaaaaccccatttagagggagtttttaagcccttttcagcgtcgcttttcgcgaaattcgctaccaacgctgatcagggcgacgctaaagggtttat

SEQ ID NO: 394255 - DNA, 1110 bp, Cannabis indica
aattgttggaacaggctttgtgcattttttaagtaggaggccatgttggctcctcttgattggtattctccaagaacatggtttactaatatttatgagtcgttgaaacatcttttggatttggcttgtaaacctcgtgcgagtcttaggctaacaagtaagacttcatatttagcctcgttattcgacgctttgagctgaaattgcaaggctgtatggatttggtagccatcgagcttgactagtattattcctgcccttgagccatttttgttggatgacccatcgacaaataactgccatgtatgctgaggtgacttctgaatttcttctccttttggaaactcggtacatttagctatgaaatcggtgagatcttgagcttttatggtatttcttggatggtaagttatttcaaactatcccaattcaacagcccacttgaggatttagcccgaagcttctaatttcattaacacttttcgaaggggttaattagtgagtacatgtatcaggtgtgcttagagatatgggcggagttttctcgatgcatggaccagataaaaagcaagtttttccatgactggatatcttgcctctgcccccaagaggtacatgctaacataatatactggtttttgggccttcttctattctcgcactaaggttgtgctagtggttgtttcagtaatgcccaagtataaatacaagatctctcctattattggtttggacaaaatagggggctctgccaagtgcttttaagtgcttggaaagctttttaacattattctgtctattccaccttgttgttgccccgaagcaagttgaaaaagcataggcatttgttggttgactttgattcaaactgatttagtgccgcattgcgaccaataaggctttgtatatctttctttcttttaggtgaagaccatgagggcttttaccttttctgggtttgcttcaatgcccttggaattgacactgaaatccaaaaactttccagatgaaacaacaaataagcacctcaaaggattaagcttcatgtgtgtaacgccctaaataattaggcacgctacccaaaaatgattatgaaaccctaatccccta

SEQ ID NO: 394256 - DNA, 671 bp, Cannabis indica
tagtgggtcataggaaaaaaatatatttttgggccctcatttagaaaaaaatgtggtattttttaaaattaataaaaaaaaatgtgtaattttaaaaggggataaaaattttttgggcccctaaaaactagataaattaaacactagtacaaaaacctaacaagttctcctaacaacaaagaagaacatcatttgtaagaatcctagaattgaccaacacaagaccatggacgacccgaattgtttctttgttattcacatgatatgaagattggcagactattttgcacatattagagagaggatgaaggtggttttgccaaaaaaaaaaaggttttggtatttatattgaatctttgagacaaattcattaagagcaatttggcttctcatactactttttgtgattagaacagaataaccacactacaccaaaatatttatttagcttaatcaaagaatatcaaagtctctccaaactaaaaagtgctatccaataagcatatgagtgacgtataaccacgtaatttagagtatctctaatggtatacaatatttattaacggtcaaaatatacacattattttaaaatattttttctttattttttctatcattcacataagatttgtcacatttttttaaaaaatacttcaatagttgacaactct

SEQ ID NO: 394257 - DNA, 1132 bp, Cannabis indica
tttcagactaaaaaacaccaattctagcaaatacgacacatataacgaaagcaaactacataaagtttaacaaaatgcttaaaccacaacttacccattataatggtgtaagattcttgagtgagattggggtatgctccggttttccaccaccgcctaccgagaaacaaccattcgatagggaagagagagagagggacgagagagggtaagttttttcagttttttctagagagaaagagtggtacacgagagggaagagagaggtaaagtttttcaatttttaacaatttttaatttttttaaaaaaaaagtaaaataaaagttcatgtaattaattacattaatttgtacaaattagtagaggtttgaaatttgatatttgaggttttattaaggacaaacaaaaatgaaattttcgtatatatatccatacttatagtacattggttttattatatataattcataataataatgatgagagatattgagtaatgaaatgaaatgagaatatatgtatagctagagagagaagagagagagagagagtacgttgttatttgtaattgtattgtttataataaatatatattcttttattctttatgtatagcattagcatgcatgcagtagcagacacttgtaggtccagactctcagagatatcatctattctcttctgaattctactacactctcatctctattatctctttctcattaatgctcacctctttctcatctattttcaccaccaattaattatattaaccaatacatacatacatatatattaattactactattctaatttctacatacctacctactcccatcactatatatatatatacaaagattgttattaagtgtttagcacattctaaaagtagcattttataaaattaattagtcatattttataaaaattatgttttgaagttatataagatctaatatttaattatatcaacactaatataatattgaaaaatatgctaggcactagggccggtcctaaaacaaagtgggccacaggcaaaagaaattttttttgacccttatgttagaaaaaatatggtatttttcaaaatcagtaaaaaaattgtataattttaaaagaggaaa

SEQ ID NO: 394258 - DNA, 1219 bp, Cannabis indica
tgaagaaatccgctatgccccctatcaagacgtttgcgaatgttctttttcgcccttctcgcattttgccacgtgcacctccactcccctggaatccccaaaatccacaccccccagcctcatgaagaaaattctttaacaggccccttcacggctccggaatctacttccccccatcttctccgaatcgtctaaaatcacatttaaatctcccaacaccacccacggctccctacattcccgcacagtatccgtcaaccaatcccaaaaaaccttcttcttctcgacataaggcgtcccataaatacaaaacaagtgccactttgtcccaccaataatctcaggaatagtaacatgaaaccccgattcaaaaacctgttgaacttcaatcaacccagcatccctccaagccaggcaaaagccaccaccaattccctcagaaggaattccaatcacatttaaaaagcccaaccgattcatacaggcctccatatccaccatcccaactttcgtttccgccaaaaagaccaaatccgcattagtatcatggattaaacctcgtaaggttctctccgccgtgggcctacgaatcccacgacaattccaagataaacacctcatgacgatggtgggggcatgcttgaggccgcctcctcgccattgccaaaattttgaaccacttgcccttcattactgccacagccttgcaaaacaacctccaaatttccagtgaaagtgtttacctcttcattcctggtgtctgcaattctccttcctcgacgagtcttcacacccgatcccttacttaccccactaactccagagacaaaattccatgcttttttccgagagcttcttcttggacgactaccagaacccgtccccaagctaaaattattttgctctgcgatatcagcactcgtaacgccatcagccttttcctcatcaaccggacattcagggaggggaaaactcgtaactgctggataggggtgataccacgtatgtggtttcctttttttggagcccaatagttgaacaatcatcatggataaatcaggaggattacaaataagggacgcttgggctttgtataagtcagtaacatccggcccatagagctgaaaaaacatcttttgggcttccaaatcatcattaggccatttaatatgagtgggctcagggaactcatggggagtttgggatctacacaaccaag

SEQ ID NO: 394259 - DNA, 725 bp, Cannabis indica
gatttgacacaacaaattctgttggatacacacttatataataggtaagatatatagatatcctcacttttggcggaggaaaaccttggtaaacaaatagaatgaaaataacatgaaaattagacacagaaatacactgagcaaacaagcctaacttttaaaacctaatacgtccaaggtttctactccttgttcatatataaaaaagtcaaatgttcaaaatgcttggttttgtagacccaagtggcagtcccaaatttaagcttctcccatatctcttctattgaacattcaatcccttcaaaaactctgttgtttctttccaactacactgcccatatagtggccataaccgcagttctccatagcagattcctacgcttgctaccacccaccttgctgactaacattaggggtaccgaatcaggtattacccactgaatctcaaactcgttcaacaggaacaaccaaattctgaacaagctacagaccaaaaacaaatgcgtgatctcttctctgtttcttttacaacaaacacaccaacccggggataaacacaaaataggtcttcttatttgcatcacgtcatgcacatttatttttccgaaagccactaaccacccaaaaactttgactttaacagggcctgtacttttccataagatcttagaccaaaacacctcaccatgattcggacttgctgtaaaatacttgaaagcagattt

SEQ ID NO: 394260 - DNA, 1498 bp, Cannabis indica
ggactttttcatagacgcggtgaaattaaaaccataaccatattaattacattaatgaaatgaaatgtatatttatagttttgatcaccaacctgacctgtactaattaattatgtttctgaatttcttaagtaataataagtactaattaattattaattgaaacggtaaatacaaagacatatattttcatggttatatatgtttatatattctcatttttgtctttttttattaaacaaaaaaacattatttcatagttaaaaataaaattaatactaaggaatattaagatgacaactcatattttggtagcggttttgttttcttggcttggaaggattgaagtgcatacaagttgttttgtgtcaaagctcttatataaaaaagtcaacaaattatacttgaagaaaattgtcaatatatatataatctgaacaaaaggaaaagtctacatatatgtagctcataatatacacaaccttaactatggcaaaagcaaagacaaaatttcagaggaaaaagtcttaacatgttaatttgtcatatatttgtaattgtgcacgtatttgccaatgttaattcagatgtaaaaataattaatttaatttaatctatatatttatgtgtttgaaaaaattataaataaaattcatattttaatataaaaaataataattaaattctaatacatatgataaaaatacatttcaaatttcaaagtatagtagattaaatatatattttatttttatatgtaaaataaaattaaatattttttatacatataatttttttttctgcttggtttaaatttattattttttgttttatttatttttaatttattgttggatacataaaacaacactaatttattttattttttgttagttatgtaaaaaaaaatactttttttaataaatattaaataattatattaaaaagtaattaatccaaaataccattccaatcaatatttttgcgaattaaattaaatttgagttactatgtagatttgattggattcaaaatatgaaatccatactaaatatgaattggatgtactataagcaaaatagtataaattaaatattcgggatctcctaaaaaatattgattcctacatgggtgaagaacatattacaagatgctaaaactgattaattaactaaccctaacaactacctttttacgtagtcattgattaatatatagcttccatactctcttcaatattttcttgacattcttcatcatccatcacatttcattattaacctccaaattttctctatttaattgttcattagttttttaatttgaattactttcatcttttttgattagtgagaacaaatttttctaaagctcctttctgagagttaattaaactttctattcttcttttttttaagcttttcattaccagatggatattttctactagacatacttattttaggtagaaaaaataaacttaaaaaatccacaataa

SEQ ID NO: 394261 - DNA, 1733 bp, Cannabis indica
ccctaaatatttagagaggaaactcgcctacagtacaaattgatcttttgagctattgtattctgatacagaaactctaccaaaaaagatttgagattttcccaaaattaatggactaaacctgaagtcttgctaaactcctccaacaccctctggatagcaagaatagactcctcatcccttttgcaaaaaattactaagtcatctacgaagcaaaggttagtaagtttcagcttcttgcatgagggatgatacctgaataacttctcactagccgccttttggatttttcgagacaagtaatccataaccagcacgaaataagagaggggagatggggtccccttgtctaagcccctgctctcctttgaaagagccatgaatccgactattcataagcaaggagtaggtggtatttctcacacaattcattatccatctgacaaattttgctggaaaacaataggcaaccaaaagtttctcaagaaaatctcagttgaccgtatcataagctttactgatgtcaatctttatagtgcatcttggagagcaattcttccttctataattcttcaagatatcttgaaggattaaaatgttgtaagctatagaacgacctttaacaaaagccccctggttttaatttactaagtttgggagaaccttagccaattgagaacacatgagctttgagatacacttataaagagttgaacagcaagcaatgggccggtagtcaaccgctttggaaggacaatcattctttgggataagagaaagtgacgtgtcatggatctcatcattgaattgattagtagcaaaaaaatgagcaatagcagcatgaatatcctttcccacctcagcccaaacagattgaaaaatcccaaaccaaatccatcagggcctggggatttagttttgggatactaaacatgggatactaaacatcgcagctcttacttctttaagagagaaaggttttagaagattaacctgttggtcgagattaagcttggatcccatgtcaatgcactcctgatctagctccatagatgttggtttggcattatccatgatacctttgaagtggcctaagaaatgttgaacaacatcagggaaataatcattcaaactcccctattcggtagtaaaagaaacaatcttattttcttctttccgcttcttcaaaatggcatgaaagtaagttgtattgctatctcatttttgaacccaattaactttacttctttgatgaagaaaattaagatacacattctcctggattagaaaaagattggctgcctatttttccttatcaataaagctcttgtctggaggattagcttggctgagcaactgagcttctttgtactcctccttagctttctcataagcttcaccaatatttccaatagagtgtcgattgaaaactttaagcttatgtttgagtgtcatagtcttgagataaatccccttcaacccaccgcttctcagaggtttgttccagctatccaaaacaatcttcttgtaatccaaatgttcagcccaaaaattataaaaccggaaaggtttgtttccaatgttctttgtcaccgctgaatgaataacacacaaacagtggtcagaacaagtttccacgaaaagtgggctaaggttaggggtgttcattggatcacatccaatgtttttaggcctatccagatccgatccaatcatatattggatgttagatt

SEQ ID NO: 394262 - DNA, 1178 bp, Cannabis indica
aaaagccaaaatatgatttgttaaaaaactatatgcacatatatatgcactaaatatttcgaacagtgataatatttttatctcagttatatttgttcaaaattttcaaaaaaaattgatataattaaaaaatatatcacgtttatagtgtgttttttaaaataaaaattagtgcatatttttttgctcaaatttttttaaataaatatttagtacttacatgatagttaaatactacaaaaaaaaaataataataattgctcaatgtttttaaaaataaataaattaaattaaagaaacccaccatacatgcatgaggcatgtaaggtaagcctccacataatttttattttttaataaaatttatgttatgaaaattccaaatttcaagtctcccaaaattaaaaaacaactctctaaatttaagaaaacttatatttaagctccctcaaatttctttaaaaaaagtcctttatatatatatatttagttctttgaaaattaatatatatatatatatatataagatattaaaacaccttaaaaaaaataacatattattattggtgtaatttaatattacattaaatctcacacattttaatttaataaataatataaaaaatcaagcacctaaataacaatatttttgtactcaaatctacttcaaaaccccaactcacttcaataacataaccatgtttaaattttttaattatattgttgtttctctgaaaaagggaaaaaaaacacacacacaaacacatacaaattttatatttgtgatggtgatgttgtaatatgtgatcatgatgtgaattgtcctggtctagctggatgtggattgagctgagtcatcaaaaatattaaagcatgaagttattttcatgattttttttaataataaataaaaaacaatgaattttatttaaaataaaattgaattaatatgaggatgatggttatacttgtcaagtaaatattgaaagcagtactttcatttattcaatgcttttgttttcttctcaactacttattctctctttctccatctccccctctattctagccatccattattttattttaataaaagaaaaaaaatctttgaattataaatattggtagattacaaatcaacttaatagatatatatatacactggtcctagtactata

SEQ ID NO: 394263 - DNA, 817 bp, Cannabis indica
gtaaatatcatatccaaaatgagacaagatattattttaagcctaattttcgataattaaaatgtaacacctcacaaataaattatcattaaattttattttgtcctatcttgaaaaatacaaagtctgaattctaatcaacaaaatataaagtctaaattttataattttttacaaaacatctaaaatggtattgagtaattctactatgcaccccctaaaaaggtgttttggtaaatcttctatctatttcggcatacaaaaaaaaaaattagtaattttttttttcataatcgtgtatgttatagttatttaggatcacttataaattttcaaaaatatttgaataatttacaatgccgaacataaaatttacatattttgttgcactcacaattattttttcttatacgcattgtaagtaattgtttaaacctaatttttagtactgtaaactattcaaaattttcttaaaatttacaaataaacctaaataactacaacatacgagatcgtgtaaaaaaaattgaccaaatcttttttaaatgccaaaaactaactaaaaaatcaatcaaaacaaccctttactactcgagaaatttccaataggagtgtcaatgggtcaagtcggatttgatccggctatgatccgacctgatccagatcatgtaaggatctgcctcgccccgtctcgctagatcagatactcggatcatttcagatccgacccgacttattcggatcgaatctgatccgacctgactattttttttttttgagaattttaatattatcttataattttatatccatttta

SEQ ID NO: 394264 - DNA, 547 bp, Cannabis indica
ttctaacatcatcaagaattaatcccaaaaaagaatctaaaactaacgaattttggagcttacaaaccaatctttgataatcagattcaacattgagaattccaaaagagatacatcgggtcagagcattctaaatcgctagtgcttcagcccattctggtatgaaattttcgtctactctccaagctgtcaaagcataaactttgcattcagagtctcttatcaccataccaaggctacaagacgcattaggggcatcaatggcagcatctatatttattttgcaaaaaccaccagggggacgaagccatcggggaggcgttgaaggagtacgcgtttgttatcccaaaattggcactttgacgtggcatcacaataatggtgacacgtggcatcaacttagagcacctggtcggatcaacatgccgagcaggatgcctcgctggcatgtccataatggaatactcaacgagtcgtgcagaatgagcaacacttaaccaattcagccaagcactccgtgagtcaccagctcaatccctataactca

SEQ ID NO: 394265 - DNA, 813 bp, Cannabis indica
gccaaaagagcttgattaaaaaaatgaaaatcccaaaattttagcccacccattgccttaggctgacatattcacccaagaaatcttcttttgatcactatatgagtcccaccaaagttatctaacaattgattctattttttttacacgttgtcgtcgggagctagctgaatgaaacttatcatataagttggaacaacttaaagaatagaagaatagatttgatatgttgaaatagtttaaatgacaactttttagataaaatactaaaatctcaccaaatttaaaaaatagaaagaaaaaaagatacaatgtcacataaattcacttcttttctatatataaatatatagataaatatatatgtcttattttatattgtaaattaaaatatatttaaatttcaaaaattataactaatcgagtaaagataagtttatcgatcacttaatataaaaaatactaaattcgagacaaaagataattatcaaataaaacttttcgttataatctatacatacaacacttttaaagaatgtgagatttataaaagtaaagttaaatgactactttttagacaaaatactaaaatttcacaaaatttacaagaaaagaaataaataggatgccacaaaaacttaatttaattgtgttttcttttatataaatatattagatagagatagattattattattttaaaataataagtagtttctagtaaaagtagatttataaacaaatcattgttgtgacttcttacatattccattcttcaaattattttattttattttatttaatttttttttg

SEQ ID NO: 394266 - DNA, 949 bp, Cannabis indica
cgatgtgagctagaatttgtccccttttttgaatgatggggtctcctatttataggcgggagtgattgttagtcctctgcctttcttctgttcggatattggtccatgttgattagttattctcggtctcttcgcgcgttctatcttcttgttcccgctcttcgaaactctttgttaggactatattagtactatttttaaataggtttttaaaatatttttagtgtgttttgtacaaatttaacaggtttagtagtgaagaagaataaaataaatttgagaaaaaaatctacaaaaatgatgaatttaataatgtcttgttgctagagcaccaggagaacaatccaagcaaacaatccagaagatttggcacgattgaagcttctaaggttaaataattggacagtgtggattagcgccgtggtataaaaattcaatgccaaggtgttaaaaggcaaaaatttggcagaaaggtcatgttttggaagtttttaggcgggcgtcaacattgagattcaatattaaggcatgaggcttgttgtcgctcactgcctaattttgaacttcaagggtcgcgacattggttgtgcatgtcgcagtccgccttcaatttttagaaattttctgggcatgttaaaagacacggacccgcctgcattatttggtgagttttatggtcttaaccttaatgaaaagctatatagaggaaccttttttcactttttagggtaacaattgagagggacaaaaattggaagcaagaagcggctctggagactttcatcaataaaaccatataaagtagattcaatcgaaattaattaccctaagctttaatcatcattaatcctttcttcaattaattatcaccaaataaaatttaggaatttaattgtttggtaattgactacagtcctcgtgggaacgatgctctatttaccatcatatt

SEQ ID NO: 394267 - DNA, 860 bp, Cannabis indica
tcctctttatataaggaaatgtatcacaaatttaaatctttttgctttgaattcatgcaaatatctcccaattttctaaagcacaaattccatgaatgaatcaaaaacgctaacattgaattgggatatggaggttcaaaccttgaagctcggagacggattgagtctgggagaaaagattgatgattagattggactcagccacagatggaagaaacttgagcagccttctcgaaccgctaactcggaggaaagagaactcagctcgagcgtccctgagactgctacagaaagcgcgagtgacctccctataaactctattcgttcaagacattcacgagctgtcacctccgtcaacggtggctcaaactttgacttcgtcgaatccttctctgaagcattggccgctagagatggcgatggggttttggcctccgacgccatacaaacatcagagcagggccggccctgggcatagggggactaggcctgtgcctagggcccacctagtccaggggacccaaaaaaaaatttgcccttttaaaattatacaatttttttgctaattttgaaaataccattttttttctaaataagggcccaaaaataatttttaccctatagcccactacatttcagggccggccctgcatcagagagagataatgttcagagattacgggttgaagatagagtgtggaaggaaaacaaaaacttaaatacggaattctaaactttttttttaccaaactatggcataaaataaagggaaagaaacataaaaatacaaaaaaggaaaaaaaattacaaaaatactttggtcggcccattaaacatttatacagtccacatacaaatat

SEQ ID NO: 394268 - DNA, 813 bp, Cannabis indica
attgtcaacaggtaccctaattatactatattttagtaagttagtacttaattaaaaaaaaaaattagtctcctgattttaaatttctttataacattagttctcatttttgattactaagagcatcttttatggtaaaaatttaaaggataaggtagacatattaggtggtaaaatattaagatggatatcattttaaaaattgtataaatgctatatagttaggaatgtacatttttctcatggggatagggccctgagacctgcccttaaatggataggaatttcttatttaaatggggaacgcgacggggatggagaatattttttgtccctaaatgaaatgggatagtttactgtgacacttaacataagctttagtaaatagccaagcagaatgagggtttggaggattttaccgtgaaaaattggtttataaggttaaatgtgataaatcatataattcatgtgattttactgccaatatttatgtagttttgcagcgtaacctaaatttaacttttagttgcaaataaatgcgtaagtttaatttttgatgataataatacataagttatatttctaaaacttctgttagtacctaatcagggctattttgaattagttaatatttgaaagggaaggataatcctaaagattatcttttctgttatgagggtttaaatcttttaaaccccacgatattttcatagtagtattttaactacattaaaaagtgtaataaaattagttattatgttaaaataataaaagagtaaatattatttttgaccttgtattttataaaaatta

SEQ ID NO: 394269 - DNA, 837 bp, Cannabis indica
atttgtatattattgttttggaattatcctatatttattgatattatgaacaagtatatattaagagcatgtatgatgtatacaatacatgattctttttctttttctttttcttttgacttttatcatatttcatcattgattgatagatataatctcaattctcagttttgtttaattactgaatagctagcttaaatatttttatatttagggtgttttagctaatcaaaagaattattagaaaatatatataattttattttgataacgttgaggaaaacacagtgctttaattttgcatttgtatttagtgaagggcaacatgttttgatatttatttaattaatccaaatttgaatcattcgacaaatggtcaatttggtatactaaataagaaaaagttggttattatttcaactaataaataattctgtctgactctgacctttctaatatatagtttttacaactgttaatgtgggctcatcatgtatatatataattatagggtatttctagcgtagggcttagtatattgcacttatactataaggtgtttatgttaaccaatctaaacttagaaaagaaaagatgtaaataacttttgttcaaaaaatctaggggattatttgaaactctgtatatttattttttcactaaatgaaactttatatattatttcattgattgagtagccttaagactcagcacacgccttagacatgggcacatgggatatttggattttggctttctcttgataattaataatattattttatcatttgattgttatacttttatcatttataaaataattaagggttttttttt

SEQ ID NO: 394270 - DNA, 849 bp, Cannabis indica
ttgtcctaaatagacaaggtaggtgcctagcattgttcttgttatcccaatgtttgcccacctagcatggcatgcttatgtggcgaacattagtgcaacgtggcagtagaacttaccaacaagaatcccatgtcatccactcaccagtttaacaaacgtgaagtctgaatactcaagcgggatgacgaagtgacaaccagcaaccccaagcaggatggctagccacctctggcaagccctaaggataacataagccaactagattttggacatcccatagccggccagcttgcatcctgcagatgcatggccgaccaacttttggcctagcaagattttgatgcacagcttcatacgtggacagcaagccaaactatggattgggccttaacagcccacgaaaatagagggaaaaatatctttttttgaggagcattttagtcatttatattttattaatttaatatgtaaataatagcttatttaacaaatttctaagggattgaaagggtgtaaactctcctatataaatagccttaatcaaaccttaaaaccctaagtgctagtgctaagactgaagtcatgaagtcttaaatcctaactctaagtttgataactcacatctctctctctctcacacgcccactactatactcatacttgagatttaccaactctggttcctacattgtaaccttcaaagagctacttcatatcccatcattatagtgatctgagaagtattattgtaatgaccgcattactaatttggattagtaatgaccattggcactaattactgatatttttataattatttatgaatttaatttaattgtgggtcccatt

SEQ ID NO: 394271 - DNA, 887 bp, Cannabis indica
aaatttagattatatatatatatattgaaatcctataatatagataaaaataactataaagttatacatcgatgagtcttgagataataattaatatatatctcacccaaagatatattgtagtacgtaatccttacaataataaaccaaattaaccctatacatagtatttgatgctcagctaggtatatctatactcttatagagtacttttatggaaagtaggagagtgttttcttgcaggagagtgttttcttgctttcatctgaggccgatcctgaattgaaatggatcataagtaaaaaaaaatagaattttattataaaataatggtatttttaaaattattaaaaaatatgtatattttataaaagctatctggaacttaggcgcagacctagcccgccttagcctaagaccgaccctgcttctatctaacaaaaatgcatgtttggaaagttattgtgtaattagaatggagtataatttggaataattatgagatttaacatatttatttaattgggtaattaattgtacaatttttttgtgtgttatatctaaagtaaaatatgagtattattagatatttttttaaaaaattttacaaaaatatttttttttaatgcaaaaaaatatattatataaaatttttggatcctgggatctaggtgagcattaagcactttatcccaaaattaagcttgtgtaattaaaaataagtgttatttgcggcaaaatctcttaaagtgggcaggtttttgcaactaacctcctaatctaaaattttggtggtaaaactacctaaaccactagtccgttagcagttagccatttccatccatttttggctgttaactgccatggtggaatgtccacgtgtacac

SEQ ID NO: 394272 - DNA, 1389 bp, Cannabis indica
gaaggcatcaagtggatgagtgagagtatcatgttccttttatagtgtttcaactagggattagggctaaattatatggaattaaaaaagaataaaatattaggcaaaaatacttctaggccgtacgcttaatgggaccactttctagttagattttttgccattttatttcaaccacttattcttcttttcaataataccatattttctaattcaatcctataaataccaaaactatttatttaataattataattaatgaacaattctatggtagtgacattggttttgttcctatagtatagagacattgttttaaccattcatttatatgacttttgagggtacacactatttaatatgtagttgtgtgtatcagattaaatattcttttttcaaaaatttttaataaaaaatactaacaccaaaatgaattagtagacaaataaaaagtctaaaacaaaaagaaaaaattgtaaacaaagaatgtttgttagccatagatgggaagcaaactaataaacaacttaaagctaaggatgcctctttcattgtaatcgttttttctttgggaataaaagtaaaaataagaagtgcccatatatatatatatataacaaatacatgggtaagggtaaaaagaattgatcaaactaacatttgtatcttctcagatgagacaaaaaatcccttatgcgattcaaattagtcccaattcctattcctccatttttgaatttgtggagtttttttttctggtttttcgtagtatcttctggttttggtaattttttttggaagagatatagagaaagtagtttatagttttgtctttgaggaataatatcaagagtagagtgagtgaaggaaatgagatggattaagaattaattttttactttaaacttttcattctgattttatagagaagaaaatattttacgatagatgaaagtttctttgatgaagaaatcttaaggatcttcaatggaagaaggagaagataattgaaagagaaatagaaaaaatatattaattaactcagaatatacttaaattaatttaataaattattatttaatttcaaaatattattataaaataaatttacatataatctaatacattctaaatattaagtattgttatacactcattgatttatcacctttagatttattatctatggctgtaaaaacatccctatcataggaacaaacctcatgtacctaccatagacatatcctataattaattatcaaataaaattatcatttatgtaatttattaattataccatataaagtctcttaattagcaaattgacctcaaaacctcatttctttacaattaagcccgcccttagtgaaaattcataaataagacata

SEQ ID NO: 394273 - DNA, 1236 bp, Cannabis indica
aattaataggagaacacaattgtacctcataaaaattataggttaatatgcattgatgggttactcataaataaagtgggttacccatcacctactcactctaacacaatcattaaacaactaaggtatatacatcccttcaataccaatatggtctacttagacattagtagattaaataataatgcccaatatgataaagagaaaaataaataatatggaccactcttagtctttagaagttccatcaatttgcaaaaaaaataaaaaaaaaaaaaacaagaaaaattatgggcacatcacacatatattaaatactacactccagaccctaaaggtaaaaaataaatattaccaaagaaaatatatatattatttttttataaatgtataggaaccaaattttgtctaatgagaaaaatgtattttgttcatcttatagtcaatcaatggaagcctaaacacataaaaaaaatatgtattaataatttaatttaagtacataaaatgaagtttgtaatacataatcatacattaattcctttcttaattaataaaaaatttgaaaaaaaaaatccaacccataaatatacagagggagagagagagaaatttttaaaaatgccaaaattttagaaaataaatattaaaatacaaaatttgtgaaaattaccaaaatacttaggtgtataatcataaatatgatggttatcaattaaacaataaattttctaaatttctatcaatattttttttcaactatagtttacaaatgtattatcatatgtacaattatatttgggataatttaagaaaaaaatacaaaaataattaaaaaaaaattacaaaaatacagtatgtacggagttttaaacatttttactgttttttaaattttatttatataagtattttttatattgtattgttgttatgttgttgtattttttatttatatattatttattatgttgctttaatgttgttttttttttttgttaattttatgtgtttttttttatatttttataaaataccgtaaaaatataaaaaaaaaatttaaacgtaaaaatatgaaaaaatttataaaaattagtatttatttaattatcccattatatttatataaataatgtctacaaattttgacatgtactaaatcatactccctgaacttttaaggtcgttaaaaataccccctgaactattgagattgttgaatttaaagacttttgt

SEQ ID NO: 394274 - DNA, 1221 bp, Cannabis indica
aggtggtgcattataattagttaataaaaattattaccttaaattatatgagatttgatacttattatactatgataccgaaaaaaatactaagtgtagcaccaataatactttttaatatttctcttaaatttatattaaaacaaatcaactatagagtagagatgattgctagctaagcaaaataaataaataactttattctttgctgactaaacctttctgtaattaagagaccagatttgattttgggcaaaagtcacaaaaagtataaacaaaaattcaccaaatgtaatccactttgttttatggtccaacaatattagaacctcttaattcaagaaccaataatatctcagctaattacatatatgttaactcaaaataattaaaaatatttaaataaaatgagatttaggcaataatagtttctaattaagtttgtctttaactagttatacattgcattttagataatgaaacactaataaagtctacttttttcttgttttttttttctttttgtgtgattaaatattattgagagtcatatctggtattccaatttcccaacactcctttgaaagaatttcacttcaaattgggccttaaaacactttttcaagatcaccaacttattttaatttgatgtttagaggaaaaattcatgcatgataaaagagatttccaaatttttgtattaaaaataataataaaaacaaaaattattatgtttaatttatattaggttgtgtcacaaatatatctacaaaggtaaaaatattgctaaagaactagaaaaaatgtgttaaaaaaattcattaaaaagatgaactatcagagcacatctccaaccctcgcaacttcttttttttttaaaaaaaaaaaaaaacattataaacaaatagttctattaggtctttattatctatttattcgggtgtatatttttaatatataatgtgaaatggtaatatcgcaaaacatggcgagattatgcactgtagatggaaacgaggttttggattggaagaaattttcttcttatttaataattaatatattatttgattttcagcaatgaaattggctattatatttaagaaaaaaaaattgaaataaaatcggaaaaatatatataattatagtaaaatattttaaaaaaataaaagtaaaacaaactaacgagagtgttctaataacggataaagccaaagaaac

SEQ ID NO: 394275 - DNA, 1184 bp, Cannabis indica
ctctctctctctctctctctctctctctctctctctctctctctctctctctctctctctctctctctctctctctctctaattttctcaccctcaagtgatccctctcttcccttctctccttcatgtggcgccagagacgggagcggcagtgatggtgatgtggtcgtagtggctctaggaacaagaaaaggaaagggatgttcttggggttcgaacggtgagggtgttgcggtggtggttcaggcgaagagaaatgaaaagaggagaaaggcgagatgatgagcaataggggcttcgtaggaggtggagatgaggctctcgaaggttgaggctgccgcacaagaaggttcttgaatccgaaagaatttatgttttttaatttaattatttaatttgttttaaataaaaccttttgtaatatatttatttgttgtaatttatatgttacattctatatttattttctataatatgtattcattgtaatgtatatcatgtaatatgtaatttgttatgtgttgacctcgcttttggccaacaacaatgaatcttaattgtaagcaattaatgatataatataattgtaatataatgaaataaataaagacacagagtttttaaagaagttcggccctgagcagttcgataataacctactccccttgatttgtattgacttaagaacaaaaaatgcagtgatacttctcttagagcttttacaatgatatctctgagtatatctcttagataagttttttcgacccttcgcccagtgagaatagctcactatttatagggttataagctttgagggaaaagttttccttctatttacaacggctgtaattggtaagattacacattaaatacagaatacactgatcaagagatttggacagcttgccatatctctgtgatatgatcccaaaattatagggattgcttctatgactcaatatgcaagtgttgaaattgctaagtgttggcatgctcttcggactgtccattgctcggctaagaaggcttcgtttgtacaggaattcgcgatgctctgttcggcgtatctctttcgagcaattatgtgaagtcgattccacgtgtcaccggtatgtgatgccacctcggagtgccaaaattgggataacatttgccccccaagtctgtacgggacttccgaagtt

SEQ ID NO: 394276 - DNA, 1124 bp, Cannabis indica
catttgagtgaaagaactatttatgcttttcaagaataatgcttaatgcaatgtaagtttactcttttttttttggtggcattgtaaatattattttgattaataataaagtgaaataatttataattttcataaggagaaaataacagctttatagattacgtacctatagatcttgaagtggcaagaactccgagaacacggtacccattccaatttatgacccttccacctgcattttcaattctctccaactcatctcttctgtttggctgtgtacaaataattgattaaaacaccatcacatacaatttaattatacattattataataatattgctttaattaattaaatccttacattcttacttacaagtttttatcataataattaatgagaccagagagttaaaaggagattaatatacatcatatacatgtaatatatagacataggagatctcacatatatatttgtgttaatatacatgtattcattattggtaaagaggggagtcacaccacaaaaagctacctttattttcttcaaccatcaattcaaaacccatgcattatttaataattttatttatttttaaaggaaaaaaaaagaaaaaaaataccgctgttgatcttaatttgaattaatctttagtattaaaacgtattatttttcctagtgttgagaatcatatctcaaaactaattggcaataagtagagtagttcatgttcttatatatagttcatgtacaatttatattttattctatgtgccacaattagtttcttagactcatgttcccttcattcttctgtagaaaaagctggaaacaaaagaagaaaataaataaataaatcatgaaattaaaagtacttttcctttgtttaattaaattattaaaaatatatttttgcagaatttatattacactaacagattttggttacacataaatgttattttcatgtcattaaatttgtatataaacaaaagtaaatagtgtcataaacacttacaattttatatttataaacggtataaatttaggtggcgtttgataacactattttattagttttctgtttttaaaagtgaaaaagtgaaaatattttttcaaaaa

SEQ ID NO: 394277 - DNA, 664 bp, Cannabis indica
cacgtgaacatagtaccataataaatgaataagtacgttaatatagtaccataataaatgaataagaccattattgtacgggacttctcagattttttcctatcctaaaagtgtggtagctatttattattcagaaaaagctagcttatgttggtaatttttcttttaagcaaaaaaaaaaaataaataaaaaaaaaaaataataaatatataaataaaaaattagagaattggatattatctttaagagatgtattaaaggaaaccaagcatgttggtacattttaatattgaatctcattgtgaagatgcagtcatgaaagagaagcaatcaagagaaagagagaaatagaagaggaattgaaaaatgaaatctgttattattgattgaaacagaatagtacaatacatagcttttatataacaatcataaccagctagttatggacctaactaatcaattacagaattaactaactctttcgacagttggttttccttgacagctcccttcaaactcagtgtagttttggaaacaacactgagtttggatcgaatatcttgatttcctacaccacggtaaattacaaaaaatatatgatgttattgaaattaagttaaaattaaaaaaagatactaacaatcttattatgcattttacagt

SEQ ID NO: 394278 - DNA, 1864 bp, Cannabis indica
tctaatatctaataattactactttattatattatttgaacttcaatctaaatatataatttgctgaacttatttatatacccttattgattattagaatcaatatcattttaataggttaaagtttcttacttattaaaattctatattcagtatcatcttagtgtattgaatatttgatgagactattaatgcatgattattcaataatcatattttgactctaaagttcaaaattagaaagtagtaacttttccattaattagtttctcatcaggctttgatgttctatatgtcataacaatcactaatttaaatcaattggagattcaatcctttattagtatattttgtatttcaataaatctcattcattgaaaacagtttaattctactagagatcataatttgatttaaaaatattaattattgccataaagaacaaaatggttttctttaaaatcatattcttttaataagtactacaatcccactaaaatattttattacttttgaatttaattaatgattatgactattaaaatttaattttgactcttcaaaattattctccttttaattgttatatttattgagatttaattgtttgaacactttctattaattatttctaatctcgatgtagtctaaccacatctatgaaaaaactttaaatttatttaaattatatttcatatcgatttaaatagattcaactaatgaatatttaaatgtgagttaatttaattagactattttaattgaatatttatgtatctactaatgattttttaatgaaccttttattatacatgaatagaatagaattttatatccatgcatatatttgaatagtattgttaattaattataaacttaattgtagaaacatcgataagttactataataaatagttacttatttattatttagtaaaaataaataattaaatatatttaaacttgattttagaattatactatgaacattgaagtctttagtttactttgcacacaaaattttgaaattaaataaattttattataaaaacataattgttcaaaataaattatttaaataaaatatatattaagtgtgctactaaaatataaaacaataaaacttaataaattgtctttgaaagtttaaactaaagttgacttcttcatttctcttctaaaatcattcttcattacgaactttgtagaaatctcactttttcgaatcatcctaataaggccttatatagtaaatatgtgtgtgagcgtaacacgtggtgtctatacaagatagacttacgatgtggtggcatcatcataaatgcagtgtgtattatattagtgtggtggcacagtcatctacttagtggcgtattgaatgtgatatgtatgttatatgttatatttgggtttgattatgcttacttgttgtgccttggctcacaggtgctctaatgtgcaagcaagggtaaagcagtgtcaggtcagccacgagttggagagcttgacggtggattgtacatgttccagccaagctagactgcgagagtttgatcctataagaagattgttgttcggttttgtgctttaaataaaacccatttcaatataatcaaatttactaattaatataagatcagaaatcgcttttatatgcatggttcacataatttatttcgtgattatgtttaatgtataaattctattaagtgcagaacatatataaataaataaatttgttcatgattatagtgtcgtcagcatagtggaatataatcgtgattatatgtttaaaagtttaattctcatgatttgttagttcgctggatttagactgacatgataatcagcgataaggtatact

SEQ ID NO: 394279 - DNA, 1747 bp, Cannabis indica
aactattcggccttcttcgatttttcaatgcctttcttctctaagtgggcttttagtcactgccttaaccgtttccccaggaagaaccctaggaatttgtttttcattttgggaatctggtttgttggttctagtagctttagaaacctagtttttggtattttggcgatatttaaagtattgtgacgctatccattgatagaaaaacttctatttttaagtttaagtccccgaaaagtgatttagcgtatcacttacaagttttacgtatattgtgacttacgagcctgtaaattgtcaagcagtagttttcactcagggttactaatatacttgcatttagaatcaaggtaagattagtataatagttgcatatatgcatacatgtttagcgtacatgttagttgctgtcaaaataacatatcagggtattagtgaagtgtatatagagctgtaccgagataccgacagatatatgttaggcaaatcagtagccatcacattagcatatcaatgtatcagtaaagtgtacatagagttgcatagagatgccaacaaatatatgcaaggcttttagatagtgtgaactagctactaccacatcagtatgactagagtacatagtataggttggattttcaattagtcatactttttcaagaactttcctgacccaggtattagatcgtgattaggtgtatgggtacctagttgcggtctagatatatgtttgttttgattacgcttttcttattgagtctgtcgactcacagttattacgtgtatatgcaggttaaagttagacctgaaccgtgaaaagtttaagctaaaggtgaatattgtacatatcaagacggttaaacttagagtgtttagggtctttgggacaatctaggctcacttttgatactcgccattcgatgacttttgtaatacatgtattttgtaaacttatgtaacttttaaaataagatcctgagttatgtaaattattattatatatttaagattaaagtttaaatatgtaaattttaattattcacgtttttaataaaccctttaattagcaaaggcatgcacatcaattaagaaaatactatagcgtgcctaatctagtaggacgttacattctgcctcttcatttgaatcatatcctaataatttcctatattccacatcttggtatcgcctgtcttctaactatattactcatagttgaattggatccatgggtggctgcctgacttgctgctgaagacctatgttctgattcaaccgatatcgaagatgtggaattacgattcaaatgcttgtgcaagttgggttgtctacagtttaagtgttcatgtagattgaggtcgcatctcctttcatttctttggtcataattgctaatcagcctcattgtatagtaactctcaaactgataactctgagaattactcatgctttcttgatcatcttgatagtggggacgtgtacctttcccactctgtgtttgtctttcaagtgcatgggtcctggtcgatctgctctatcaataagtccttgatctcgacccactaggatcagtgcttgatcctattttctaaggttcttctcgcactagcctctgtcttcgaaaacatatttgacatacgccctctacttaagtaggtatacatgctgtaacgccctgtccaacaggaacgccacatgtgtgcaatttatttaaaataccaataattatataagatgtaattatact

SEQ ID NO: 394280 - DNA, 980 bp, Cannabis indica
tcacaactggtattgtgaaaccaattcctactcaaaaattccttatcatgtattttaagtgttgaatagacaaacaagtaaagggtgttaagaaaactgattagatttttctcttctttctcagtttcggtgcagctcttattgatcaaccagtatgggtaatgaatgttgtccctattgatatggcagacactttgtctatcatatatgagagagggttaattggagtctaccatgactggtgtgagtcttttaatacctatcctagaacatatgatctactacattccaactatctattccaaactctttctcaaaggtattgattccattctcatttcataccccaacatctaaaatattttagtcaataatattgatttcaactttaacttcataattacgatataagtgataatgaatttttatgtatttgcagatgtgagatggtagaaatggtggcggagattgatagaatattaagaccaaacggttatttaatagttaacgacacaatggaggtgattgaaactgttaagccaattttgcaatcacttcattggtctgtaatcttccatcaaaatcattttcttttggccaagaagggtttctggcgtccaggtttgagggagtaatttttgttcaaattaatgtacattagattcttcaagttttacaagtttatttattttaaagtttaaacaatggacatctttgtacttgataaatattgagaaggtaaaaaggtgtatgaatgtagtagattcaatgtccttaaaaaaaaaaaaagaagtgaaattatagtaaataattcaaaaatagagatttctattagcaccccacaaaactataaatatactccaatatttaaaaaaatgaaatttaaaataatttttaaaaattacatgcacttaatattttttcaaaaaagtaatttcacattattttgtgttaatttcaatatttattttaattttcat

SEQ ID NO: 394281 - DNA, 558 bp, Cannabis indica
gaaacaaattacaatttaaggggtgtaaatcacccataatttataggtcacttttacctattattcctaaaaatagatatatttatagtcttttacatatataaataattataattataagttttattatgtgatggtggatatattatagttatttaagacatcatgtaaaatttaaaataatttaaaatatctatttcgcacacataattactaactttttttaccttaaaatatttgtttatcgaaattttttgaaaccaatattgaaatgacttttgagctatataaattattaaagaaataaagataagagattgttaatgtggttagggtgttaattaatcttaatttacataatactattttgttagactttttatttgggcttacattaacttttattggttttattaaaacttgggttgatttgatagttctttgctgcgttagcccatattgttggtgatcaattgttaatgggcttagcatttgtgtgtaaagtctaggtgaaacaaaagtgtgggctttttagttaactgaagcctttgatgagca

SEQ ID NO: 394282 - DNA, 1098 bp, Cannabis indica
aaaaattactaattagcctaccttttaataaaactaatcacaattaatatagtagcttattatttagctaaatctagggttggcaatatgggtcacgacacaacgacataattagaaaacaatacaaaataagtgagtttggatgacacgtttaataatcgtgtcatgtttgtgtttgagtaactgacacgtttaataatcgtgtcgtgttcgtgtttagtttttgacacatttaataatcgtatcatgttcgtgtttaccttaatcatgtcatgtcatagtcgtgtcgacacatttagtaatcgtgtcatgtcataattgtgtttacacgataacacaaattaattttcatatatttaatttataatgataatcgtgtcataatcgtgttatcttgatgacacgatagcacgaattgtgaaccctaagaaagtctactttatctgtgacttattcgtacttgttagtcgcctagttatctttgaagaacattattctaacatatcacttatcaatgatatctctaatttttgaactatgtttattaaaataaataaatatataaataatactatttaccctttagctaaaagtcttttgtaagaaaattgcccaaaacacgaaacaaaggtgctagaaatttgcaagggcaatttgattttttatgcttacatttggttaatttaaataataactaatatttgttggatatgacaatttttatgatatccctaaaatacccccccatttacaccatcgggccacccatcgaaccagccatcggacctatcgaaccacccatcggaccatatctgctaccaattttttttttaatgttttcatacataaaaaaaaatagtatcaggtgattatcggaccaccatcggaccccatcggaccagatttgctaccaattttttttttatatatatttttgtacatataaaagtagcattatttgaccatcggactactatcggaccaccatcggactaccatttttttttatatttttttttatatttttgcactaaaaaagtatgggaaatttgagagagatatttttaggttttagataaagtggtcatatattttcaa

SEQ ID NO: 394283 - DNA, 378 bp, Cannabis indica
aatttaacagtctaaatatgattggatcggttagttataattagctcaaatcattttatgcatcacaatcgtactcactagacattttgttgattcaatgtaaaaatgttactaaacatttaatttttttttaaaaaaaaaatggattaaattaaattattgtttattgtggtccatttttctcttattaatttttttatcacaaaaagtcttagaagataagatgacattatttcaaacactattctttgataactgtcaacaaatagatatggtgtccaacccttctatgtggtcattaaatagaatagtcaaaaatcatttgtcaacttcatcatccccacacaatattaaacaaaaataaaaatcaataaccat

SEQ ID NO: 394284 - DNA, 696 bp, Cannabis indica
agtttagaggctcaagttagatacgtctcaaacaaggcaatttttatttctatgtgtgtgaagtgaagtctttactagtaaattgtaatgttattaatttcaagcaaaatgttaaattggcatgaagatttctttttctttctagctcatgcaaaatggggtagtcctttctcaaaattacataaaataaaatagtttgctcttaacagctaattgcgattctttctttgtgaattatttcggtttcgatccagaataatatgaagaagaggctaaaagaattgaacaacttttcaaagatgggattttgttgaaagcaaaatgtacactatctttgacaagttaatcgctaatgaattgatgttccatcaaaaaaaaaaattgttaatctctaacgatcaattgattttacctcgtccaatcataacaccataaaaagatttagaccgtttagactaatttgcgaattagtaatatactaatctaccaacaacaataatatcaccattatgctaaaaaagaaagtacgcagtaaaactccacttacttgaataggaatgcttaatattattacaagatattatattattattggtataattaattattaaattttatattttatattattggtacactgtatcattttgtattatattgtagagtacaatgttagtttaggtgccgtttggtaac

SEQ ID NO: 394285 - DNA, 508 bp, Cannabis indica
gcaagtactacaaaggatttctctaagacaccaagtggactactgagacataaaaatagagtttgtgttttaatgggtgatcagatcaatagagaaatccttgatgagtttcatactaccccatactctttacactcagggacaacaaagatgtatcaagatgtcaaggaattatactaatggctgggaatgaaaagtgacataatttagtatgttttaaagtgtttcacctgttagcaggtaaaagcataacactaaaggccagcaggtttacttcaacctttgagaatgcccgaatggaagtgggaagacataaccatggactttatggtgagtttacccaagaccactagattgtatgattcaatatgagtgatagtggacgattcaccaactcaacgcactttctgcctatgtgagtgacctatatatactgtggatcaatatgttgatttgtacatcaaggatatagttcggctccatggtgccccaaagtcgattgttttgg

SEQ ID NO: 394286 - DNA, 644 bp, Cannabis indica
gacatgtctcctctaaacaccttgaccttttgatgattacttgttctagggagtttagtaattattttagttcatcatcttcgactgatgactatggtaattttcgtgagtgggacattatctctccacatttttgttgtttattttgaacaagtgttgacctatttctttgtctcacagatatggatctagatctcgaagatatgttgcgcagtccttctggccccatcaagaaatccaagaagcgcataactttaataagagatacctcaggatcaactaaggaaccttccaaaaggaccaagactactgccaacaaaaaattagcctcgacccaactcaacatcaaactagaaaagtctctaaataattcaactgcgccagctagtgcgagcaccggtgaacaggcccttgggtctgttcatcaagttaaattctttggttctcatcccgagatggcgctgctagaaccttcttgccccctgcctatttatgctggcacagaaggctcgcggattttcttgctgcatgctaacaacaaatggtgtcattataagacctttgaacaaggtgactgggatctaatcaataagggtagcttccaaagtcttgtgacaaggagttatgacctcatgcagtcagat

SEQ ID NO: 394287 - DNA, 555 bp, Cannabis indica
ctatgatgagttttatcgcctcatggagcaagtaaagaccaagatttttccaattttgaactctgtagctgatatctccactgataatggttgctgggaatttgaggcttctaaaggaaatgtttggcgatcttgggtgaaagaattagaaaatttgtcgattacctgacgacaatggggatgtatgtggaaagactcggcggatgggaagttcacagtgaagagaggttatgaggcaacccaagtccttaggccgaattcggatcgtaagctttggaagtgcactttaggcactcgattatgatatggagaggcatttcagattgtctaccaactagagagcggttggtttttgttagagataagctttgctcaatgtgtggagaagacgtcgaatctgctatccaccttttctgggattgtcattgtgcacgggcactctggttcagcaatcctttctctactcggggaggggctgttatagggggctcgatcaaggaaatgttagaaaaattaataataaacccaagatctatttgtatataacatagaaca

SEQ ID NO: 394288 - DNA, 1880 bp, Cannabis indica
tgatagagtaatggcaaaccaaagttggatggaatcttttcctaatgctgaggcactctttcttaatgaggggttatttgatcatactcctgcactgcttacggtttatccttccatccttagcggtaggaaaccgtttaagtacttcaggatgtggtcaagtcagcgtctttatcagcaacaggtggaatcggtgtggaaaaggaatatcaggggcactaaaatgtataaaatggtggcgaagctgaaagctcttaaactggtcttacaagagatcaataagcagggttttcatgacattcaagttgctgagaagaaggccaagataaatttggaagagtctcagaaggctcttcaaggggaccctttgaatattgatcttcagcaagctgaggaagcttttagagagaattatactaatgtgtagaaagcttacatttctttcttacagcagaaatccaaggtggaatggattaagaatggagactccaatacaacagtttttcatgccagtatcaaaaatagaagagttaccaacagaatcttgtctattgaagcgagtaatggagagaaagttgaggagcctgaacaggtgacacaagatttcttggtttattaccaatgccttttgggaactaagatgccggggagattgaaagtgaaacattcagtgatagcagaggggccggttttatcagagtcacaagctgagtttctcttacaagagttttttgattctgaagttaagaatgcagttttcagcatccttggaatcaaaagccctgggcttgatgggtttgggagttatttctttcaagacaactgggagcttattaggaaagacatttgtgaagcagtatcctcttttctgcactcaggtaaccttctcaaggagatcaactccatagtcattactttaattcctaaaatcaaatgccctaataaggtgagtgattttaggcccatatcttgttgtaatgtgctttataaggtggccactaagttgatttgctctagattggattgggatttccttgaggaaatgttgatagagttgaagttcccatcaaattttataagcttgattatgacatgtgtgaagactcctagatactcattgatgttcaatggatctcttcatggtttttttggagctaaaaggagtttgaggcaaggggacctgatgtctcccttactttttgtgttaggtatggagtacctaagtagaatcctgatcaaggtggggaagaaagaggagtttaacttccatgaaagatgtggttaattaaggcttaatcaccttagcttcgcggatgatatcctcttattttgcaagggtgacttcaagagtgtgtatttcttaatgcatggccttttgctcttctctcttacttcaggcttgaatgttaataaggagaaatcaactatgtattgctcgggcatgacagatggagagatccaaagaatattggatatgtctggttgtactagacaaaatgacccgttcaaatatcttggagttcccatatgtgcaagaaagatcaatgcagccgattgcagttgtctagctcagaaaagggctgcccgaataaaggtatggggaacccgaaacttatcttttgcaagcagattagttcttgtaaactcagtccttatttcaattcatatttactggagccaaatgatgatacttccaaagaaagtaataaaagagatagaagccatatgtagaagtttcttgtggacagggaaagacatgatggcaggggctggaagcatctcttgggagaaaatctacactcctaagaaagaaggaggtctcggcataatgaatattgcctcatggaacatagcagccatggctaagcatgtttgggctg

SEQ ID NO: 394289 - DNA, 704 bp, Cannabis indica
tttaattgcgcctccttcacttgctcttgaatttttctgaaatgagttttgttccagtgttggagatgttcctttgatttcttcagcttacgatacaggttcaccatgggattatgatgaagctgatccctccacgcattgcgaactacccagtaacaccgagggtctcttccccacattaattcgtacttaaacgacgctttcgtacatctcacacccccatcagtactgaggaggattggcttatggtcagaagtggctaccggcaataattcaaccaccgcattagggaataacagtctccaatcaacggatacgagagccctatctagtcttgcacgcttcaccgcgcctcctccacttgaactcgaacacttttggaaccaagtgaactttcccctaagacaccccaagtccactagccccgttcttgacaccattcttcttagatcaaaagagtaacaggcagaattattgagtttcgaataattgagactctcatgatccgcgagagtgccattcaaatcccctaataacagtataggagaattacaactcgcacagaagtcaccaacacgggtccagaaaacctccttaccattcagcgtgggggaccataactcccagcagatgccacttgagaccagggggattcgattcaatcgtgccattgatccaatttttatctttctcgttaatcttgc

SEQ ID NO: 394290 - DNA, 940 bp, Cannabis indica
tcttatacacgagataagtaattgtgtaaaccttattttcaaaactgtaaactaatgagaattcttaaaaaatttacaagtgattattataaatagctccaacatatataccatacacaaaaaaaaaatgactaaattttttttaagtattgaaacatataaaaaatttacttgaacaaccctttagagatctactacacaaacatttcctattatcattttcactaagaaaaatatataaatttatatatatatcatcatcttaaatgggattactcaccacgtgcatatactttccgatattaactagacttgttttatagtgacaataggaattggcctaattaagtaattaatatttaccatttgaagtttttagtatttcaaaatattgaagggattttttttatttttatatactttaaaatatatattttttttcatttctacagaaatttacataaaaatccacatagtaattaatggagcaacttaactaaattacaatcaaaatctacatcgcaatccatataaaaaactactggagcatcctaaaccgtaatttttttttctttaaaaaaagttaaacataatatataaaataatttcccaatatttaatttattggctaaagactttgtctttagctatagctaactaatttgttagtaaatataaaaacttattaaaatgcagttttaaaagagtaaaaaagttaaaaaaatttatatgtagtataaaaactaataatatatttagacaactacccataaaagacaaaaccatgagttcagatctagtattatgcatgctattataggtaggtttttttttttgaaagagacaattaatttaggggtgcaagaactttcgagaagattgttattagaattttagaatataagatgaacgaagttccatctcaaaattaattgacaat

SEQ ID NO: 394291 - DNA, 938 bp, Cannabis indica
ttttgccttgaatcgcgacttgatgtccaggcgtgaagacggttactctaccagcaatgagtacataatgtacactttttggggagaatacaagaaataaaattattaaatgattacttctcttctcaggttgcttataaacaggattgaaaaccctaatcaatcctttagtcatctttattctcaaaaaccagagcaaagaaattttcaggcaattctctcttaaattctttaaagaattcccaggaaactcttgccaacaccatccgagcagaacaaaaagcttaaaaccagtgagtaagttctttatttctttcttttatacacttgcatgcttaattttctaggttttttgctgcgaatcttgactgtcttgagctttatctaggataaccatgaaaatcatagatttaagacttagaaatctcgatcagacttaatcacgatgtctgattctaactatgcttcgattttatccccacgatatccattttcacttatccattagggatttagagagaatcagattccaattcaaagtttcaaacttctagatggaaaattctattattgagagaaatttctatttttgattcctcaaacatgcaacttattcgtagccccaacaaaataacatcatcttgtctcctaccttttgtcgatgaatcgtggtgagttttggggaggaaaacaccatatcgaccaggatctggttccagaattgtacaaggatcatcctcttctctatacaagcccatctttgtcccgtgatgacctctctaactctagctttgaggactgggatataagtagtgaacacacgccttccctagaacccaatgtgcaacaccaacttttatctcaaccagatccaatgtcaggggtatggttacttcatttgggaactcaagaaggggtggagacactatcttccatcc

SEQ ID NO: 394292 - DNA, 460 bp, Cannabis indica
ataatatgccttccacttgcctatcatcaagttaccaaataacttaataatatgcctatggaaaaattaaaaattttaatacgaaatatatattatccacttgtcctataaaaaggtaaaattaaatttagtggtttggtcactagctaaataactaattactatgtttcttttttctttttttttattaaataaaaaaatggaagcagtgattacacgctcggctaatttaatttgaaaattatatataatttgtatagaaatttattgaagaattttgttactaatttttttgaacaagtaattattgatatattcatatggttattatatattttatcatgattaattgcttgttctttgatttggaaatgatggaaacacaaaaattggatcttattgactcctaatgagctccaaactatgatatttattacttagtaatcctaaatttatgata

SEQ ID NO: 394293 - DNA, 1269 bp, Cannabis indica
agctagagttgccagaaagattttgcatcacacatctccatgtacttatatgagatctatttggatcttaaagtacttcacgtgtactagaggctcttctcttcccgtgtacatcttccaagcctacgtcttgaatttgggcaagggcaaggcattgatgtatgccgagaatggtgatctcctcgccttgtttagctcaagttctgaaggtttttgaccagctaggaccttaagcatgtctcgtatttgatccaattgtgcttgcacaaaaggatctattgttgcagaggcctggctgattggccttctttgattgagttgaatcctcggattagacagagcctggccggccataccttgggagaggttacttccaaggtcggccagccctgagtttggtgctcgtacatggtcagctagccttaagctaggcagggcttggctgcccatacttctctgtctgcctagtggaatttgtgcatcgacatggagtagatcgcaccaattactagagtttggtggatccaactatctgaattgattaacttcacttcttaaattgttgttttgggtgtttccacccactctcggtcctcgtcggttgaaaattaatcttcgggtgactcactccccttggggagggagtgctcttctctagctggccatggggactgctagaagagtctagctggccatgggtattgttgaaggagtttggccggccatgggtactcctgctggtggttggtcggccacaggatggacaaagggggctgttgttgatcttgagatccttggttggccccccatgccgctggttgccgggatctaccagtttttgccgttttacctttaaggaaaggtctgtcctccatctggcaagggaagatctatcctagtttgtgggcaactgggttgatcagcatatcgatataccctccctgatctatcaacaagtcttcctttaagtggatctctgataagatcatggcctcttttatcggttctctggttgaactgccttattagatcgatgacccctctgttgcggcaatctaagtttgcttggcaagatcgaaggatgtactcttggtcaccatccattcttaggaatttgcgtctctactgagcgagtacattgcaatcactagtgcatggttcttcaagggattcgcatctttgctgaacaaatagattacagtaaacatcacgtggttcttcaattaggcatgcacggcctaggacttccctgagtctggccaactcaag

SEQ ID NO: 394294 - DNA, 685 bp, Cannabis indica
aaattgtgtgcaatttaagtgtgtctctgccatcaaattaaatcaagaatgctaaaggacacttatggtgcctaatatttttgtgaggtgtactcgtgatttcatttgttatactttaataaatattatagaaaatcgttaacacattatagggcgacacttcatcatggtgctaggcaccatgtaaaaaatatcatcttcaaaatattattaaaaaattatcaatttccccttcttgaagtgatttaggggtgtttatagtttggtttgatctcaattttatttattttttgagctaaaccaataatgttagttttttgaaactcaaaatcgaaatagaccaattaaatgcttaaattaaaccaaaccaaaccagtaatgttaaaataattatcaatattaggcctaattgttgataaatatcaatattcaataaaaagttatattaagtattatgcgtttggtttggtttggtttgaaccataaacaagaattttaaaaatcataatcgaactaaagagttataaacaatttgaattgaccaaaccattgacactaaggtggcgtttggttggaggtaatgaaatggaatggaattgaaaaaaaacaattttcattccattcttttgtttggttgcattttaaagtattggaatgacattccaatggaatgctctttccacca

SEQ ID NO: 394295 - DNA, 1718 bp, Cannabis indica
tttttttattgatttggtatggaaatagaaatgtatcgtggaattacttttgccacatgtagccagttgaaaagagaaaacattaccaagttcaaaaaaaaaattgattgaaataattgacaccttaactgcttcactgacttttgctaacccacccatatcctattcttttatccaaaagatcagctcgatcggacaataaaacagagactttagaaacaaagaaaaacaaaattaaaatcaaaacctcataaaatattaaatttttatttaattatttacaatgaatgataaagttcacaattttcaaggatgaaaaatggttcattttagatagactaagagtaggacagggtgtgttgaaatttatgctatgaatgttgaaaaggctaaagtttagatgttcatatatacacagcttcttttaactaaagcaaattactagactaagctgctattccaataaaccttatgttcaatccaaaatgaaagctacatccaaatccatctattgcttttattattctctcatctacagctttgttctttgccaaaacgaggtagacaagctcgctttacaagccattaagaatcagctagtgagtgatccttttggagtaacaagctcttggaatgagtctctacacttttgcatgtggcatggagtttcatgcaaacgccaacgagtgacacaattgaacttgagttcatcgagtttggtaggctacgtaccttcctctattgccaaccttagttttcttcaagttcttgatctttcaaacaacagtttccaaggacaagtacctgaaaaaattggtcacttgtttcggttgagggttataacattggcaaacaactcactaagtggtcaaataccaaccaccttatcaaactgttcaaacttgagaactctagacttgagttacaacaatttcatgagtaggattcctttccaactaggatttttaactaagttggaacaacttcgcatcaggaacagcaatttagaaggaatcattcccccacatattgggaatatttcaactcttcttgaaatttccttgaggatcaataagttagagggagaaattcctgaatcactaggccaattgaagagcttaactatccttagtattggagataatatgctttcaggtacaattccaaagtctatctataatctttcacatcttagtttgttatctctttgtaagaataaatttcaaggaagctttcctcataacataggtcttactttaccaaatctccaatactttaatgtgtgggaaaatcagtttagtggttcaattccaagttcattctctaatacttcaaaactcttgatatttgatattagcaacaacaaattctttggaggggttccaaatatttttagaaatcaggacaaacttcggttgctatggctagctgataatgatcttggaactagtggaatcaatgatgacctcaaatttctcactgatctagccaattgtagtagccttgaaaagcttaacctttcaaattgtaactttggtggagtgttgcctagttccttagtaaacctctcgggtaaactcgaatcactatcaatggcaggaatgttaaataaattaacaattaacccaagatctatttgtatataacatagaacacaatagtagtatatgataattgagtatgtgtacctgattgatccatagcaattatctctgatt

SEQ ID NO: 394296 - DNA, 566 bp, Cannabis indica
gcttagagagaacctaaaagtttctcggttccccttatttgaacggatataaagaagtttttacaggtttagatttgaacctcggcatacatgtgacatgtttagggtttttgtacaatataaatttactattgtgataaatacataaaatacatgactttgaggtccattgtaaaattttgactcgtgtggcaaatgtccactattgtagtaaataaataaaaatttatttgtttggtttaattctagttttattagaggatctctcatgaaaaactaaaatagagatgtcaccttgtagggttaaattcttatatttttttagtttactagttggaacaacacgtgctacgcacgtgtaatttttttggaagtaaatatataatttttattaatttgctaaatcagttaaaagataagattcttccttaatagaaacatcgctcttgttgaacactcgaattagaaaagaacaagatgctcaaagcaaaactatgagcaactatcattaataaaaaaacaaggaactattgtgtaaagatggaagaagtttacgataatcttct

SEQ ID NO: 394297 - DNA, 612 bp, Cannabis indica
aaggagttgatgctatgaaaaagtttacgttgcggtctttggcaaaggcatttgaaaatctatttatggaagaggatgagacaatggcttaatttcatgctaagttacatgatattttgaatgagttttatgcattgggaggacttactcgaatgctaaacttgttcaaaaactgttgggatgtttttccgagaaagttcaagtctaaagttatttccatagaagaaatgagagatgttaaagagcttggcttggatgagctgattgggtcacttcagaataatgaaatggctcttttgaggccgaataaatggacgaatcataaagaaattgagaaagaaaaatcagagaataaccttgcttttgtttataaagaacaaagaaataagacctcagatttatctggatgcctgacagatgacactgttgccttgttaatcgagaatttggcaagatttttgaaaaataactacaagaaaattccttttggtgagaaagataatcaatatagaagaaacgataagtgaaaataataagcaaccacagcctggagataagaagaatatgaacatacaatgtcgtgagtgtgataattttggacacattcaagca

SEQ ID NO: 394298 - DNA, 1425 bp, Cannabis indica
agacaccatcatacggtgagaatttgtagcaattcaaattatgtgatccaacggatgagatgaacaggtgtgaagaggagaaaggacggctgaaatgtttgagtacctctctctgacaccggcattaatgggaaggcctatcaatggacgggaagcaaatcattgcctgcaaagggaaataaaaatcaaatgatgactatcatatatgcaactcatgcgccaggggcacgtgccactgtatttattaaggaccagaggccgcatacaagtctcatttacctatgactaaataaggacttggggggggggtaaatgttgccccatgtttttcccaatatacgtggcaatagcaaaatatgacacatggaccaaaaggacatcttactcgagaattagttgagtcacatgtaggcaaacaagtgtagttcgaggagtgagcccccttggatgtgcaaaggcatgtccttcctctccaggagctagaaatatgataaagcatctctaggggaggaggacatattcgaacaatcacgttgcatttaatgcagcatgggaaaaaagtctaggaatgcccataagaggacatgttagatgacataataagcctcgtttacgacaattacacaatattcaaaggagctagtgacaactccattatgaagaatcacatcaatcaaggaaggataaagattaatctcacctaatccctatgatacctacgacataggttatggatgccctattttgtatctcttgggaacttgtgttcatacattactgccactcaaagacaagttatcccttttgaactattcctaccaatctctataaatacccttgaggaaaataggaaaagggggattgatcggtagagcagagagaaaaaaaactcaccaagaacattctctgtataaaagctctcattaataacaaagactcgtggactacagctcattaatgcccgaaccacgtaaaaatcacctgcattaattatccctaaagctctcatcattatctcatttaattagttgccaaaaatttcggtcaacagaaaccatacaaattaaaaaaaattaagctaatagttaagagaaattataaatgttgttgactcagaaatctagacaatacttctaagccatacatgctagctagattgacaagattgaaaaagtaggtaaggaattataagagaggcacaacaaatttataatagttcactccctatatcacaacaataatggagctacatatactttgagttttatttcttcacaagatggaaattacagaaaactaagtgtagagagagagagagagactagagagacaaactctgaccctgggtaattttctaaacttgaaaaattagcttatggagctctccttttataggtgaaggagacccacaaaaatagaaaaaaa

SEQ ID NO: 394299 - DNA, 960 bp, Cannabis indica
ttgagtttttaccagtcaaatgaccgacttatatggcatcataacacaaatggcttatatagtgttaaatcaggctttcaccttgccacctctatctgggagaaggaccaagaatcgtcttcggatgattacaaaacttggtggaaattcttttgggcaatgcaaatcccaccaaaagtgaaaatatttgcttggaaagtcattcaaaatgacctaccagttgccacggctttacacaaaaggaaggtcattgattcagctttatgttcccgttgtacatacgcatgggaatcaattggtcatgctttgttctcatgtaaatctgccaaggctgtttggaagaacactaagtttctaattgattatcaccatgctcaaggtatgtttaatggagattatctaatacatttggcatcaacgatggaaaaagcggatgttgaagcactaatatgtgtaatgtggaacatttggaatgatagaaacaaagtacttcatggtggcacacaaagagatcccatttcaatagcatcttatgcattgaattacatagaacactacagaagtgctaaaggtatttcctgcaaaaaattacagcagcctaaaactcaccaagctgatcccacggcccagattccacaccagcagggatttcagaaccaataccaaactgctgatcactcacatgggatacaaactccaactacagtggttcctcttggccgattaaacggacagcaagttggagagaaccagaatggccaggctcgacttaatgctaaccagcaccagcagccagcaactagaatgaggcaccaaccgatcatctcagctacagatgacaatgttcaacttcaacggcccctggatgatatcatttggaagcctcctggctatgaacatgcttaaaatgaatgtcgatgctgaaacaaatttcaagaatcagacattaggaattggagc

SEQ ID NO: 394300 - DNA, 1186 bp, Cannabis indica
ttaaatccaacaattttaatagttcaggggggcatttgtaacgatcttaaaagttcagagggcataatttgttacatgtcaaaagttcaggagacaaaaaatcctaattagcgtaaatttaaatactaattaatagttttttattatatcaattagtacaaaattttatatgataccattaattacgtaataacaaacatatcttctatttctactaaagaaacaaattatatatcatcacatttcacataatgtcaaaaaaaaaaaaaattatatatcatccacaatattttggacaccaattagtatcataatataacaccaataactactaaattatatatgataccaatgagtatcataatataatacccaatctttttcttaaccacagttgttttcttgtaagcaaaagattcaaattgaacacttaattcttttctttaaaacaaaatattccattttcaaacaaatcataacaaaaaagattggtttttttttttggaaaaaacgaaagattcagattaattttgaaaagagaaaaaagaaaaaagatttcaattaatttttcaagaaaaaaattagaatagataccatattttcttaaacaaatgatttaacttttaaacaaaaaaaaaaaaaatacttaattgaaaaaataaaaccaaaaaaggaaataaattaatgcttacaaaaacatgatattgacaaaaacaattcgtaaaataaaataggcattaaagtttaatgattggtttgggtatattaagttcttgttaatacatgtaattatttgtcttatatggtattcacatgtaaattttcctagtataggttaatatttatttatccagattcaattctttcacaaaaagcctaagcccacaacgttggcccaatctattttttttttttcaattaataaggcataataagcccaagtaaaaagaaatgactaattgcttttgggcttaaatgggttcatacttggcacaaaatatattgggaaatttacaaaaatactggaatttaggttaacttttacaaaaatactgtcacacggaaatcttttcaaaaatactgtgtttttataaaacactagtaaaacacaaagcagaacaactcaaaacaacagtagaacactagtaaaacaccagtagaacacaagtgaaaacttaacacagta

SEQ ID NO: 394301 - DNA, 612 bp, Cannabis indica
tcaagtttgtagaattagtaagtttctatatgatttttttatcaataattttatatttatgtgtcatataattcttttttttgtactaaagagaaaatttcattaatcaaagacaaaacaagctacaccatggccacaaccaaccgaccccaacaacctccaacagcagctacatagttaggcgtaaaaacatgccttctttagcttgaataatcctcctattctttaaattatacaacttgtattttactatatctttaatatcatttacaatttccatgatagtgaaacaactactattatgcacacaaaagtttctatttttccaaagcatgtaaactgtggcagcaaagagcaaaataatcacaccaggttttttgctagcaaacgagcactgccacctactgtaatccgaaggccaggctgttactctacaccagtcaaaaacctgcttcaagactgccctagaaacacaacagttgaagaaaagatggtgatgactctcctcttcaatgctacaaacagggcagtaactagagtctaaaacaatgtgaaatctatagaagttattgttgggttttgtgccctaaataaaacccattacaatctgat

SEQ ID NO: 394302 - DNA, 581 bp, Cannabis indica
aataactaattccaacttagcttctaacatttctatattgtcagaattagattgttttgaagaatcggtctcaaaggttggctttaatggagcacgatcatctagagattcatccaaaaataatcaatccaatttcaaagacttcatttctttattagaaggacaaatgttcttcaactttaagtacataaaaaagttgcaaaaattaaaaatcaaaaacaacaaaaacataaacaaaagaaattaacagaatgggaaaaaacaataataaaacaatgaagaaattaaacatcacctgctttaacgacaaataaaatatcttgcctttgaaatccctaaaagttggatttttaggcccgatatcattgatccaattgagaattgtgggaataatagaagcaacttgtttgcaaaaaaaaatttagcatcgcgggacaacactcataaaaccatacaataaacacccacgggcaccccaaagctctgtaccaaccatcataagactgaaccccctttttctctttcttatttttcatcttgatactatgttcaactctacccttgaatgaatcaattgttaa

SEQ ID NO: 394303 - DNA, 726 bp, Cannabis indica
aaagaaaataataataaaatatgactccaaattaagaaaccagctcagcttttgcttgagatcacgtgacggcacatgcaaaggagcacagcacagtacacagtgtagtactgtacagaccctttcagtaaagtgggccccatatatgtgggatcttagatcgatctaatcacactaaaatgggtcccatgatcctattgctgctgcttcctgataaatctgcataacaaataaaataatcttccccagcaaaaaaaaaaacaaataaaataatcttaaattttttaataaaaaatataataataataatacatttcaataataataataaactaatttaattaatcctatgtacttcgggtcgggtccaccacatgcatgtaactggaaattaaaaaatagatttccaaagtccatattccatttctcacatgatcgagtggttttagctgctcaaatatgtagtttggaatcaaaaaaaaaaaaaaatatcatgttgaattaaaataatttaaaattctatttatgaaaatttatattaattacttcttcttttttatcatttgttattgatttagtatggattgaacttgtatatttattagattttatttaattatattatattatctttattagagcactcctaatagtactttattttttaaaatatatcattaaaattttattttgtctaatttacaatatgtcttttatattatatta

SEQ ID NO: 394304 - DNA, 1829 bp, Cannabis indica
tttttttactgaggagtttagctcccatactattgttagtgtgccctgatgtcctgatgtctcatataaaatacataaaattaaacgtctagaataagtaacatgtaatatatttattcactacttattaaaaaataattattagcatagaatcgatcgatcctttacaatatccaatcaaaaatttcgaactacttttgaatttaacctaagatcaaatattttagaaccattgttttttttagtaatgaattatttgtgttatattataggggagaagatgttgagagcttagaaatgctaagacaagggttcactcatgccttcttaatgacatttgagaagaaagaagacttcacatcatttcaagggcatcccaaacatgttgaattctcatcaactttctcacttgcaatagacaacattgtggtccttgatttccccacacttcttgtcaagacaccaccttaattaattaattattattactattattatttactttttctttaaaaaaataaaaaattgttagttaaaaatagcctgaaatatttctcctatatatgtgtgtgtttaatggcttatgtttgtttgtttgtgtcattatgaatattatttgtgtgtgcttttttttgttgtaaaaaaaatcattattaatctatttattgtactttcttttatgaattttaatagaaaatcatttatgttgagagagaatgagagtgacacatatgcatatacatatataattatgttatattgttagggaaaaagggaagaaaaatgatgaattactaatattaaaaagaaaatatatgtttttattgtttaaaattgaaggcaagatataataatttcccataataatgatttttatttttctctattttcacttaatttgaaagtaaaataatttaagggctcaattttttccctcaaattttatttctttccaaatttctcaaatatatatttatataatttctattttccttaagcataacattattcatatatagtaccacatcaagaataattataggaatattatattaaatgtaatgatattcggtggacagtcccatgcataatgatgatggaagatggtatgggtacaaaattttgaattttgaattttttgttgaaaaaaatcaaatattaatctttttttccaaacctcataagagtagtttttttttacccactttgaagcgtttggtatgagttttagacttgattggaatgaaaacgtaaaatttaaattaaatttgaatgataagaaatttatgtttctaaataagtttcacttttttaattaaaattatcgtaatattaatcccttcaaacgcatgagttttatattctttttaagtctaatactttaaaattaaacaaaacaaaagaatagaataaaagttgctttctttctatttcgttctctcaaactaaaatgccaccaaagttttttttaactctatatacccacttacagtctatcgtttttcaatcttttggaagaagaaccaaaattcatgtttcatttcttatagagtgatgaacttaaatttagttataataaactactttataaatataactattgagtttgaaaaaagtttagcttgtttaattcattgttagagagtcttttaagtggagaggattgtaatattgttagaagctaattatttcatacacaagatgaaatctagatgtatacataggattaaatcgatttgaacaaacataaattcttagtattatttaagattttttgtcctacgttatagtttttgaattatactgttgtgtctactgatttataaatc

SEQ ID NO: 394305 - DNA, 893 bp, Cannabis indica
agaaatgctaaagggcatttatgatattttttagtatttttgtgatgtgtaatattactatttatgtattttgatatcggatcttatttattttactttaataaatattataaaaaaatgttactcaattataaagtgccacctcatagagatactagacatcttgatgctctattgtccaatagcaatgttcatattattaggtattgataaaaaagttggggaaaatagccaattagggcatagtcactagtcatgccataatataaatgtgtacaacattagaggggccaaattaatgtatttttaaaaaaataagcgtagtcatacattaagtaagtaattgtacataaatttttgtaaaccgtccaatctgaatacccgcccaaattaaaccgaaaaaatcaatataaaatacaaatcgaaaaaactcgaccaaattataaaccgcccaatctgttaattggatgagttgaaaatagaaccaacttgtccgattaacccgatttaaccaaactgccacatttatgtttttagcttttaatttactttttaaatttttacttattataatataaataatatatatgtatatataagagaaatcacatgacctgatctctctcagtctctcacactcacactatctctgtatatatttgttgtaaaattctaaagggaaaaactattttcatttgttgtaaaaaaaaaaaaaaaaaaaaataataaaaaaaaaactcttaagttggtttggacgattaatctgaccaaactgtcactggggttaagttttttttttaaaaaaaatttagtagcaggttggacttcaaattttaataattcgtatgtttatattaagttaaaaaataatagtagtataaactaaccaaact

SEQ ID NO: 394306 - DNA, 554 bp, Cannabis indica
aaatctaataatttaataataattttaataataaataaaatggtaataagcattcacgattacatggtagtaagcatttacacttttaataattataattatttttttatataattatgtgtaattatctttgacaattatataaaaataattagttataaaaaaacacatatagtctaatagtaactcaataatcataatgaaaatgaatacaattttgagcacaaatttaagtccatataagaaactaagttagtttgtttaagaaaaatatattaatcagagtaaaacacatcatgaatttaagcaccattaaaaataggggtgtgtataaatcatcaaatctaatgacaactgactggtccaattataaccgactaccaaatataaaatatctaattgtaattggatcggattgaatgttatttttaaatgtccaattggatcagatcgaatgttggatggggtatccaaaaatccaatacatccaacatccgatcgaactaattagttgtaacgccctaaataattaggcacgctacccaaaatgatta

SEQ ID NO: 394307 - DNA, 797 bp, Cannabis indica
ggcgtttaagcgctgcctactacctccaataaaatcttttatctacaaaaaagttagtagttgcttaaggagctaaaagctccttacattcaatggtaacttgggaaaaggttgagactgctataagagtcaatactcctttaatggaaaagttacgtaggtaaagatgtctagaaattctaaatggcaataaactcccccattataacaagtgtgcatgcaacaaaaagggtcgagatagctcaaagagccaacactctcccatgaaaggacatttaaaaggacctcagggcataactgcctaaaggggcgaccacagaaccgagcgatgaggatgaagctcaccaaactcagtctaggacttaaaaaaattcttatatacttgaggcaagtgttcaccccaccaaaattcggtacgtgtaaatttttagatttctaaattaaacgaagaaaaaattttaaaacacacttgaaaggtgtgtcaaagggaaaaaagggggctcatcgcacacgatagaaccccacatgagtaaataacccagtgcaaggaggtgtctagccacgggttaagctccccgctaccagtccactaggtcgctccccatgataggctagtttaggtacattttataaagtgtttttagagatttgttttaattgattatattcattttgtatagaataacacttgttttctacttttttttttcaagttgttaggccaaaattagtttaagtttcgggttatattttcggttagttttcactctttgtttctagttttagggctattttac

SEQ ID NO: 394308 - DNA, 1072 bp, Cannabis indica
tggctatgatggtggtctgccttagggcagtgccaactatgagtagcagtttgatcttgccacatggatcaatgccagctccgctgaaaccatacatgagctgctcgcatggttcaaggtcttctaaagtcaaacccattatgagtaggtcttacttgaacaagatgttttatgacgctccgtcgttgatcatcaccctggctaccaacatattagctatttgcacctcaacagctaaaggatcgtcgtgagtgtaactggcatgataggagtttgattctttaaaggtgataggttcacatccgtagtgttgagacttcggaggacgttctacaacctctaggactttgactcttcattatttgaagtgatctttcataccattccaaggccttccttgagattctagctatgtgagggcctccaatcacaatctctagcctgcctgcaactggcgtaggctgaagaggtgcattcctgtgttagagcttcaggtcgacataccactgaagagcagcatgattccgtgtgatgtgaaattttatctcatgtcgcaactgattacactcataagtgtcatgaccgtaattgttgtgggcaagaattttttcatatccctcttccctgaatacttgaaaggaagagttttgtgatacatcactattgattgtgtcgtcgtatagatctcctttcttggagccaaaagaatggagtaggtggtgaagtgaggctcataatcttgcaagggcttgcccctaatcttaggattctttcctccaggggagttgccttacttgccaccgtttttggctctccttccttcgttaaaacctccctttttcccatttccatgcgccttagttgtagggcttcattgtctcgcaacttcttcttgccaccctttaagcccttggctggggtgatgacttcttcaagtttgataaagccatgtactctatctgagaagtcacttcatgatatagacttccttgagataaaggtcgtaccacaaaggactcatctccccaaaaagtgttgggaattattttattaggatcttagatctactcac

SEQ ID NO: 394309 - DNA, 606 bp, Cannabis indica
gttgacttacttgttaaacccaaataatttgccatttaaatatataataatttggtgctaagtaatgccaaatactttttataggtaacacttaatatttcttaaaaattataggagaaatactaaagatatttctacgtgtcgatatcatttattagtcttaagtatcggtatggtcgaccgttgagcgtaagcgagctaggcatgcgccttaggcccctgaacgctcagtgcttaaaattgtgaaaaataattatcaatatagataaaatattaaataagaaaaaaatataacaaaaattatttagtatagtaataaaggattttactctaaactaaaaagatcaaagaatcaattcttaatttctagttttctattttcattttgataatagttagttgtatatatataggtcctaaaatttgatttcaccataagttccatatactttaaggtcggtctttgggtatcagcttccacaatactcaattgcaagatgagttgtttagaaaatactagacactactgctgcccaatgtcaatgagttatatgggattcaatacttaaaaaaggctaattaggatttttaccctctgaactttga

SEQ ID NO: 394310 - DNA, 936 bp, Cannabis indica
cttaaaaagttaaatacaaatataacaacaattaggaggatttaatcctaaaaaaaaatcttaaaattatgaatagtataattattaatacaatcttttaacctttcaagaaagaaatgaaatctaggcttttttgacaatctatgagaccgtgagtcatatctaaaatgtttcaagtatgtatttgtaattgtagtcattggagatgaaatatgtatgtctatagccaatttgaaaagaaaggctgtattagaatagcagtatatattacataggggtagccaactacgttggaaagacaggttaaagaaggttgtatttgtattaatgtatgtatattgtatgtgtgtgaagtatcctaggagatctaaaattccagattgtgtgtgagagacaggttgggcagagattctgttggaactcgatctacgagcccgctggaccgctctggcccactcaccagcggcaattggttaacccacctgaactgtcgctttcacctctctccctcccctaaccataccaccgcaaatggatattgtctccagtttatcttattgtcctgtcatatatttaaaataaaaaacgtaaaggatatgttatgggaaatttaattttttatgcatgatttaagggttgatcttaaaattacccctcttaaaatctcacacccattctctctccttccctctattctctctgttcatcccaacccagccatcccaacccagccctcccaactccagccgaaaccccaaataccggccacacacgcacagaggagacccatcgatccgcgacgctcccccactgatccacagcgcaccaccatcgaagcatcaccaccgaccaacgatacccacggtgcaccaccactgaagcatcaccaccgttttttatttttttattgattttgtttgtgattttagtgttaaa

SEQ ID NO: 394311 - DNA, 1709 bp, Cannabis indica
ttggtaactcaagctgtcatgtgtatgcaactggtctagttttcaatttaaacattgaggtatggagactcatccatactaatcctgctgatatcatgtttctttcttgtgaaatgattacaattttgtctcttatataaattagttgtacaatcctgataacaatcagattgagggccattctggatctggaattcactctgttgctctttgtatgagattctgagctattcttagttctgttactgaaagtactggcattacttttttctttttgtttacttccaagttgtaattgcagtatatgttgattaaagtatgatgcttgttcaaaaaaaaaaaaaaataatgatgtggttgaaaacttgttcaactagaaaatgtaaagataatcttaaacgaaagagaaaggagaatctatggaggagaattttgttatttttttttgtgtaaaaatgattaaatttaggatgtgatttgtgatggaaaatttttgtttcttttataatttaaaaacttattgttcatataactgccatttgattaattattgtcaatatcatattaggtacttttttagtgcctttctgcataattttgttgaatattttcaaagaaaaaatttcagtcccttcttgttatagaaggaagatttgatcttccttccccgtgttgtgcccaacttaatatactacacatagttgtccgaccaagtttgaaggatcccaacatgatggttttgttttatcagaatcttgtggtgattatgtgcaatctgcatcttgagttgaattagtaactgtttagttcatcattttatcttacaaagataagaatatgttttgtaatcgtgttacagatttggaatggaagcttatatacgtaggatcagctgaggatgagacgtatgaccagcaattggagagcgtacttgtggggcctgtgaatgttggaaattaccgttttgtgttacaggtaatttgctacaatcatgtaagatttgttattgtttgaatgacgtgtggttgggatatatgatatgactattatatgctaaaatttttcgcaggcagaccctccagacccatctaagattcgggaagaagacataattggtgtgacagtacttctgctcactggctcctatcttggccaggaatttgttcgagttggatactatgtgaacaatgattatgccgacgaacagttgagagaagaacctcccacaaaagtcttgattgataagatacagagaaatattctttgcgacaaacctagggtcacaaaattccccataaactttcatccagagaacagtgagagtggagagcaacccctgccaactgataatgcggttagtgctgatggaattggagagacagcatcttcacatgtacatcattttgaggagcaggcgcctaggtgtttggatgactagaatattttagttcttaccttcaatttgtcttcaaggtacatatatcatgccttaccaattttttcaaccctcaaccaaaaacttcagaggaagaacatcgacaatgattgaacactttttacggtcccaagttgtttactcatacttatattaattgaatttattatgatttggtaactgataggaatttcctatcatttcggtacaaacagtagcaaaatagagaaaatagagatgatatattgatattagaagataaaagaacaaagtt

SEQ ID NO: 394312 - DNA, 1573 bp, Cannabis indica
tctctctctctctctctcaccttctagaaaaccagcagcattttgagtttcattagctttattcaaggtgttctagcaagcttttagtgattccaatccaaggtaaaacccctaagcccttctcttattgatttcttaagttctaagaaaagtttcatgcatgttttcgggatttaaggttgttgtagatgttgttttgtattatttttttgaaatgttattgatgatgtttgagcagaattagagttaactgttggtttggttgtttagacagggtttgagctttaaaggtcaactttggtctttcatggtgatttgtgtatctgtgggtatttattggttttattgcatggactttgtttattgtgaggtaattagcaggtctggaaggtttggtaacatttgagattaaattgaattgtttagagtgagtttggtgtttcctgcactgaaccgaaattccagttcagggggacctataggaactggaattccggttgaacccaagaaagcccacaaaattggaatttcaattggggaacaggtctatcggttggggcattttagggaaccctagtttttcctctttttgcaatatttagggtattgccatgttatccatcaattgagaaacttttagtttcaagtttaagtccccataaagtgatttagcgtgtcactcatcaggtttacgaataatgtgatttagggacctgtaaatcgtcgagcaggtgttccactcaggttgaccgacacacctgaatttagaaacaagataagattagtataatgatatgcacatgtgtttacatgtttagcgtacatgtaagttaagtctgttagattatattataatagcggtatcaatatatttagtagtatattggatatcgataaatgtttgttggcttaagtactactcgacaatatcacatcggtacgactagagatggtggatagtactgtactacttgacagtatcacatcactatgactagagtatgactagcgtaccgagtataggttgatattatggtcagtagtattgtcgtacgaacattcttgactcattactgtgtcgacacggggatagggttatggttcggtgtatgggcgcctgattagaattcgggttatagttatgttattgtaaataaagttttaattattcacaattttcaataaactcgttgattagcaatgagctgcacaattgagttaaaaatcatgttaacacgcctaaaccagtagggtgttacacgctctaaatgaaagcaccaaaccattgtcgttagatttggccaaccgacaacgaagttgtatttaatactaatgcttgtcacgtgttacacaataagaataatgaagtgaaatagacaccaaattttatagaggttctgccccctgagtgagcgggtaacactactacataaaggtttattagtgtcatttttcaaatgacatatataataattgcgtcagtttgtgtaactgacgtatatacatgggatgcaaatagttactctattatgtcagtttgtaactgttgcccctgaatttgcccaatgtacgt

SEQ ID NO: 394313 - DNA, 844 bp, Cannabis indica
aaaaaaaatccaatttaatgaaaaaatcaatataattgaaaacttcatgctatcttcagctgtacatatatttttataaatcatccaaactaaataacttgatataaatgtatatattatcttacttattatataaatgcttatttaatagattttattgtgttactttttttttttgaaattaattaaatttagtatattctgttaacttctcaactcatatttttaaactaaaaaacaatatatccatttagtaaaacaattaaaacaatatatactaatataatattataaaactaaatgacagctttttcaaaccattgcattactttaaaactataaaattatgtctcatctttattataacatctacaaagcaaatcaacaaatttcaaattgaaaaattgtttcagcaccaatatttcatattgttatggaattcgttctatagagttggagattatgcagaaattttctatctaaaaatataagcattgctatcggagaccagtagtgtttagtactttttataagtggcgttttacgattatttaacgatattttcaaaaaattattttcataaatcgagactcagtatgacaccaaaaaagatactaaacaccactggtttcttttgagatttctcaaaaaatatataaacaaagcctcatcactcatggcagctatagcccagaatctaaaacactataaacaagagaaactgatttattttattttatttataaattcattttttttatggagtaaaaacagagagaaatgacaacaactaacaagaaatcaaaaaggaaaagaacataattgtaatgtatatatatatata

SEQ ID NO: 394314 - DNA, 739 bp, Cannabis indica
cactaagctaggcttagtggcttctagccaagtacactctttcttatagaatttgtgctttgtggaataagaatctttcctctgttgcaaactccgctcttttagcgaacttgccattttcgttataagttttcccctcagggtgtaataatttttttttttagaaaaatattttatccattaaaatttttatctacactactcatcacactgaaatctaaaacttatgtattttatttttaacaagaacttatgttaaatttaatcctatgaaattatgtcattacccacacttaaaataaaaattaataagtaaattaattttaaatattcttattaatcattaactagtcataaaaattcaagattaaaaatgtaaaataagtttatcatcatgtgaagatattctcagattgttttcgtctagtacaaagtatagattgtaaagaacaaattttttttatgaatttagtattgtatttcatgatattttttatcagtgggtttctttttctttaattatattcttattataagtgagctaataatattgggtgattctataatacacactcttaaaatggatgtactgatacacccttaacttgtttcggcatctagaagaattttttagtctaatttttttcatattcatgtacgttatatctatttaagatatcctataaaattttgaaaaattcggaataatttacaatatagaaaacaatgttcaaacaat

SEQ ID NO: 394315 - DNA, 2815 bp, Cannabis indica
gatagggtgcccgatagttggtctgacaagggaccattataattgttcatgctttgaatgtaatttctagtatgatggaggacgatggtataggcccgatgttgggccaatgctttgctacagatggtctaacttgtattttcttgtgttttctttttcagaatacaatacttccacgccttataattccagttttagagcattgcatatgtcgtatcacttggtgtggcggtaatttttactatcaaaagattaaagaaaaatttgtggaataccaattatttgaaagggtgaaggaatccctttttaaataattttttgagagagtaccacctaaatttttgggtgcattgatccatcaattgttcatgcacaagattaaatctaagaaggaagacgaagtccacttctatattgtaaagaagagatgtagattcagtcgaaccgagttttccttggtgatctggttgagcttgttacccggacctacggagcaagaaatagaagagaaagcaaattccaatcagttgattgtggaatacttcaatggtgatcaatccatcacatttggccaattgcgcaaagttttcaagggttgcacagaagctgatgatgtttacaagttgggaatagccttatttattatgggagttctcactagtaaagaggagaagaccatggttcctccttttatgaaaaaaatggctgacaacctacaattatatactataagtacctgtaagaaaagatttctttcaacaagttgatagaaacttgtaataaagacttcgtagaagtgaagaaccatacgaataagaagattgaaagggagacttctcaaaaggaggtaaagtactcaacataaggctatattgttgtgttgcaatattgggcatatgagtccatattggagctggctaatgaatttgtagtgagaaaatcgcgtcgttttcctagaatatatggtcaactgggagagtaaggacaaggtgacacttggcaaggagaaagtaataaaataatttgctaaaaatataagttttttacactttaaatttggtcatatttattttattttaatttcaatcttataatatttctgtttttatttgcagttgacaatgtactttgtgttaggtcctcaacctaatgaggaagcatttgtaaggactgtcaccagaggtgagtcacctttatttattgacttggaggaattggtgttgggcgacgatgggcaaccaacttaggatgttttgcatagccaggcctagaatcttgcctcaacattggaagagcggcagctgtagcttgaatctttagagagactataccatctccaccttttccaccacaagaggaacttcatgttcccctatttgcatctattactagcacttcacagcctcaggaatcagtcctctgccatattggcaaggttggagagtgttgagagggaacataattcttcgaagcaaggccaggctgctattctgaaagggtagatgaagattatgggttacttgaagactctaatggccctattggaagatcagagaaggccaaatatagagacaaaggtataggcacaccccgagtctcctagagatgattacaaacctgataatgcagctgatgcactccatatacctgagaacatcacgtccattagagatactcaagaccctaaggtccaagttttagacatagctccaccacgagtggagaagagaccgaaaaagaggccgaggtggtttaatgagtacactaaaatgaagaagaaggcgaagccatcaattgtgaatttgaatgttgatccacttcgactagttgataagaagttattgttgagtctctagaactagtgtatatgcgtcattgggaatatgtatcgaatggagtgcttctctagtatacacaacccgagttagttctagaagttgttcagtaacaatgaatgactttctgatgatgtaagtttctaaaattgcgtactatttattgctctttttttcatttaatgtgctcgttttttacttatttgtatgaattgtgtagcatatggatgaaacatttcacatgatgagaaggcaggtacacttttacatagaggtgtataaatgccactgcaccatcatgcccactttatttccttcagcattgaagggtcgatgggatgctttgaagggagatgtagagcatcgagactttgtttgggatgagtccttattggacatgatttgtggtgatgcagtccaatttgccatcttgggataagaaagaatgcatatacatgttcatctcttttcttcacaattaagtcattgcttagtgaaaatttataaataaaatatagtctaattttagaattataattgattaattaaaaccaattaattgagtctacaagtagtattatatcaactagtgtggggaccatgggcctatatagtcaagcttccaataagtagctatagaatttaccaagtaaattctctaacttattcttgtgccactatagattcagaattgcactcttaattatatagaatgctctatatgttttacattatagatatactatgaataatctattgttataatccaaataatcaatgatcctctataaatgatctacatcgattagagacaaatttaccattctacccttcaatgtatttgatccttaaaatacttaactacctataaatgatattttagtaaactaatataattactgaaatgagtactctactatttatctttattaaaccaagctcaaaggaaattatcatttcacttctatgcatttataaaa

SEQ ID NO: 394316 - DNA, 536 bp, Cannabis indica
aaaagaataaagaatttcaattaagctagtataccagttttgaaaacttacctcaaaatctatgtatatgtcagctatgtgttgaatgttgatccaatcttctcctgtttctctcttgcaccttggaattaacagaggacaatctgttatgtacaaagtagtaagagtacggggaagtcctactggcaagcactctaacttttccaacttataaagattcaagtgttgaagtgaggtgaggtggtgaaaaccattggcgtttagagctgtaagcttatcaaagctagtaatgtaaagagctgtcaaactaggtgggagcaacccttcctcaggaaatgaatcaaccactcctctataattcccaagtattaattcagtcaactttgagagtctctgcaaattccattgcatacgactttctatcatggtattgcatgatttaatacttagactttccaaagaaacgggcagtaatcccatttctgaaactgactccaaccttgaacacatctctattttcaaacttctaagggagg

SEQ ID NO: 394317 - DNA, 1294 bp, Cannabis indica
gttcagggaagattcttaacaagccgtatattttaggggccaaaatcaatattgtcaaaagttcagggcacaaaattactaattatattttctttaattaatattttagattctgatcataacttagacttggacccgcccccgatcctgatcttcctggccctgacttaaagaaaatcaacaaatgaaaataaaaatgatatttactgatgacacttttgttttttctttttaaaattgaaaaataaaagtggttataaaacacatttttgttctttaaaaataaaatttaaaaacaaaaattttatttttagttttgtaattaaaatttaataacaaaaatactaccaaatgtcaccaaaataaattcactaatcaaataaatgcaactaaaagtgcacaataaatttgtactataaaaaaaaaaagtacacataatcaactatttgagttttcactctaataataattaaaaaaaaatagagttttcacttattttttctcccaaaatagttttttttgctaatttttacatcataatgtaattactcaatttctcttcttcctattcaattgataaattgagttaaagaagtttataatctaattaagacttataaaatcaatctgtacgaaaacttcatattggataaatctccatattaattgtttcataacgaaatacattcaataagttacaaggaatataaagcaagattttctacaagcgtcaacatactattataattcttggagtagtcggttctgtttcatgggctaaaatcttatagctctcaactaaagctctttatagcacaaaataacaaactcttcaagactccaacaacttatcacgactcaaacaaataaatataacagttttataattgtttctcaactaacgttctcagtataacacaacaaaatacatacagcaacaacattataaaagaagagtcaacctatccatttgaaggaggtgtttgatccaaccattgagatagaagaccatagaagacattacaaagaccatatagaagcatggataaacatcgttttattaatatatggccttgatagggcaagggagtacacagctgggcccctatcatgctggtaacacaaggtgcttcataagtcacctggtcaaccccctctaaagagcttattggggttttaacggatttccaggaacatagatgattttagctctccatacatatgtgagtggaaatacaaagaaagaaagctaaacaacaaaagactcccaaccccaatgaggtgcttggtgcaa

SEQ ID NO: 394318 - DNA, 1044 bp, Cannabis indica
agcaaactcaattcaactaaagttatgtaactaagtcccctctatatataactctatacatacatgttatttggataattttagataaataaattatttactgatttagagatctagagagaaaacttagttaatcagtattatactatcaaattgatgcatgtaattggtatgaatcgatcaaatacatatacttaattattatatattaatattattgtgttttagattatatgtaaattttgtatcttagttatttatttatttttttcttaacaataatatataattatataattttataatattaattatctaaaatgctaatatattgataattatacattataattatatataattttataattatatttaaatctagcaatgagaattgcaatgtcaaattacgtagttacgtggttaacgcacaaatacgccaatttttgtaattactccactcaattttaattacacaattcctttccaaatgtgcaattataatgtgtgtaaattaatgagatacttattataatttttttaaatatagaaaataaagatacttttacaggaagtgacacgggctgctacaaatatttataattttgtgcatgtatattagaataattagtaattttaatttaccttttaaattttcgatactattaatattttcccttaaaatatatgaattgttaaaaattttccctaacttttatatttaataaaatttagtctttttgttaagttctgtcttattattccgtttaaatgctaacatgtatttataatttaacaactttatcccctaaattttaacaactatcgaattgcacctcttccaaataaatatgagaaagatcacatgtttttttttttttgtatatcttaaaaaatttaatttaaatcttagaatttttttttaaatgattaagaaaattataaaagaaataaaaaatttaaaacaagttaagtgatacaaaaattaattattttttatttaaaaatctgtttagataaaaaaaataatatatatattaaaaa

SEQ ID NO: 394319 - DNA, 497 bp, Cannabis indica
atattcaataaaaaaaataaatagatttatattgaaaacaataatttattatcttgtttattatattgtttgaaaagaaaatgagaatgttttaatttaactaaattgtcatgtacttatcttcatatgtataaatttttcaagagcatattaatctttttatttttaattacaaaaatttgaggacaatctttttctttattttttttttctaatttatgtggccactagcttttctattatacaatttaataaacaaatgaatgaaaatcaattaagtaaatatgccattaatggttcgtttggtacatcgtattgtattgtattgtgttggattgtgttgtattgtattgtatgttgggttttatgccctaaataaaactcaatttcaatgtaatccattcaacatcaataaagaaagagaagtatttttcattcatttgtgtatgttttgggtcaccttatcaattgcttgtctttttgatttataaattcat

SEQ ID NO: 394320 - DNA, 1192 bp, Cannabis indica
ttgaagaacaggtagtagaaaaaaaaaaacaggtacaaacagaggagtttggaggtaaatgagtgtggagatgagaagtgtgaaagtgtaaaaggaaactaataaggagcttaattggaaagaaagcaaagcaaaagagacaacagagatagaggtgttgatgggtattttctttctttcttctccttttcttgttgttctcttttctttgaaattccatctttttcttgagataatggtttgttgactaaggtggtaatgttggttgggaattcattaaagtaatcaatgcttttattattattattattgcccaagcttaagctatttgtggttgatgtgatcatatcatatcatatcatatcacattttagtttttacatatttgatagtgttgatatattctataactaagttaatcttttggtcttgaatttgatgaaagtttagacattgactaccgtttaccccaaaagtgaagtaaataatgatactgatggaatccttgtagtagtaataactctggccctcatggtaggtgtaacaatgtttagcattgttattggttatcagtggtgcccaacactttttataagtgacatcttacgattggttagcaatattttctaaatattattttcataaactatatgagacccgatacttaattacattaatagcgatatgaaccgaagagaatattaagcaccaatgatattttttagtaattctcaatgtttagtacagtttaacaaggaatctgaagcctaaattctaagttgcagacgatataatctaggccaaaagccttccactttcactgacaaaaattaaagtcatgaattggtaggagtggaccataagtcatgtgaatggacattcttcttttttcttctttggtcaatgtattctttgcaaagaaattgcttaccaatatatcatatatgtatcacttttttaacaacttaatttgctaatcttatattatcattggatgtactaaagtaatagtagaaaatggccagattagatggtacataggagattgtaaacaaaaatagggcttgcttctagttttggtttgcattgcattttatctaatgtctagttatatgtttgaaaaggtattcaagtttgtttattatcttacacaatagaacaaatgctttatcagtagttaataatttttata

SEQ ID NO: 394321 - DNA, 1059 bp, Cannabis indica
ctctctctctctctcctctctcgtttctttctcgtttgaagaactgtgttcagttcaaatgtgcaatcatgcatggtatacagatctgtagaagtcgattatttcccaacagaattatatgcaataaattttttaattgattttaaacgaatgaagatcacccatgcctattcatctccaactttgaatttgataccttaccatcgttaaccactgcgaagctagcaaatatatatgaactcaattccacccaagctctgaccattagacgccgccaaaagttcaatccttcaatcccaaatgcacgaagtcctctaatgtcgtggttatgcattatgctagaccttgcggaaggtgttgatgctcctcagtgcaagaggcacgaagtctccctagtcactcatctttctcttttgttttacttttaatttttattttgtttgttagaataaaagaaacaaaataaaatagagaggaataatcatgtgtcgtttataatattttaaatacaacattaatggcatgtttgatttgttgtaatgtgaattgtaattgaatcaaattatctattacaatgtttgctttgcttttaaaaataatgtaatgggattacattgtaatcataattacattatataagggaatccctattacattaaaaaagctatgtaatgagaattacattacaaaagactaaataaactaaagctaaaatgactctaatactctcttttatataaatataaaaattaaagtaagggataattttgtcaatttatcatttattctaatattcattttaacaacaagctaaacatcttaatcaattctcattactatttttattccattacattactattaccattaccattactattacattctaccaaaccaaacattacctaagatgacatggcgtatacatattggataaaaataaaccttgggatgttttttttggacaccccatagaataactttgctatatttatgtatatacacaaagataaaaaaaaatagtttgagaaaaataatagagagagagagaaagagaaa

SEQ ID NO: 394322 - DNA, 682 bp, Cannabis indica
attattagattctcaaaatagaattatgtataagatatttctaagaaaactttaacgagtgaattaagaaaactaataacatgaacatgagttcatgattactcaaaatttacactgatctactacatcattgttataatatgaattaggtcgttatagtaagttgtaagtttgataaagataactttattcatattggtccttattatatataatctctgttatatacaacaccttcacttaataccatactacattaataattcgaacagagattacttgcaccgaaaaatagatatcagtgaaccgtactagcatctattaattaaatattctgtaacttgaatatattattgactattttatttatagctaagtgatcttagttctttgtacaacaacaattaagtcacaatttcatatatgaataagaaattttctaatgtttatctataaattattcaatgtattaaatattaataaattaacattcatgcatatatcataatgttcaactttttatcaataatcggaaatgtctttataagtttttcatagcataaactctaacataactaggtgagtattacacaaattcataatatctataatatataatataggctaattagtaattttttcccccgaactttaacatgtaccaaatcatgccccctgagct

SEQ ID NO: 394323 - DNA, 1965 bp, Cannabis indica
ttgctagtttgagtatttcattctggagtacaccagtttttattgtgaagaattacattcacttgcaaggatagagatatgatgattaagttttagggaggactgtctttctgagatcgttctttgatctggttattaccagttgaagattcaagagtagggtttttacaaagcaacttttcacctgatgactttgcaaatgttatcattaatggtattttggtttcttcaattcaaaggaggcatacgagaggcctttagatagagcatgaggtggccatagagagtattttgatagatttagtaatgaataagcagtttagggttgatttcaacccaggtcagcagctgaaattagaggtttctagaattatcaggatgttatggaatatttgtcgaagaattcttatgcttttagcagaaattaaatcgaaagaattaaaacataagttaaccttttgcaccaatgttaacattgccagtcaataagaagaaattataatttaatgtgacacttctaaacaaagattagattgtgttctaatacaatataggagagagttatttcctgtgtacttagatcattgaaggagtatgaggcagtgacgacagttagagttaaatgaaatttgaatggtgtgattctttaccactttggaaagtagattagtggtggatgctttaaattgaagaggtctaggataagtttgtagaaagaaaatatcttaccaaaagttgctagaggtataactagaaagggattgagttcgtggttggagaacttattaatatcacattgtagttttatttattcggaagagttagaatagctcagtagggtgacttcgaattacagggggtataagaaaagacttggaaaccggtttggcaatggactttttgattttgtttgaagggaccttatgatacaaacaagattggtgtatcagtcaaataaggatattgaatagaaggttctaaatgagtttcatactataccatattctttatactttggagtaactaagatatataagattcagtatagtttctttatcagagtggaatatgtttgtggtggattagtgtgctaatctatttatcaagggaatagtttaaccctatgattcttcaaaagtaattacctcaggttgagatttaaaggttaccactaaatgctcaaggagtctgtgacaagcatgtgtaatagattttaagggttcccgagataagcacctcctctctgattgagttttcatacaataatagttatcagagtactgttgatgtggtactatataaaatgctttatggaaggaaatttcgttcatccattcattggaatgaagacagtgaatggaggaatcctagacctgatgcggtctaaggaccgagtgaggccataaaaaaagattccagatcgtatgttagctttatagagtggatggaagagctatgctgattcaaaatgtagagatattaagttccaagtttggaattttatctttctttaagtgcttccaatgaaaagaattcaaagattgggaaagaaacgaaagttaagtcccaagagtatcgatctgtttaagtttctggaaaggggaggttagatagcttatcggctagccatactcaatgttcataagtatgaggcagatatgattcgtataccgagttacgaaaatatggaattttgaataaatttgtcatgtgagaaatagtcgattaaggtttttgaataagaaaagagaaagtattgcaaaataaagactatatcgtgagctaaagcgttgtagatgaacaacaagattaaaggcaacatggaaattagagtcacggctgcgggagtggtgtcccgaggtgattagacaaatttcgaggacgaaatttctataagaaagggatagttgtaatattccaaaaaattattatgataattaagtgggcatattttattaaatatgt

SEQ ID NO: 394324 - DNA, 1242 bp, Cannabis indica
atgtaggtggtatcattctctaataattcacaccccaacccccatataagaaaatataagattaattaacactaattaagtcgatcattttaataccaattcaaaaaataacaagatgatgaagcaaaccaactcagatcaaacaaagttgaaaaccaaatacattaatcagaacaaaattgataataactcaaataagatcaagacatgcatcatttcaacgtctaatttgagcaaattaaaacaaaaaggatatttgcagcaaaaatagctcatgctttcaaattaatacacttgtatacatcacttgtttgtttttttttacggattaaatacctaaaattatatttatgttactaccaatccgttaagtactgattggacttgttaagttgccatgtatgttttcattggtccattttatattaatttttaaaaatgatttaataattataaaaagtaattaaacttaaaaataaattacgtagtctttttctaaaaaaataattatagtaacacatctaaaattaaaatttaacttaacactagcaataatttattgaaatttaagaaaaaatggctttcgtgtagtctttgccacttgccactttcctatttgtattcttgaagaaactttcttacaaacataatacttttccaaagacgttaataaatcgttagatttctttcccattaacaacaaaatcaatagtattagtctttgtctccccactttttgctttatttgtggaattatggggcattccgagaacttttgtccccgacgtttcgaggttggagagggctagataatcaagccatatggggaatcgatgcgagtgagacctatacgtagaaaccacatgattggagctaaatggcttaagcagtttaatgctgccatggaagatgaatctgcagcaaaaaccacggctcatggtgaggtgtctcggtcgacgagggcaatggttgacgggaatcgtggtgggctggggtcgggtccgatgttagtggagaaaaattcgggtcaacgtgaggcagggataggcttatcaaaggatgtcattggagatcctataattgtggaagatattttaccagctgtttcgaataagaaaatatctaatgatatcaatgaggaggcttgtcttttggttctagatacgaagaggagaagaacgactttagaagatattgctggggtccatggcagggttgatgtggcaacgggccaagaggtaa

SEQ ID NO: 394325 - DNA, 1022 bp, Cannabis indica
gaaagtttaatggcagatgtatcagggtgtttggataagtacagagtgtttagtattgatgagattgaagaagccactaatgggttccatgaaagttgcttgattcaaggctctgtctataaaggttcaattgatggagacttttatgccatcaagaagatgaactggaatgcccgcgatgagctcaagattttgcagaaggtaaactctatttttaatatttattatttttgatagatttaatcagatgaaaccatttaatcacactaaaaaataaattaatcataccaaagtataatatttattattatttttaaaagaaaaaatttattcaaattttcctgtaaaaaattctgtattttaagctttaacaaaacccaattatcatctacacaccccaaagaaaaatatatttattagtgcaattttatttttttttcttttttaagattgtgtgattattttgatagttggaattgatttttctgtcctaattcacatctaacccgggcacaatgtaaaatatatttattaatcaggcattaggtaaatgtgtcatcatataagtatgagtacacttaattaaaaaaaaatttcttaacttgtttgaggtaggctttttataaaattatatatgatatatattcataaatttgaagggttatgttgttattttcaagaatttaactgaaagtttgtggcctgcatagtcttattaactttgagaatctcagccaaaagagatttatatttttaattcaagtaacttgaaaatggagcttcatggattgcttacttttataaagatttgtctctttgaaaaatatatgatcaaacttaaaaagccacctttaattttcaagaacgttaagataatgttctcttagttcgtttttctctctccataacaattcctttctttctaaaaccgagggctcaacttagaatcagctcatttcagtatgcaataataataataataataataaaaaaaaagtaatccttgattataacttccagta

SEQ ID NO: 394326 - DNA, 1102 bp, Cannabis indica
gattaaggagaagtatattagagttcattaaaatgtattttagaatgtatattatcttactattttacatacaaaaattcttttggaaccttatcttattatcctgatgataggaattcaagagtataaaatagtacgatacaaattgatacaaattgaagatcatcacttgttattaataattgacgaaaagttaacttaatttttatttattatttttaatttgagcccttatcaaatcaagaattgtctttatcgtatatttacacattaaaattataacaattatacacttaaattataaattttattctaaaataaattacattaaattatgatccaatatatatatatatacaattataaccctaagcatacaatatgagaataatttaatggaattccaccaaataattaatccaattatatatataataatgtttttttagtctattaaagttataagaactttgtgtatgagaatataatacgtgtactcaatagtatatatagttatgtccacttttcaagtggcttaatcatcattgatcatactctaaaaacaccttttttttttcaatttaaaatattattgttaattaattttcaaagtaatatatatttatttacaagattccaaatctccaatacgagtggctattcattgttggaattacagaatatagaaaagataatttacaaaaagaataaaacaaaaacgattagttgattcccattattttaattattatattattatgctttccatttttattaatatattattagcaattaaaataaaaaaaaatcaaaaatattaatttattacagaggttaatttaaactataaataaattaatacatattattttttactattaaattaataataaattggtgtatcattaaaaaataataatatatttgtgtatatatgattatgaaacttattaatatattttttttacgttataattatttaataaatttagaataactatttaacacttaaataaaataaaatattcatgagtgcaacagattgtttaaattttatttttcggttttttttttaaaaaattatttttagcgtgttaaattt

SEQ ID NO: 394327 - DNA, 1009 bp, Cannabis indica
cccttctccttttcattttctctgatatattttctctttttcattattttcctctcagccaaacataaacccaaaccaaacccaaagtaactcaagtgtcagctggtacgacttttttcgtttaacaaaaaactatagtcttataaattaataactcatcaattttgcaacccactcactatatattatataatagaaaaataggggaaatggccatgaaatgtgtgcatatatatcatatcctaataaaaaaaacaaaaaaaaaaaaagaaaacgatgacaatgtgagtgagggataggaacgattgaggtaaaggtcagagaaagctgaggcaacagtatggaggagttgtgacgaaatataacatataattccttcctacataatttaatatctccaaaatttgtcctactttttcaaacattttttggctttaatttctcctaaaaaaatagaaaaacaacaattttagcttgcttctgtattatttttaataatataaaaaaataaatgatactaactattttttttcttcttaaaaaatactaactatcctatggttttcagaagcacttcagctttatcagaatatcattaaaatatcattagaatataattaaaatattaactattacatattaaaatattttcttataacaatattcgttataattacaatatcatttatgtaaattatttttgaataaaaattataagatctattaattaataaattcgttcaaaataatagaacgcactttagagaaacagtcgtccaactaaagcacacgacctgtaaaaaaacaagagtctcttgccaagcaatgagccaacttatttgcagatcgttttacaaaacacaaattgtgaaggcataaaataccgctctaaatcgcttggacccacaccaagctatctgtttccaacatgactctatcctacgaatgaattgcaatccaactcaatgcttctttaatgcctattatctcagcaattttgggttgaaca

SEQ ID NO: 394328 - DNA, 465 bp, Cannabis indica
tttttcttttgaatgagaaaattaaattattgactaaacattatggaattatttattataaatctcatttatttttatctcgagcctttatcaatttaatgttatattttaatttccaatcattttttttttggactaaaaagactcaactagcaataagcctactctacaaaaataaggggtgagaatttattcaaagatagcatccgctatcaataaattctaaatacaatcattttttaattaattattctactatatttttcttttaagttgaaagtgaacaaaaatgtattatgaagtattcttttcttttctttttaaaattgttagaaagtgaaaataaactaaatgttcttagattttcatattatagtaataaagtaattcaaaaaatttggtcagcaaagatattataccaggtgataggcttgtagctaaaaaataaattgtctaagtcattgt

SEQ ID NO: 394329 - DNA, 1026 bp, Cannabis indica
aatttggacaacaccaaataaaaagagatttgatctttaattaaaaatagcaagtactcaatttaaaacgacgagtattcaaatgaagctacacaaacaaatggaaaagtaatgaaaacaatgaacacaaggaagtatagtggttgagtcagatcacggtctgcttagtccactattgcaaggatttatgtcttgttctattcctattggatcactcctttatatacaaggcaagtgttgctttactaacacagaacttgattgattatagaaccattttacattaaatattaatattaaattgaaataaacataaatggaataaatgaagaacaatttaaatccgattcactaaatacaacaacgtatgcgacttccatagtacgagtttcttgtccatttactcacacaagctccaaggctcagggtgcattctattaaaatgagactaacaggcctcgtacttaggtatctgtgtcctaatcgagtcatgtatctgcataccttgtcagcatcgatgacctaggacatgcgagtctcttatcgagtcatcgagcatgctaggtcattcagacaaactcgttatgtaaagaaatgatctttatttagtcgcaggagaagtctttatagtaattgcatatatcttggtacatgcacgacttgtataattccttcttggttctgcattacgcgaggcgtaataatgcgactacactctgtcacggtcacatcattttggtgagtttggttcaggcgaggtttattctcaagaagtcccttcttgatagctcaacactcctcaagggatgtgagtccacgtgtcattcttacgagagcctagtctcgagtttcaaggtagaaaaattcgcactataacactgttgggattttaagaccctaaaataaaacccattacaatctaatctgatttgttatcaaataaaagattagaagtcatttatgtttgcatgttgttttcatgtttgtggtttaatatatatacaaaatctgttaagtccagaacat

SEQ ID NO: 394330 - DNA, 772 bp, Cannabis indica
attagtagattgtaatcacgacatgtgacgtttctctaagtagaatgttacaacgtgagtctttattattagttggaactggtagacgtagatctgagcattggtctacactgaatgttaacatgatcaatgtaagtgttgatggagcgattttcgctaacttggagagatttggcatgggttgtttggctagggggcatgatgggagggtgaaggaagcctttaacagggataagcaaggtgttgttctttctgaaattgttgagatagtgagtattaaggaagccttaagttgattttatgaacatcaatagtcaaatgtcatattggagttagatagtcttatgtgtattcaagacattaatattaagagttagtcccacattgctaatgtgtggaaataaattgtgatatataagaagaatgagctactcctcccattgccaattggttttgagatagaaccttattcatcttatcctcaaattctaacatggtattagagccacttgtgatccgttgtgagcttaaattgccactggtccaaaaagccgtttgtgatccgttgtgagccaaagtgccaccgatccaaacagatacttccgctgtctccccattaacctccattttgggacctttcggccaatgtgtcaatttctagtgttgggtctttgacctgtttcaaaatccacaaatttcccgacgtgtacacccacaaatttcctgatatttagttttgtgggattctttcaaatgtcacgttcggtcctgt

SEQ ID NO: 394331 - DNA, 554 bp, Cannabis indica
tgttgatttaacattaaatttaaatttgtctaataaattttggctaagcaatacgagacttttcataaaaagtgacaatatgagtcacatcattcaatatttttaaaaataaattcaaaaattcaaaaatcaagaaaaaagatgtaagtaaaagaagctcatagacagccacctcaactctatatatttcagaattatataactagatagaaacgcatttgcaatttgtttctatatttttttgcgagtttatgtttttaggtaggttaaatataattttagattttgtatttttgtaaacgttattaattgaatattttattttattaaataataaaatagaccctgtattttttaaaattgtaaaaataggattctgaaataatttttgtcaaaataaaatttaataataatccgatctaagtatgttataacaaaactatttgtattttctggatctatttatgttagaaattatcttcaagttgtttatattaaaaaaaaaagttgtcaaaaattaagttgagagttctattttttattatttttgaaaa

SEQ ID NO: 394332 - DNA, 1222 bp, Cannabis indica
agtaattgcagagtaacattaaaacttttgagcgttgtcaccaaatagtgctgcgcgtaaaaatatagttcaattatttaagttgacattgacatgagctttacatttcaataaaagtgaaatattatattatatatatatgtgaaaatatgtgtaaaaaattttaagagtatgaagtttttatactttgcgacttttttgtacttttgtaatattcacaaataagagttgcttaaattcctctcttatcatattgtgcaattggtagcaggtcaaatatcataaataatatttttaattggttatattgaaactaatgctcttcgctaaaatattttttgatagatataaccaaaatgtgtgtgaaggaaataaatagtgttggaaaaagtaagactatatattatgtatatattatgactttttatataaatgtgttgtgcatggtgtggagtaatgtagctgattgtgatgaatctatctaaatggatgaaaatgacaaatatgactttgtattaacaaagtttcctatgtacatcaagtacatacatataatactacttcatagaatagatacttattaatttcacagttacaaaaagtcagagttttggtgttggttataaattgacactattgagttttgatgtcgtttttaaaatcgacacataaaatgtacatatatgattttccttttaatgtcagttcagaactgacactattgggcattattatcggtttaaaaccatttcttaaggatgtggacgaagaaatttggatacaggtttttaagccacactcacttgctagattagtgggaatgaattataaattaagtatatattagagagacacaaggaatttatagtaattcaatccatgtatcggacagtaatggaactatgtctacttcaagttttatttctcaggcgatggattacaaaaaagaaaatctaatttttagagagagatgttctgaacttatggctacttgtttgaacttaaaaaaatgagctagtggagctctccttttataggtgaatgaggtcttattaaatggggataaaatattccaaaaaatatatgaaaaatcgtgtttttgcaaatgtcagttgtatataagaaaatataaaaattggaagcgtctgcagaagcagaaagtaattctgctacatcaaaacggaacaggcagaatataaaatatttgcagaaaaataaataa

SEQ ID NO: 394333 - DNA, 916 bp, Cannabis indica
aaattaaacttaataataactcgttgtctgtctttttattaccaattgaatatttgtaacaagttggaaggtatgattagaaaatattggtgaaaatctaatccttctaagaagtatggagttagttggaagaatttgcatgctcataagtcttatagtgggttaggctttcaacacttgtgagagttctatgttggggagacaagcttggaggttagtctcaaatgagttttcactagttggtcgtgtttataaagcccattattaccctcgtagttctcatctctctgcatctttggggggataattcaagttttatttagaggagtatcttcgaatcttagtctctagtgaaaggaggagctcagcgttttgttgggtctgcaattgttgttaatattcatcgtgatccttggctaccagatatagagaatctgtatgtgactttccagttgattgggttggataattgcattgtgtctaattgtatggttgttgattgtagagaatggaatgtgaatctaattaatgatgtttatgagcttagggatcgtgagttaatcttgagtattctattgaattcctccattcaatatgatggttggttatggaatcatgatgtcactagcttatatattattaaacaaggttacaagctagtctcttcagccatctcttgcgttagtggtggctaatgtggattctgacatgtgaaagattgcatggaatttacatattccccctaaagtaggtcattttatttggagggcttacataggttgtttatttactaaagtgcaattgttatttgaacatgtacatgttgatagtttgtgtcctgtttgtcatgcagaggatgaaactatttgtaacaccctaactagcataggcgtaggattttaaacatactgtgcag

SEQ ID NO: 394334 - DNA, 1576 bp, Cannabis indica
tgttagaaaatgacatattattactagttacaattggtcactggttaccattttatttttcattctctgcttgctgcttttttgtcttctttcacatgtaatcattgggaaatgattccctctctccctctctcttttctgttaggattctcagaatattttcgttattgcaaaggtcctttgtacggccaatgatgaggtgtaatcaatctagaatgttcttgtaatatctatatattgaaatgaagttgcagaggctcattgagctgcattttaccaaaacctagtattcctattttttaagttggtatcaaagcttacgccggcaatatggccaccggagaagaaacccctcaaggcactactaggtccgcagctccttctccaagaggcagcaatgtcgccaatccaaccatgactgcacaatatggtgcatcatcctccggccctgttgttccacagtttggtagcacgttgaaccaaccatttgctctcaaactggataggaataacttttccttatggaaaacaatggtcactgccattgttaaaggccacaaactcgacggctacctaaatggtatgcgagtcaaaccacaggagcttgttccagccccaggaatcgatggacagccaggatttgggtttgaaatcaacccataatttgaacaatgggtggtcaacgaccaactcttaatggggtggctctacggatccatgactgaaagtatagccacagaagtgatgggctgttcttcttctgcagaagtgtggactgcacttgagtctttatttggtgctcactccaaagcaaaaatggatgagtacagaacaaaaattcaaacagtaagaaaagggtctatgactatgcccgattatctcagacagaaaagacaatgggcagatgctttggccttggctggtgacccttaccctgaagctttactagtgtctaatgtgttatctgggttagatatcgagtatctacctattgttttgcaagttgaagcaagggataaaacaacctggcaaacacttcaagaaatactactgagttttgatagcaaactcgataggctgagaactctctctggaaacagtaagtcttccaacaactcttcccctactgctaatcttgctaacaagagtggttcgagtggtcaatacagtcccaaccaaaccagtaacagaggcagaggaggctacaatggaggaaatcgaggtagatctggtggtggtagaggaagaggcggcagatcgaatggtcctaaacccacttgccaagtgtgtgggaaatatggacattcggctggccactgttacaatcgctatgataaatcttacatgggttctgcacctgctggaaacaatgctgatggaaacaaaacaagtcaaaatgttgctgcattcattgctacactagaaatgcttgaagatggtgcttggtatgccgatagtggggctagcaatcacatcacttcgatgtgaacaatctgaaccagaaaaccaagtataatggtaaggatcttctcactgttggtaatggaaatcagttgccaattaagcatgttggttc

SEQ ID NO: 394335 - DNA, 1105 bp, Cannabis indica
gaaagaaaacatcagcatttacttaatgttgctcgagcattattttttcaagccaatctccctataaaattctggtctgagtgcataatgacagccacttttttaatcaatcgcacacctactcctcttctcaaaaacaagacaccttatgaacttctctttggccacctacctgattactccaaccttagaaattttggctgccttgtttttgcttctacactcacggctcatagaactaaattttccccaagagccaagccttgtgttttcttgggttatccccaaggtgttaagggatataaactctatgatataaatgataaacaaattgttatatctagaaatgtggtttttcatgaaaccatttatccttttaaaactttaaatactgatgcaaaccaaattgatcctttctctcatatggtttttccttctccacttatttctaacacaaatgtgaatgattttcctgttatttcagatccgaacacagtttccaacaatataccacaacaacaagcagcagtgcttactcctagtgcacaaacttcaccacacagcagtattcctgctgctacttctactgaagattttgcaccagcagagcctacacatactgctgcagattatacaccagcagtaccattatcacaccctgctgcaacagatgagatgcatcttcgaagaactacacggcaaacaaaaccaccagcttacttgcgggattatgaatgccattccattcttcaagatcaatcctctactcctcatcccctcagtaaatttctttcatatgataaactttcaacatctcataaacactttattcttgctgtcacagctttgttcgaaccacgcaactacaaacaagcaagccaacacaaagtttggaatcaagctatgcaaaccgaactctttgccctcttgaagaataaaacatggacttatgtcaagcttccacccaacaaaagagccataggatgtcgctgggtttacaagatcaaattcaacagtgatggtactgttgaaagatgcaaagccagactcgttgctcaaggattctccaacaagaaggacttgatttttttgacacattctcacc

SEQ ID NO: 394336 - DNA, 865 bp, Cannabis indica
gagaacacaaaacaaagacttgaaaaagcaaagaagagaccatttaatggcatatgcataaacacattaagagaagagttacaagaagcaaaaagagaactacaaaagttaaaggcagttaatcctgacattgaagatctcaaaattcatagaaaccccgaaaagaatcgaaatcaaaaccgaaaagagtgaagatgatgatgatgatgatgatggtaagggatattttgatcataataggaagagaaatgtgaagtttgcaagtccaccttcactagctcaagttattgttacaagtaatgagtttggtggtgatagaagatctccttctatgaagaagaataagagaaagccattagtgcctataattggatggttgtttcacaacaagaaaaagggtattcaagagattgatcaaacttctacacttgatgctcgttgttgatattgatatatcattttgtgcacaaacacaaaagttttagtgtctttttttattttggtttgaagagagaatgaaaagaagagctcttttcattttcacataaggagttttttacacttgccaaagttttcatatgctagtttgaataagatatcagagagagaaacacataggagggaaactaatttttttctttcttttttcttttaaagaaaaataaaacaaaaactctttgggcttgggcttggccttgggcctgggcctctgatgaaatgaatatggtgttgtaattgtaagaagcacaatttggaggaaattagactctataccctttttatattgtcctatcttatttttaccctcttttttaaagtctatcatttttacctttttttttttaaatattgtaccaattttgtc

SEQ ID NO: 394337 - DNA, 1135 bp, Cannabis indica
tgcaccagattccccagtttttggacctatgtcattagggcctacaccagttaatccccctcccccaccagtatccactcacccaatgcaaaccaggtccaaaataggttctctcaaacctagagtgttagcagcataaattactagagctaatgatattttttgagcttcttacattgcagcaagctttggcacatcctaaatggagggcaactatggatactgaacgcattactctcatcaagaataaaacatggattatggttccttatgttgaaggcatgaccttggttcaaaacaaatgggtgtacaaattgaaactaaacactgatggctctgtaaatcgattcaaggcccggctggtggccaaaggttttcaacaaaccccttgcattgactactttgacacattcagtcctgtggtaaaggcttccactattcaactcgtatttacatttgttgggacctatgggtgggaaattcagcaaatagatattgacaatgctttcttaaatggtgagttgaaagaaactgtttacatgcttcaacctcaagggtttgaagaccccaactatcctaatcatgtctgtaaactaaataaagctttgtatgggcttaagcaagccccaagggcctggtataacaagttgaaacaagctcggctgtcttgggactttcacaattctatctccgatagttctctcttcttcaaaaataacaatggtcatctaatacttgtgcttgtgtatgtatacgaaatcctgatcactggtgccaaaccataggatgtacaccaagtgatttccgatctcaatagcaagttcgccttaaaaatacttggccagaattattttcttggttgtgaagcacaccaggtgggttttaacattcatctctgtcagtccaagtatgctatggatattttcaaaagaaccaatatgcttgacaccaaaccctgcactacacctatttgtcctggtcacaaactctatacctctaatagtgagccattcaatgatcccaccctttacagaagcaccattggttctctgcaatatctcactctcacaaggccagatccatcctttgctgtcaataaattaactcaattaatgcaatcactaactgttgctca

SEQ ID NO: 394338 - DNA, 816 bp, Cannabis indica
tggtcccaaccctagtactatactgctacatccatatgaaaaactcgtgcccatcgtgaaggcaaagatggagataataccattaagttcttacccagaaagccattccagtattatactatggaaagagttttagacggtggcttgttccctgacgacactaaacgagagagagagagagagggagtttttagacggagagagaaagaggtacctgctgtcgcaggtgagctgttcaggcggtgcacgaacagtggacggccgacgatctttcgaaatcgtggacagatgatgcacgactctgctgggtttagaaatgggggatgtgtctgctaggttttcgaaaataggggacacgcatgaaaatgaaatttaattttgtgaaaactcaattttacaaatgtattgatcattttgcttcagtgaaaactgtagcaaatattttaacctcacttttgaaccgaagcaaaagaaaattggctcatttttccaccgatgcaaaatgtgaaagacaatttttaaaaaatttacacatttttcctcggttttactttttgcgttagagaatgaaccgacgttaattgatattttttagcttcagttatacactgaagcataaaatctccccttattttttgcaacggtcaactattttggtgagatgcgttgaccgacgcaaatagtacatgtagtagtgtttatatctttatatattaaaagtgtctatttaacggcatttcttggtttaacagaatatactttaaaaataaaagaatattctgttaaatttaacgataggtttgatctcccgttaac

SEQ ID NO: 394339 - DNA, 661 bp, Cannabis indica
ttaaacttgtccttccttttaggcttttccctcaacaaagcttcaacatcttctcttgtaaactcaatgccaccacactcagagccggcattgctcgccggagcactacccggactcatatcatatcctccattaatgtaaggaaacgagtgccggcctcttccattagtggctgtaccaaccatttttatggtcacaccttccaaatcttagttctttttctttggctttccttgtctttttactttcttttcaaactcacttcatcaccaaaaaaacccaagtaagagaagaacagagttatgcaaaaaaatcacagaaacaagaccccaaatgagaaactcagaaggtacccagtaacgttgagaagaagaagaagaaggaaacccagtttagaaatgagagtagttgatggggttgtagctgtttgtaaaagtggaggctagtaatgttaattggaagccatttgaagaagagaagagaagattagtagaaaggttggcgtggggccatgaattgtgttcaaagctaactgtatatctcagccgttgctttaacgggcaggaagatggattggatgaaagccattctttttaattaaaataaaattaaggataataaatactaaatactataataaatatttttgattttttttttt

SEQ ID NO: 394340 - DNA, 1369 bp, Cannabis indica
agattacggagaaaactaaaaaattgaaggaaatagtaatcaaattaagagttacaaagtttattattttaattatttttttaagtcttgaagttttgaaaaaaaaattactgattatagaattaaaaaaattacaatataagaaaaagtaagatgtaatactatgttttaatacacaatataagattatgtaacccactaacttagccaaataaaatactaataaaaaatgctctcactaacattttcctataattataatatataaattataaaaaaaaaaaaatgagataatttttcttggtaccaaaaaaaaaaggccctagtaagtgtaaaagtggatcctaccaattaataattaaacattttcttcttctcttgaaataaaagtagaaaaaaatatgactatactatgcatcatgcatgatcatcactctaaagcaaatttattcagctttcagaatattttaattatcaactatagtttatttgattttactttgcagattgtcattataatcatcgtctgattaccagaaaaaaataataataataagaaaattttgaatttttaaagaaaagataaaagataaatgaaaaaaataaaatattttttctcatctttttatttgttagtaaatttttaaaattcccaaggacgaagaaaaagtattcaaagtcttaatttaattgggaatgcttaaagaacaaatacaaaggcctaagattgttaaaattggtgcacatctggtaatttcaagcaaaacaggcttggttcacgtcatcaagtcaactccacacaagtgtaaagttgatttgggggcacatgttaacccaaaaacattccctggtgatgtggacattaatgtttgacacgtggcatgaagaatgatgtcacggagtttagtagaccaaagtcatagcagtcgacttgggagggaaccttagcactacacctatctccaggatggaagttttaacttgaataacttaaatccaatccattatctttcagtattctttaccatgacgacatggagcaacctaatgaaaggctcaggagctgaaaatatacaaacctacaacccggaagtcaacctaggcacctagggtttcacctgttggaatatattttaccaggatctagatctactaacaagtatatttttaacatcctaatattaattactagaacgatcaaaataaatacataaaaggtatgagaaaccttacactggttgaaacagaattaaatgactccttctgctcagatctctaacccttgtatcctttctgtagcagagtatcaccaagatctaaacccgattctccttcttgttgtttggattcttcacagtcttacatacta

SEQ ID NO: 394341 - DNA, 806 bp, Cannabis indica
ttatatttgtatattgagtaaatttcattttcaacactattttgcaaaagtaatatattaattgagctctttttttttttttgttaaattatagttcgaaatttatattttttaaataataaaaaatagtattatatgtttaattttaatcattataaaacttaattaataagctgatctaaaaatatgttatagttttattgtttaaatttcttggggtagtttgtctcatgtagttcattttctttaacagttcatggtttgacaagcatacccttcggttaaacgagaaggttcatgcacgtgcagcttgtgaatatctgcatcgcaaattcatgtgtaattcttatcactacgtcaaaaaaagtgttatgaccagttctgttatattttttgctatttactagtttagaaaactaatattgagtcggttatattagaaagcttaggagtttttttttgtttttattatttttaagtctagtttttttaaaaatttatatagcaacccacataaaaattaccagaataaccatcagagcaatctaaatagtaaaattttttaaaaaaaagttaaaaatagtatatagggtaattaaaaattaaatttgatgaaaaatgagttcataataggagaattaccccacatactatttttttaggcttttttttttctttcaaatttacagtttaattttttaaagtggtttttctagtagttcctgtgcgacttactatacaattttttattgtgatttaggttgcgccgctagttgcaaagaatttttatataaaattctgtaaaa

SEQ ID NO: 394342 - DNA, 844 bp, Cannabis indica
tttttttttgtattaaattaaaaacttcagagaatgatttagtgagaaaaatcctaattaacctttattttatttagcaaaatagatttcgacctgtgttgcgattagggttgcaatttgttgcaaacatatatatgtcttgtgagttggtgagttgcatcttgagttgcgattagtgttacgatttgagttgtgattcatgttgcgatttaaggttgcaaagatgaataatataagagagcttttcaaagttaggcaattgtaggtggttgcagatgagacaaatctgattttggcaaggaaagaatgagaatgatagaataaaatcggcttggtttcgatgaggaaacacaaaaagaagaaatgatagacgtattagatttcaaataacattgattatatatataaatagacgaaagaatatatacccctaattaagtttttgttgttcttgttctgcagtttcaatatgagttgcaatatgtgaattgaattcaattttaggaatcttgtggtatgggttgaaatatagggatttagggttgtgaattgggcttaaatgttttgtgttttgtttttactaaaatgggtaccaaataagagaacaagcataataataaaataaaaaaatgcagaaggaagagatgctcaaggtctgtaatggttgtaacgtccccgtttcaagcctctattgggtccttacacccacggactaatgactcttgtacacgagtacgctactctggctgctttatggactgataactgaccctaaagaccaacacgagtgttaaattgccctaggccaagcacgcttaactgtggagttctttcgagatgggct

SEQ ID NO: 394343 - DNA, 790 bp, Cannabis indica
ggaataagtgacagcaaaaaaatgatgacaaactaaaaaatcaaatcatgagcatgtttcagtaacaaatgatgcatctagccactgccgttccaagtttcaagatgtccccaatgccttcaattccactgattccaccatttcggtcgcctagcattgggtcttttttaaagactgtccctccggatgatgacgatgacgatattgtggacttgtagtttcattttttttttgtactgtaaaaatattaatttttattaactaacgatacttttatttagttttacataatttatatagttttgtaattataataaattttgattttataatatatttcagattatatttatttattagtaccttaaaaaatttgattttagttttcatttaattttaattttattataaatataattatttttttaaaaaaaaaaatgttttgccggcaaactatatctcaccggcaagccagcaaaactaaagttatattttattgacaatgttctgtcgacgaaatattatgtcagtagaatttctgcgggtaaataaaaattaggtgtgaattggcgcaaaattttatcggcgtaatatttcaccggtaaaacttcgtcagggacctttctgccgactaatcattaccggcgagagaacttataccgactaattaatttgccgaggtaaatagtttttctagcaagttatggtgatcgccggcaaaacaccttatgctaacgaattattgtcggcatcctttgctggcgtaaaagctcactggcaaaacaatgcc

SEQ ID NO: 394344 - DNA, 1333 bp, Cannabis indica
gttacaagctcagtcggggtctgggttagttgtgttgacccaaaacttgccaaggccatttgagtgaattggaggtcctaagttggctaaagatgctaaatctttccaatgtgactgttgaaacggatagtctcatcactgttcaagctattaaaagctcgatcaatatgatctctccttttggtagttgtattgatgattgcaaatccttgttgtctgatttggaaaatgttaatttacgttttattaaacgatccgctaatcatgttgctcatggcttagctagagtttcatggttgcatgttgattgtagctattcggtgacttctatcccgagtagcattcttgatgtaattgctcaatagatgatttaataaatttacatcttttattcaaaaaaaaaaaaaataaatctcctattacaaactttttagtcaacctccacacctcaaaatatatgtcataatattatttttcatagcagtacttgttattattataatatcatttctgtaaatttttaaataatttacattgaagttttttgaacacatgtggtaaattaaaatatcatgaactatattgtcaatactgtaaattattcaaaaaaactttaaaatttacaggcttgatattataactataacgaacatcgccataaaaaaaattaaaaaaaaaaaatatactctagcttaagttttcgagcgcagagattgactaagaggttgaaataggatattcacggtaacactcctcttatttttgttttgttttgttttattttttattttagtttgatccctaaagaatccctcaacagccccttaattttttttggttacgcaacccaactcaataataagaattatttacaaaaaaatacatttagatataataataataataaaggataaagttacattactaagaaaaaaaaaaaaaagtaattgatacataacaagcaaaccacataaatattaatgcatgacttagacaaaaaaaaaaattaacaactcagtagcccaaaaccaaacacagaaaatacaatttagtaagccactgtcaaaactctttttgaaattagtaaacatggaggagttgttaaacaataataatataaagctcgccccaatcacgaaactatgaaggaccaaggagtgcctaacaaaatctttataaaaatatatgtacatgtttaaaaattacataaataaaatatctattctatataaaatgaggctatataatagaattcttggtttacgaaaaattattaggtgatttttttttaaataaaaaataacaaattattagatgttgtcacgtaaagagt

SEQ ID NO: 394345 - DNA, 1302 bp, Cannabis indica
agaacaatatcgatatcattcacacgatgcccaacaatggccaatgaatcacacacatattttattttatcaatatagccaaagattgacaatgtacttttagacatttctccactgacttttaagttgcagaagtttagctttcgattggatgggaaatttcattccaaggctttccaaacaaaatgcaatgttgaataacaagctacagtcaccaagattcatttagtcatcaaagattagagccaagaaagcatgcaacaattgatccttgtgacaccacatgaagaatagaggtttatctctgccattaatgagctttgaagaaggagcaatatcactaaacaaaagttcaacaagatcatgacctataacaatagttatgacttgagattttctagaaagaaaatttatttaatcaagagttaagataagagaagtagtgagagagttggaaaaaagattccccagttgtgaattgagccgacatagacattagatcagtagctccactttgagacgagtggtcaccaaaagaagccattaatgttagtcaagtgtctttgataccgtaatgaaattaaatagaggagaaagaaaagcagagaatttctttgcttgaatgctataaaaacttactattttctttattagatttcacatatagaaaaagtattgatataaaaattgttaccgaagcttttgccaaaataagacaagttaacaactaacagttttaacaagctctaattaactaactgaatagttgttgttggttatcagcatgcaacaatttcattttctagattttgttacttagttaatgttatactgaaattaaaaacaatgaaaatagaacgaattaccaatagaaaattttggctgagtcgcagacaatatcacttcctttaagacgttttgtggctctgcctgaagtatgcatggatgtcaagcaaccacagcatccccacgataaaatagccttagtgtacatacgatatattctacaccgaactatatcgctctattacttcctaaattttgctctgagaaaaattataaggaagaaagaaaattctttttatgttaaaaagtgtgttcttctgttgttctgatatgacttatatacgaaagtggatctaagaataataactaagaaaatagtaatattatcgtggaggaggagttggttcatggtggtaaaaagcgcatcattgactgatcgcgttttactacttctaataaggttaaaattaattaattaataaataaaaataaataaactttatataattaaataaa

SEQ ID NO: 394346 - DNA, 1382 bp, Cannabis indica
taagatagacataaatttccatagataaactacaatagaaaattacaaaatagaaggtaacatatatttattataattattctagtagcatatcatatatcatatctattatggtaagtaagatgagaagacatgttcatgatctgtctaaatagacaggatttcataccatgtgatcactattgacatgctttagagagacgtatacatgtgtttaataataaaaaaaaaaattagatatacttgttaatgatgtcgtagtatattgtctatatagaagtattgtaattgtcattataatcttatatttatcaattatatatgtgtgtgctaaatgttaaaaatactaatttagttgtatttgctcgattcaaagcagtataatgttgagaaagtgtggcccaaattggagctgttgcacccaaccattcaagtgaaaaccttttctgatattgatgacaaaaactataaaaacaagaacatgttgctcctaattttaaactctgtgctcatagtgttgttgcaccgatcatcatcattgagaaactttgatggagcaagatttgaatctaaaaaaagttgaagtcgactccttgattgcaacaaaaacttgttgcttccatggtagataatatgtttcatcaaaagcgtagagataatgaatgagagaaggataggagattggttttaggaagagttggttgttgtgtggatgatgaaggaggaatcaaagaacctccattgttaggattcatagctacgaacgaaaaagctctaataccatatcaagttcaaggagcaaagaaagagagaaaagtgtaaaagttacaatgcttatatatacaataagctacagctaaaccgaaacagatttaattaataactaactaactaaaagcagaaaataacaactaactaatcttagccatcatcttgagctaaggaggacagctctagttagattagtatctctaacactaaagacatttgtcaaagtggtcatattagattggtctcttacacttaggctgcctattaattatttggctaattaagatttttgtcaattaaattttaacatgtaccaaatcatgcctcctaaacttttatggccattaaaaattctccctaaactattgagattgttgaatttaagaatttttgtccaatttcattcaattttactaattcaatgattatttatatactatcatgctccttagattttgatatctatcaaatcatgcccctcaaactttgatatatatcaaatcatgcccctgaattttcatccatgttagagttttcttactaaaattagacaaatgtccttaaatctaataatcccaatagttcagaagtgatttttaacgaccttaaaa

SEQ ID NO: 394347 - DNA, 729 bp, Cannabis indica
gggaccattacctgttatattactaacagacaaaactgtttggaatatttattgactatttctatttggcccctcatcaaaatagaaattagtccttatggtatctacatattaaaaaacatagacaatcatgcccttaagtcacaaactttattctaaaatagaccacataaatttaacttacttatttgatgacccaacacacattttatatatacaattgtgacgtcaataaatttctaacaggctaatccatcaattgattataaatttagttatgtttgattattagatttttagtatgtaaaaattgatgtgtgtttttttccaacaaaaatttactcagtattatgttgttttagtaaatttgttgttggaagttaaagatgtcattattaatttgtatgtgttttgcacttgaataaattataataaataattttttatttttatatatataaaaaaatattttatatctcttcttattatataatctaattttatgtctcttcttattatataacttaaatcatttataattctaaatctgtaaatttatcaacaatgatatgttaacataaaaatataaagaaaaatacgtaaaaattaaatattaccttctatttaagtttaatactcaatgaatatatcatcattacaatgtaatgcaactaaaagtttcaaataattaaaataacatcatttttaagtaataaaatagaacaaaac

SEQ ID NO: 394348 - DNA, 699 bp, Cannabis indica
acacacacacacacacacgcccattgttgctcttctccacttgatatttgccaactctgattcctacattgtaaccttaagagagctactatagatcccacctatagtgatctgagtagtattatctcccggtatcaatacaactaaaaggggagtaggtcattacccgctaactaaggaggttgaacctctataaaattctatgctcatttactttattgttcttattgtgcaccacgtggcaagcatcagcattgaacatgactccactgtcggttggccaaatctgaggtcaatgattatttatgttaatagattgtattttcattatattaataaaaatttcccttgcttaaaaacccctaaacctacccacttaatttccactctcaattatactataaaatcaaataacttaaataaatttgtgtaacaataaaagaattgttacattatgattttatttcataacgaacataaattaataatcattttatcctaaattaatcattcacgcatgaaaggttcacacacagatatcaaatttactgaaattctctcttttaaggttttatcacttagtatttcataaataaattccactaatcaatttaaacatcttaagcctaataataattgccatacttgatcaaattacaaattttatgattctttaatattttacccagttagaatttt

SEQ ID NO: 394349 - DNA, 828 bp, Cannabis indica
ttttttcatgacgacgtagactctcactaatcaataagtaaaatattttgggctcaatcatatcataactaggcaaaactgggtgcttgcttagatgcatggaaaaatatgtcatacatcgttttaacgatgatttagatgtttcattcattaattaaacaacgccataagaaaaatggcatgaaaaatagccaattcatttatgcatcaaaatataatatctaatgatgtggtactatttaaaaaacttataataatgtgcattaatttttattatacattgaaactagggcagtgggatgggatggatagctgaaaaacctcattaatagaaacaaaaaaaatccaaaaaagagaaaaacatttcaattatatgatcgattatgatgtgacattaaatataaaaggacaataaaataaagtttgacgttttatggagttggacgtaactaggtggactaccgtctaatgagaaaagaaaatatatatacgtgtccaacttggtaactttattttatgtgtcggcccttattgcctttgacaatgattgaccatagaaattcgcctactgtactattcttacgtggcatttttttattcgtccaaaatgccacgttgggagtaggatgctactattcacgataacatatttattttttttctgtaaagaagtagagccaattgacttggtcatatggtctttgcagccaatgaataatgcataagtgataagcttttacatgttcatgttcaataatataatgtgaaacagttatatgacccacatctccaatttttgcttttgtggtattttttttttaagggttt

SEQ ID NO: 394350 - DNA, 1054 bp, Cannabis indica
gaaagaaaaaaaaaatagacattataagtttaggtaaaaaaaagaacaaaaaaaaaaataaaaaattaaataaaaataaaagaaaagaaaatagaaatgaacattattagtttgttaaagttgcattataatgagatatgtattatatatatatatatatatatttatatatatgatggtatgtataattaagtacatggcatgcataaataatcatcttttattgaaatgatacttagaatttaagataaaaaaaactgtataattaattagagtttaaagaataatatcatattttaattgagtaattaattaagtactcatttctagctctcaaaatgttgagaaagagagttttttttttttggcaagggaagaaattaagagagtatagatcatattactaatatatataaatataataatatatagaacatatatatgtacaaatattttgagggtgcaatgatatgcaataatttaattttacaaattaaattatatttaaaaaataggggagcatgagagtcattaatattgttttatgtataatagaattaatttgcatgagaacatgttgtctcagtaatcgacaatttccataatatatgcatatatatatatatgtgacaaaatttcaaatatatatatgtatgatatggtcaagtgagaatattatatattgaagatcaagtacttattttattttattttttaaaatttagatttttaattgaccaaaaatttggctgcaagttcacacttttaattgacggtgagtagaccgacaccattgaagcccaaattccctttcgtctccctcggtgcgatggaaacttccaaaaagataattggacagagaagactttagttcgtgtatgttagaatttggaataaggtgaaggatctcaaaatcaattggcaatgaaggagcagctcatgcatcttatatattctattatctttgcatacattagcaatgtgagattctctaacatccccctcaagatggtgactattttatatagtcaccatcttggacaactcgatcata

SEQ ID NO: 394351 - DNA, 1752 bp, Cannabis indica
ataaattaaacttacaatttagctttataaagagtagcacttttatattaaatgcatactattatatgttttatatattgtataataatatattttgtaatgacttgtattcatatataaatatataatattttaatataaatttagaagtattaaatttatgcatatatatcttaacataatatgatataaaacctgttaaaaaaaattatgacataaaacataatttaataaaatactatataatataatatttaatacttcgtactaacaaatcttaaatgtgttattaaatggtaacaaaaatatatcatattacaacaaataaaaatttacatattaacattattttttccttaaaagaaatcagcaaactatttttattaacaaatatatttgtgttaattaattgatatgaaatacatacctttcttttggactggtattagtattgaaacaattatcatactttaagtaatcaactccctaaattgattaaaacaaatcattattaacctaaatatatattagaaaaaagaaatgtaaattaaataccaaaaaaaaaaaaattattcatacccaagaagcaaaagtttttagtcatcctgttcttcgtgacctagtgaaccgggcattgtattgctacatgttcgagttctacaaacacgaaaaaaaaaaaattatgtgaataattaataaaagatacaagcaacaatatgcgttatgtgactataaaaattgttgtatatttaccaaataatcgaaaggtatattttatcatttcagagaaccattcaaaatgagtttttcgatattataatatatgaaatattgtacaattaagtaaaaaatacattacccagcatctgaataaatccctagttttaatccttgggcatgaacataatttgctaaatctttaattcctgatgggaatgttgaagatttcggcaccaaatttccctgccataaaaataattatttttaacaagtctaattaatcattaccaattccaaattatataacataaatcgttgttaaagtgttataataaaaagtaatttgtgactaaaacgtcatatatagatactaatgttattaattttgttagtgttatgacgtactacaaacactacatttagttacgattaattataaattttgtaactaattttttcgatcaccgaatcacaaagtcaacttataccattaccatttcagaattataaaatgtcacaacaaataataacttagctaggactaaaatgtaatattttagatactaattagtgttgtgactaaaaatactatttaattacgataaaatataatatttgtgactaattcttttaatttaaaacaattatttttttagcacaaaatttattgtaccaatcttttacaaattataaaaaacagggtttgatgttatcaatttatcatccattgtttgcgttttttttttttttaatgtaacttgtttattatttttcaccaaattcataaattgagtgaaaggaaattaatctattaatttttcaaaaattagtaaaaaaaaattaccttagagtctcgattaagttccgcccaacaatcatctgtgcaagaaaatattatttacgagaataaattatgtaaattgattgagtaattaataaaaccaataactttaagtaaatatttatcgagggtgattgtggtaggatataccctacattgtagggtacgatcatacccgatcgattaatcgg

SEQ ID NO: 394352 - DNA, 484 bp, Cannabis indica
gtttgtaagagtttttcaatctaaatattttctacaatgcgtacattgcagatcacttttataaaattttaaaatattttaaataactgatcgtgtcaaaaaaaaatatttaaatgttatgttgcacatttagctattttttcttatacctatgataagtaacttttaaagtttatttttagtaatgtaaattatttataatttttttaaaaatttataaataattatacataataaaaattaaaaaactctattttcaaatgagaaagaaagtgtaccaaaataattctttaggaatgtactactcatatttcttatatatttcacattaacaaaggaaaatttgatattatatgcttaaaattaatttatccaccaaaaatatggtagcatattttgcattatgcaaaatatacttataccatttttcttatccaatttttacccctaaacaaataaaaaccaaacatccatctctctctct

SEQ ID NO: 394353 - DNA, 1458 bp, Cannabis indica
tgatatttattttttattttgttatgtataatgatagtatatattttgtaggcatatataatatatacatttgaatgtataattttattgatatgttatttttatacatttttaattatatggtatatcatttattttagataatatttagtttcttatatactatggtgttatgtaattttattgtcatggtaaatttattttagttgtagtatataatttagttagtatggtaaaaaaattaagaaaaatattttctttttttttattattattattatttttggtatattttatttattttagtgaatggtatgtgtatgtttattttatggtatatcatttttttttaagatgatttttaaattttagtttttaacatacttttattagcgtgacatataatattagtagcatgttatatatatatattaatatattaatttttgttattatatatatttaaaaattagcgtttataaataaaagaaaacttagaacttatggtgattacatgtaatgtttgttggaattgttgatatcttaaccatactagttaaaatccaagtatacgtccaattagttgcattaggggacgcaaagtagaaattacaactaaaacatacttaaagagttcattacattaatgcatgtagttatgaatcctccaaatagcacattgttgtataccaaaatggtacgttttacatttatcaactcgcaagcgcacgaatctttattgtagtatggagattgtgaagaacgaggtcgaacccatgggaattgcgtgaaatcgaagaaaatacttatttaatctaagctaataaaactctaacctagttccgaaaatggtgaggtttttggtaacaaaataaaataaagtgtttaaacgataaaaatgacagtaacagatattttcagaaatatttgggatattattaagggttcagaatccacttaagtgtatataaaaatatttatgtttatattgattctcataatttaatcagtaatcaaaccaattattttctaataaaaaatagattttccttcgctttaaaattataacttctaagcattaaatgtgaaacaatttaatgtaaatacaaaaaatcaaagaatattatttttaataaaatgtggaaccaagcataaataatttctaactatcaaaaatacgtgatattaaagatgaaagaaattattttaagaagcgaaaatcataagcatatattgtactgagaatcaaaataaaaataaatacttaattaaatacactaggtttcatcgtcctccttaataataagggaacttagaaacccataagaaaattaactaagaaagcggtaaactaacactgagcgctctgagcgttttctctggatttttctgtctgaaactgaaactgtaactgaattctaaaaacctaagcttctatttatagaagggtaaaaggac

SEQ ID NO: 394354 - DNA, 533 bp, Cannabis indica
gagttactttttttatgatgcattatttttatattccgatcatcgttcacataattatattttacttgttattaccgtatctcactcaagcaatcatttaacaatgtatttttatacataatttgttcaattatttaaattgtaaaaaaagtaataaatcttaagaaaactaatctaaacaaatttttactatacaatatcaaattcaaaaattaatttaaaatacaatatacaatatctgtaataaaaaaaaatatatgtacttactacttaatttattttgactcttgattatctaaaaaaataaaaagaaaaatatagcttacaactattagagagaaaacatatgagagaatataatacattataaggatatatattataaggaaaatttacaaaaatgctgacttttagcctagtctttacgaaaatactgccatacggcagaaattacttttatattgtcttggccaatttttttcttttatactgtaaacaccaaaaaaaaagaaggcctccatcttccacactca

SEQ ID NO: 394355 - DNA, 1546 bp, Cannabis indica
gttaatttgagtagtaacccgtctttgaatgcactgaaccaccatgtcactgctcaagttcgatgcactgaaaagagaagagaaataatccacgacgacatccgcaaggccattttcccaatccttccaattaccactagaatctttgagctttgaaatcttgttgaaactttttctattactagcagccctatggagtatttagaattctgatcaccttccttcaaccaaaattgcttcgccctctccttccaaaatgcttctttttggtccaacaccataaaaagctccttttaattcacttagggttaggattgaattatatggcataaaaaatgataaaagtagccgaaaaataagacttagtggccagccatgaaagtggggcccacttattatatttttgctattgtttttaacaatttttatctattattttacaaataccatattttccaattttaatcctattaacgcaaattttccttaacctataataagcctttcgtaataaatgtaacacagaaatgaataagaaataaataaaatatatttagtataataagaacactatatatttttacgtagttttgaagttaaatttgcatactccacgaccctatcttattccaaatatttttagagtatccaatacaatatacatttaatcgtatttctattgttctcttaaaagttttttccatccctttttctgtgggatctgcccctatatataggaatataagttggcagttctttgaaatttaaattcaaattgtaactgtataatgaaacgtgaaaattgatcatgtctcatttaaattgtatgctggaaaataatagataactgcttaactgcatgttatttttatccttaaagatgggcaatgctaattatgacactaacatctcgcttgacttgtcgatggttattgctgatttggacaatagcatcttgcatacctccaagttgttattcttgtactctattataatttaagaaatacgcagtgtttaacaaatgattcgcctcgttaagttttttatgagttgcgagatggacgtctcgctatatgtagtccgaggttactttgggttacctcacttattccttcaaaataaatgaatcatctccttggatttgtgtattccgaggtaggtttgtgtctcatcagtacaagttttaatagttttgtatctttgtctcgcttaagactatatagtcagcgagttatgaatatagtctattaattctatatataacgagtttttcctctttgcattaaatgatataattttattatataagtggttcatattccactaactttcatgtgtcatcctctaaagtgtagccgaatttcaaaacaaatcctataaataccaaatatatttatttaagaattaaaattaataatcaaaaaattttcatttaatttatttagtaattagacttaataaactctcttaattaacaaataaaccctaaaatctctttttttcacaattaagcccttgcttagtgaaaattcataaataagacata

SEQ ID NO: 394356 - DNA, 642 bp, Cannabis indica
ctaagcggtctttacataagcaccaataaaacacttatgtacttattgccttactcctaactcaagtatttatttcattaaaataaacatttatcaaatagcattttaagcatgacatcatatatcacgtaaatactctaaatgctcgcatactacctaaaattgaaagcggtaaataaacgatcacataagtagtaaagcatttactctcaagactcactgcaccatgagtcgagatcgtctttgacaattattgtacatttttggcaggtctacaagaagcttaaaaacctgggtgatttgatacctaactgtaacgccctaaaatttaggcacgttacccaaagtgataaaggaaccctaatcccctaaatgggattactaagtaaaataagtgtgggaaatttaaactgtaaatgaaatcagaatgaaaataaaacttgtaataactttaacttccaaaaaaagttacatgtttcggtatcccgaaaaatattaaacaaaatataacaagtctttcccaatggctgacctaagtagcaaaatagagttacaaaagctcatcactggtagagcccaacccactttgtctagtgtggcctaaacatgtacatacatcgcccaactctcgcactcatggct

SEQ ID NO: 394357 - DNA, 1278 bp, Cannabis indica
taatttttggatttctagtataaatatggtggtagtggtgcagtggttcagtttttttttttacttcggttcatatttgataagtgttacaaaggattgcggcaaaactatggaggaattctaaacttttttaagttaattgtatttgtaatttttgtgactttactaattgattttattctctgggcgcgtccacgtaaactaatagtgtttaaaagaatattaatatcacgtataattcttttatgtgaaattttaaattttgtacaatttatttttgtctctgatctatttctacaagtttgtgttatgttgtaataagttttcaattttttttttattgcaagttggtacatttatgcttttaattacaattattgaagaaataattgttttatgcaaaacatcatttttcaataatttgttaaaatattgtcaaatattcttaatataactataatatataccatcatataaaaataattgttgtaattgaataaatacttttcccaattttaatacacatcatcattttagaaagactaataaaatttatttttcatgaactatgaaaaaaaatcaaaatcttgcacccgatcgaatgattctatactctatagttcaataatgaagattgctattgaactaaataataatatattaatgttattgagatatatgatctggtagatgtcctgattatccaataataatagtgtgatattttggatgctaatatgacattttcgcataataagcttttttttttattatttttcagtcattatatttcgatgaatttattgtttgatttctaatttatataattataattgccaccaccaccaccaccagatcacagcggaattggtagatgtttcaaacacaagagaaaatcaccgtgaggagtggggttggaagtgatgaggttgtggttgtgaagtgaatcaagtaattttaagttgtatagtattattttagtgatagattttgtctaaactttgtaccagagcatttaaaattttgatgcataggaagtctcttcaaaaatttacttaactaacgaattctttcataaatatcattcattaatttttgtaggtactgtctttctgttttatatttatattactattttaattttgtatgatggagttttgacttgtttacgacggaatttttttttatatacttttaaacaaatttgtatgttagatttttattatgaggacaatataattgtgatgtgaaagttagagatacaatagaaagaaagat

SEQ ID NO: 394358 - DNA, 1336 bp, Cannabis indica
aacatgctgttaattcttcttacagtatgccatttgcttaattgattctattatcacttgggtccatcgaaatagtgagtgttctgcagatagctgatagctgtaatgtgtcctgcaaacttgtacttcttgtgcttaaacttgttaacatagttatgatgtgatttttgtattattgatttgtggatatgtatctgcagacttggttggcattgcagaaagaatggccactgtaaagcacaaaatactggttttatcagggaagggtggagttggcaagagtacattctctgctcaactatcgtttgctcttgcagctatggacttccaagtggggcttcttgacattgatatctgtggtccaagcatcccaaagatgcttggccttgaaggtcaagaaatccaccagagcaacctaggctggtctccagtatatgtcgagtccaatctcggagtaatgtcaattggtttcatgcttcctaatcctgatgacgccgttatatggagaggcccacgtaaaaattctctcatcaagcaatttctaaaggacgtttactggggcgaacttgattttctagtggtcgatgcacctcccggtacctcagacgaacacatttctatcacccaatacctcaacgccactggaatagacggtgcaatcatagtgactactccacaacaagtctccctaatagacgtgcgcaaagaagtaagcttttgcaagaaagttggaatccaagttctcggggttgtggagaacatgagcggtttgtcccaaccgctaatggatttcaagtttctgagggtaacagcgacaggcgaggaaagagatgtgacagagtgggctagagagtatgtgaaagagaaagctccagaactattagatgtgatagcttcgagtgaagttttcgatagcagcagcgggggtgccttgaaaatgtgtatggaaatgggagttccgtttttggggaaagtaccattagacccgcagctatgcaaagcagccgaagaaggtagatcatgcttcactggggagaaacttggtatgggtgctccagcattgaagaaaattatagataaactaatggagaatcaggggttatctaaaatggtaattgataacgttgaataaaagtgcttcacctaaaggaaacaatttttttgctttggcattttgtattttttattttctttatatatgaagtggtaaacaaacactaatgtttgagcattttcttatattttatgattaatgagtaatcatatgtggatacagattatgtattaaaatattgtttttttaattttttttttcaaatttacggtttgggtttct

SEQ ID NO: 394359 - DNA, 730 bp, Cannabis indica
tttgtttatgctatttcttcttggaacacttgtagtgatttagttattagtcattttttcattgtttgaattttgatccatgcctagatcagattttgaagtaatagatttatgttgatctcatgagttgtaggcttaattaaattagttcaaggccaacaaaaattccatgtgtttacaatatatattgtagttatagtagaaattttgccaattttttaaaaaattcttaataatctatggtttcgaaaacaggttcaaacaactccaaatggggacttttttggcaccccagcatgaaaattgttatgtatgatgaatttaaaaacaagttgttcattctagaaaatcatctttcgtaattacattgagctattaatatttagcaatataaaaattttgatataagtagcattagtgttatcccaaaattgacactctcacatggcatcacgagaatggtgacacgtggacactacttagagcatctggtcagatcaacatgccgagcaggatgcctcgttggcatgtccataatggaatactcaacgagccgtgcagaatgagcaacacttagcgaattcaaccaagcgcattgtgagtcaccagctcaatccctataactcaaggatcaacttgcatggatgtggcatagacacgatcccactatcagtgtattcagcctcaatcccacgatcctagcatttggcattgatcacacgatctttct

SEQ ID NO: 394360 - DNA, 708 bp, Cannabis indica
caggacattatattgcacaaaacgctatttataagctattagcaccctaaccgggcccaaacaatctatacatccattcttatctatttttctacattatagttcattgaaccattctttgtctacttctttggtcttcttaggtgtaaacaaggcaactcttgttttgataccccattttgtttcttcagtaactcggtttgaggatatagatgccccttgccaagttatattgttcctcagcttacagatattataaaccaggctagcaattgcagcagtgaagacctttttccgaaactttaaaatcttagctcttgcaatgcacctaagtaaggtgggaagattcgaacaaaccgcattccatgtcagccattgcttaatttcctgcaaactgtgcacaacaacagaacatttaaaaaataaatgttgcacggattcagtttgttcatcatagaggcagcaaagatcattcatttgtattccatgcttgagcaacctgtcttttattttcaatctgtttaacattgctaaccacaagataacactgtgtttggggatgtttagtctactccaaactgttgggttttatgccctaaataaaactcatttcatataatcagatttactcattaataaagatcagaaataacattttatgttgcatggttcacatgatttatttcatgattatatgtatataatgta

SEQ ID NO: 394361 - DNA, 1414 bp, Cannabis indica
aaatgttcaataattttttttgtcatttactaatttgacctacaatttcaaacatcattttctgttttgaaataaattaattaaacaaaagaaaaatacattttcaaatttagtaaataataaattagaaaatataatggattaaaatgtttatctgtaatctactgttaattaagatgaggttatatattgctatatacaaatttagaaattagacaaatcttgtttgagacggaagatatcacccaaaatcaaagaaaagcatgtatttgtaattttgtatagaaagattaaaccatatagataattttccaattataataataacatcatttttattttattaggctaattaatattaaggtttataccattttatattttatactaatttaggttttatgtgtatattttttaaaaattattttaaatcctaaattttgtaagatattaaggtcatcaaaatctttttaaatatcattaataaatatccttaattattaaaaaaagagttatattattttgaaccttaaattttaggataatcaccttaatttttgtaaaatatattttcaacctcatttttcttaaagatttaaattaagagttaaaatccattttagttaaaatattttcaaatataaccaaatacactgtatttataaattaaacattttaaaaaaccaaattactatagatattctttttttcgtccaggcccaccaacttttttttgggtcatagatgcggttcggtcgaaattgttttgttattgtgattcgatttttactattgtaatattaatcatgtctctgagtctatgcatgattttgaatgtttagtcttttctttatgacataatttggagtattttagtattatccatgtgacatgacatgattttgttttgtttcgttggtaatttttctttgcttttcaataatttgctattaaattgctgttagtagttaggaattacaagttctctacgattaaggaaattgttagtagtgcaattacgtacctttagttaagtactcaaactacaaagttgaatgatcgaacgtactgcaatagtttttattattgtatcttttaagcgcgatacatacaactaaaaataagtattctattcctatagttttatactttgggagtattatttctgattgtaaaatgttgttaaatgacttgcgagatgtttgtgtgcatttattagacgttctgcaaatagtgtggctcatttcttagctcgagcatcctatttagttgatgatcgtgttatcaggagtagtgatgttactccaaattttaatcacgtaatcactatgaattgcaattaataaagatgatgaaattttttaaaaaaaaattataatactacaattttttttaatctttaattttttttttt

SEQ ID NO: 394362 - DNA, 896 bp, Cannabis indica
tgtctctaagactataaccttttggagcagcctcctggaccaaggctagaggtgttggctttttaagatccactcccagattgtttttccctttatgcccttgttcttgccttccctagccacctcacatacttcctcagatctagagttgatgttatccaagaacctgttatgtgaaccatatgtaatgtagctggctagtcttcatgaaacaaacaaaaagatacattatgtaagattatgtcaaatataattaatcgaacaagctatcaaataatacactagaagaatccaaactatttatcttagcataattaacttttcctctagaaaagggacaatgtcctctcgacctaagttagtctcgtgctggaagaaccctagaaagtaaattttactacgtaggtccactctaatgtgatcatgtgttggtggaaaaaaatggttaggagtccttacgatgtaatctaccttatctataaatcactgtaagaatatctattctaatctaacttcaaaaagtataggtcaaaacccgttggtcaacatcatctatgtaaagaccgcttagctttaatttagaaattagtagataattagggcttaattatgaaaattatttattaatattgaattaattatttatggatctatttgaattcagaatgcatttttatgtcatatatagaaatttcataacttttgcatgtttgtgcccagcaacattggaacgcagtgtttggctattagaatcacatcctagtatttttagtatagcgggtcaataaatttagacattgcaaatatcgagaatagttgggattttagaatttcccaaaatacccctaagtgccttttatgcccttttagtgtgggaagggcaaaatggtcatttt

SEQ ID NO: 394363 - DNA, 854 bp, Cannabis indica
caacataaggacccccattcggtctgaggtgatggaagagtgaggtgctcttttgcgcctgatgatgaggctgagatgacatgatggtgaggctagctccacttttggtcggagacgatatgttgagggcccctagggccgagatgatgcatgttgaggctcctagggctaaggtgatgcatattaaggcccctgggactgaggtgatgcatgttgagaaccttagggtcgagatgatgcctattgggcctctagggcggaggtgatatgtgctaggcccctagggctaaggtgatatgtgctagggccgaggtgattttcttgcttcgacctctctcagtaaaacatacataactttttcatataaactccaaatgagctgattcaagatgtgttttagaagccgataaaagatctacaatttttatgtttggatgttttccgaaattggaacagagtgttgtcgtatttaggtttaaattttggtttgaggtggtgagaaagtattgtgaggaggtgttgtgaggagatgccacctttttggtcataggtgaggagatgtcacttttttggtcttaggcaaggagatgagacatgacgtcaccacctaagagcatttctaatggagagctataaatgtggtgtgttgtcattttttagaatattttgctaaaagttaactccaatggtgatgtaaaatgtgtgccaaatttggcccaagctaaaaactgtgccaaatttggcataaaagatagcatgcactaaattttaaatgccacattttttaattacctatttgtcactcattaatactattcattaataaaaaaatatttttatatttataagttatt

SEQ ID NO: 394364 - DNA, 1447 bp, Cannabis indica
gatgctattgaaagatcacctttccacctaccccttctgagatggtttagcgagtggatcctccaacaacaagctctgaaagatcccgagactcgaaacaggctgagaatcgaccgacgatggaaagaggcagaatccatggaatgcagagaattgaaaaggcaattacctgggaaaagaagacaagtggaggttctggtggagaagagaccggcaactcaagagctggtgctgaaccgtttcccggcggttcacttaccgggaatcggagaaattaccccttttgagaatacggttgatttggtagtggaaaaggatatcccagtatgccctattccgtcgattgtgacatctccaggcatgccaccttcatctccttctgccgagaatggtactcagtcaacagagcctacagatggtacgagtacaatgaccaatcaaggaagaaatttacctggaaaaggaaaacaaactctgtaatcctcctcgcctactgaattaatttcctctcctggagatatgccatatagagccattgaagaaagagaaaaatttcaccttacaaagacaatttaaaaaaggccagtatataaactcccttcttgggtcgcaagcccaatctctagaatggccttcaagattgtgtttggccagggcctttgaaccattgactgtgtccgtaactattgataagtttcatagggagcccacgttatttaacccaattcttggaattgaggattttaagtgttctgaaacagaacgtgggcctaagaaaaggaaggctacatatggatttttcatgattcctggagccctcccaacacacgttgatgaagaaggaatattgcaagcaacaactggtctcagtactcagaactcggaagaggggaataagatagctagtttttctcctggctccaatgaaggaaatctccaaaaaaggaaaagaggaagaccaagaaaaggaagtgatccctgcttgactcactcggcttcttcaagaagaaataggaactcggtgtcaattgagaggataggggttaattcaaaaagcctcaagaagaaaagaaaggagtcgtcccttaagggtaacagtagtcactatcgaaatctctggaatgcgaaaggaatcgacttaactgttgacttggacaatcactttgtgcttgtggagaaatcaaaggagaacaatccacagtgtgagattattgaagtgccggaaagtggggatcgaacactaaaggtgattgaagatggagaagcaggtactcagacagttaagcatcaagattttcagtttggggctatggagacttgcctagaaaagtctccaaattcctcatgaagattctgttgggttttatgccctaaataaaactctatttcgatgtaatccagattattcaatatcaataaagtaacagaagtattttcattcatttgt

SEQ ID NO: 394365 - DNA, 883 bp, Cannabis indica
agtggactagcctatattacctctgaaagggggtgacccactttaaaaatgcgttgttcatcattgtcaaattcattccataaacagttttacttttgattgatattcacttgtgtttatcttgctcgtttatgatcttcttaggtccgttgacaaaaaattgcgtcaacaatttaaacacacaactatcattttttttttagatatttactttgaaatattatttaatattttaaaattatttatatatataatagacaacataaatagactatagctgcatttaataaacagtatattattcacttaattaacatatattggtttaattcattataatatattattattattattacttgatataattcaatatcattttcagctgcttattatctatttaatatttaattgttcatttatctatataacaaagaatattctactttatagttcataattttaactaatatataataataatttaaaaaaatattaaaaaacttttcgtactgatcttcttcttcctattatcatttacaaattattttgcttttatacttttgttttttgttggttaatttgagaattggcaacaaattaatgatgtgttggccttcactattaatacatttttactaaatattaacaaaaaaaccccacaaaatataaattttctcttaagaacaataaaaatttatacgttcgctaatacaaataatatatatttagagataattacattatacaccttaaattacattttaatatcaaaaataacttgacccatttaaccatgtccattataacgtttctgcataattacataccgttttttattgttggacttagtttagtcacccacgtttttagctttaatcta

SEQ ID NO: 394366 - DNA, 905 bp, Cannabis indica
aatcgtattaaccccaaaaaattatagaaatttatataaaaagaactaagacttcaattttatgtaatttgtgatgtaattacgagaacttactatctaacaaaattcttagaaataatgctctagaaaaaaaaatagaataaattacaaattttaggggtttttatatttttttgtgtaaaaatatggtttttattttttgaaaaagcttattttacagaaaaattgatgaaaaaattaataaatatggaaaaatcaaataagagtaaccagttactataaggagtaactaggtaccttatgctgttttttttccataatttttaatttttcttctaaaattttctcataaaataatttttggagaaaaaaaattatatttttataaacttatactttaaaaatcataaaaataaaaattctccgaaaaaataatacctgttctggaaaatcgccattttccaattgagaattgataatgagctttgcagcaagatgaagaggtgttgggtctctttcagcttgtccagcatgaatcaaagccatcatagccaatgaagtttgtactaaatttgatctattttctggcaatgctacatattcctataatatttatagactcacaattatataaaaatgaattatgattaaaaaaaagtacttatttataaaatatatatgtaaatttttacaaaaaaaacagtaatttatgtaaatttttcaagaaaaaatacaaggacaaggcagagcccaataacgttagcgactcggcccattttctatcaatattagtaagaggaaattacactctatacaatttttatattgtcattttttatttttaccctcttttttaaaatctatcatttttacctttttttttaaatattgtaccaattttgccc

SEQ ID NO: 394367 - DNA, 824 bp, Cannabis indica
agatttgtctctattttcatcaattaaaaaaaaaaaaaccatatctcatttattttgattacataatagtgtcttaaagtatttgactagtttttaaataatttagtatattgaaacataatttaaaatatttttttgtatggtataattgtattaaacggaggttaaatatccaaataaaattaagctattgagatcttgattgttattactgcctaaaagtagtgatttttttatttgtctgcttatttgagtactgatatttgtgccttttattcttcagattggtgggtttgctgatgaagttttctatatatgatggagttaatttgcatatgtttagtatgaaaaaaaatagatgtaatattgtggctttccacataagactcctactatctcttgttattaccttttgttttataataatgtaaagtttcatttctttagtagcagttgtattggtgtttcatgacatgtgcccttggaactttgagattaggtaggtctgcaagttcaccatcatcaaacgttaaagactgacattattaagtgcgatgcctttgtttagggaattaatgatatgtttgatcatattttctaacttgtattaattgctggatcaatcttattttcttaaatatatagtatgaacctttttttcatttgaaacatataactttcaactaattttcaccgcgcgtaatagccatcttatacatactaatcatatgtgtatgttggataaattcccatactattgtcccataaataaagttacaaggaaaataaaatagacctctttataaagcctcaacagaccatta

SEQ ID NO: 394368 - DNA, 845 bp, Cannabis indica
tggctcctctccttccttcacgtcgtcgttcgtacaactgcccgtgcatgtgccatgcatgcatggcttcatgcacacgtgagcctttctattcctttgttccatctgttttgagatcgagactcacggctcgtagccgcagctaactattgagtatagtggctctcatttgaggattgatttcatcatctcgatgaggtcggggtctattccttaaacccgagctcactcatcaatgaaggtattataaaatttacattttatatgacaaaaatttacaaataaatttacattacaattaaaaattcttataccatattaaataatggtgtacataatttctataaaaacatgtaaaattcataatctaattttaccatataattaacgattcatattcatgcacacatccatccattcataatatatcaacatatatataaatgcataaatatctattacaatatttactttatgtaattatagagattgctatggtaccatttgttggtttttatggtccaaatcagagtagaaagcggaagtagattttataaaaaatattgttgataaatctaatctataccataagccttaagatccctacatgattacataaattaaatgtgagctatgagtataaatttttttatattttgatgcctattagtgtatcctcaattttttcgtatatattatcgatcatctaatccagttgttatgaacttaatgaaggcttcacatgagggtcttccatatcaatcctcaacactttgaataaaagtggacttataggattaaattgatgaacaaattttctatcacagtgtgtactcaactcatga

SEQ ID NO: 394369 - DNA, 1642 bp, Cannabis indica
ggaaagtcttcaatgtttgtgttagtgatttcattagaaggaaaaataatatgaatgaaaggatcagtatagtgtttgttgttgtttagtttataaaagggaaatatattcccatgaaaaacaacattccttgatataaaaaaattctttattatttatatcatatagtctgtacccctttaccccttgtggatatcccatgaatacacatgttctagttcttgaatcaaactttgttctgtgtgcagtgagggttgaagcaaagactaaacatccaaaatttcttagatgctcatagttggggggcttgtcaaacattagttcataaggagtatgattgttcaagtttggtgtaggagttcggtttataagataggctgcagtcataacacaatcagtccaaaactcaataggcaagttagcttgaaatagtaatgcacgggcaacatttaaaagatgttggtccttcctttcggctacagcattttgctcaggagtttctacacatgtaaagtcatgcataattccaaatttagcaaaaagatccttaaaaaccaactcgggtgcattgtcagatctgaaacacttaaaaacacaattaaattgagtttgaatataagaaagaaattgaggaataatgtgtgctacatcagatttttgtttcatcaaatatagccaagtgaatcttgttttatcatcaacaagagtaagaaagtatttatggttagaatgagatgggacatggtagggtccccaaacatcacaatgaataagatcaaattggtttcagcaaaattattgtgcttaacaaagggtaatttcttttgtttagctttaggaccaattttgttctttacagaaatagaaagctgcatagctctactccaagaaacatagttatcctgaccagttaaaggctgagatacaaggacattacctggattgtctccgtgatgaaggaagtaagggttgctgggatcttccatgggatttttaacgctggtgatctggggttgttgatctccatattgaatcggagtcgaaggagtttcaagaactcttgtagatcgattattagattgagtagaggtctgatcttcatcagccatggaaagaaaagtacagagaagaaaacgcgatgaaacagagtatcgagaagaaggaagatactcgtcaccggagaagacgatcggagaggaagactaggatcggttagggaaagctcctttttcccgctctgataccattttgcggaagagaaaaacaagaaaaacgaaacagagagaagcataaatatttcattaattgacaacagaatacagtattacagtttatatagttgagtaataaaagaccagctgtattcataacagttaattcagttagagagaaatagggaccagttagttacaagaaaagaggaaagatcaactaactaacttaggtactgtaattatgtaaacttaataattatttaataatttagaaagttggattgattatatttacaaaatttaaaattcaaaataatattaatttaataaaaatatatatatatatatgatgtttgactagaacacccatcgacaatagttgtagtattatttaaactttgtaattatataataataaagcataaaaa

SEQ ID NO: 394370 - DNA, 584 bp, Cannabis indica
ataaaaaaaaatcaaaaaatttcgtaggagcagatctagaaagcgtatcgtcgaaggttcctcacggccatgcactcgcaactccgacgggcttcttcacggaggctgaacagtagcggtggcttcgtggctcaatttttagggatgatttctattcaattttcatcctttttacaaatattgcacatctgcagttggcttagatatcaattacttggttgatttcatcatttattattctttgtaatattgagattaaaagttgtaggttagcattaccaagagaaaggtgaagactaggggttgctacaactgtggaagagagaagttgagagatattttgatgggctgctgtgaggctgagagacgatggagaacgaccgtcgctggccattgaccatcccgtgctatgattattgtgatggtgagagagagcggcggtgttcatggggttttcctttggcttggacaaaaaaaattggtttggtgaagggtgccgatcggggtgggtacaacacagagagagagagagagagagagagagagagagagagagagagagagagagagagagagagagagag

SEQ ID NO: 394371 - DNA, 1122 bp, Cannabis indica
tcttcttcttcttcttctctctacaactccacgccaagacaaagtaaaagaaaatgaacggtgtattgtgctgtctgaaattactaaaatacccctgatagcctctcgttataacgtcaatgccaccgagtggtggtttctttagtctttactttcttttcttccaaatttattttagtctagcttagtttctatatgtgggctcggacgagttctcaaaaattgtgctggtcttccgaaactaaggcggtaaggcttctttattaatggtgagaaagcaaaagaagatgaaagaagtttagacccaaattgtctgtttatactgttttttgtagttaataaaatggtatggaatgtagttatctttttgttttgacatgcatgtgtgagagtgtgagtttgggagcaaaagaatattcaaaggtcacggactcaactaatagtattgagccaaattcattagaccatcaccactaagtttatatttggaaaaaatatattaaagtatatttgtctcaatttttagtatcctgtttcaacatatcattataaaatttgatattgtttaatatttttaataaattttaaaaaataagtatcactagtatctaatacactattcagtgtcataccaattgctttcactataattaaatattagattttatataattttaaaaaaataattttaagaaatattattaactaatagtaaggtgacatctataaaaaatggtaagtaccactggtgttcaataataatgttcaaaaaataataattaattagaaaaagtccttaaatccaaccatcttaataattcaaggagcatttttaacgaccttaaaagttcagaggacatgatttaatacatgtcaaagtttaagaggcaaaaattataattagccttttgaaatatagagaaatgttgaaagatactagtggtacttagtattgttattaatctaactaagtatcgagtctaatataatttaatgtaataatttttaaagaatattactagtcaatcacaaggcgacatgtctagaagtattagacaccactagtatccaataataatactcaaaaatatatatatatatatatatattcattcatctact

SEQ ID NO: 394372 - DNA, 644 bp, Cannabis indica
acatatttaaaataatataataaccactgtaataaatagaaaatatatataataaaattggaccactcgtatatacatagaacaaaaatatctcaacaattatatagtcaccaaatagttagatatctaataagttaaataataccaaaataatacttaattatagtattcatcatatccttcatccataattgttcgtggatacttaaatgataattggatacatattcagtctttaaaagaagagataattaataaataaaatagaactaagctaatcgtactccgacaacgattctctcatccataaatatcaaattgggttctcggaagagggaacataagggtgagcttacaaagcttagtaggaaaacaactcatataaataaaccagtagttcaataaaagtccatacatggctagcttttattaaaaacaaaacatctcatcatcatgtataaacaaatagagaccacaaataatcacaagagacaagctacatgtgcatttctgttgggttttgtaccctaaataaaacccatttcaatataatctcatttactaattagtaaagatcagaaatcacattttatgttgcataatgtatggttcacgtgatttatttcatgattgtttaatgtata

SEQ ID NO: 394373 - DNA, 774 bp, Cannabis indica
gtatctcataaatagattacctacacctgttctaagcaacaaatctccttttgaagttgtttatcacaagaaacctgattatcatttgcttagaacatttggtgcagcatgttttccttgtttaagaccttatcaaacccataaatttcaatttcactcgcttaaatgtgtaaatttgggttatagtgagtcatttaaaggttataaatgtttgagcacaactgggagagtctatatttctagacatgttgtttttaatgaaaaagagtttccatttaaaaatggctttctcaatacttatgcctctgaacaatcggttattgtgtaaaatgaggcttggtcacaactccctaatctccattttcccactaatttctcatctgcagctactgtttctactccttcagcatctcctgttgcagcaccttctacatcagacctgtctcctctgtccagcaatcaggttcgatcactttctcctgaaaatttgagtcatgttgctactgatcatgttgatattgtccctgaaaattcaggaactactgctcatgattcagcaccttcgatagcagaatgtgcacctgctgttcctgctgtccctgccactcaaacacagccctcacatcccatgataacccgcgccaaagctggcatttttaaaccaaaagcttataccagcacatctcaacagtcatctacttccaatgaacctacttgtgttgctgatgccctcaagattaaaaggtggaaaatggccatggatgatgaaatagg

SEQ ID NO: 394374 - DNA, 787 bp, Cannabis indica
tataaggtactacttcagctcgcatttgaggtcttcgtagagtcctttcccaatcttaagcactttcagtggatgtttggatatcaccacctctttagtttctttgttgggtttaggatgaacctcctcctccctcacccttgggtctaagtctaccccggttctttgttggtgtgcctccttgtcgcatacaaccatatccatggactcgcggggttttgtggccattctaagtgaagtgttatagcactctcttgcttccttctgctccccccttgcggttgggactccctcaggtgttaggaacttcatggataggtgataagtggacacaattgccttcaagcggtagagcgagggtctcccaagcactgcgttgaaagccgtcgggcttttcactacaatgaatgtggccatcatagtcacttgtctaggtcgctctcccatggtgaggggaaactcaatcattgctaggggatggactgagtcccttgtgaaaccatatatgggcgttgtgcaaggtttcaaatccttcatccccagccccattttttctaaggcgctctggtagagcaggtcaaccgaacttttgttgtctacaagtactcgatggaccctagcgttagctagttagacagccaacacgagtaggtcgttgtggggaaagtgaacccctcgtgcatcctcttcggtgaatgttattgtaactttctcacttcaagcttccattgggtccttacacctacgaaataagggcccttatacacgagtacgtcactctggctgc

SEQ ID NO: 394375 - DNA, 646 bp, Cannabis indica
ccctttcaattcattttactactctagccttttatattagatttttacaagttgttttaatgttttttttatataagtttatttcttttttattattattatttttaactaatagctttcttttttctttgttagtagatttttttttcataaacaacaaaacaaatataattgaaaatacacattgaatgcttattcatgtatttaggatatatatctagtatttttttaaagttatgagttggtgttagtaatagtaattctgttattcttattttgattatcatataatttgtgactttattattatttgtttatttttttttatattcatattcaattataattctcttccttttctttacttaactagaaattttttggccaatcctgttttcattaaaattggagtgaaggctatttttgactttaaatatttttttttataagagtactatttaaatgttacgtaagatttaagaatattggaaatatattttttaaccatatatgacatattttttttaatgcaatagttatataaaaattagtacagagttaggtcagaccatcaaatgcacataaatactctatgattggtttgaggtaataaaatagaatataatggaaaggaaataatttcaat

SEQ ID NO: 394376 - DNA, 670 bp, Cannabis indica
agagagagagagaggcacgaacgacctttcatttttccctctactccggttttgaactgtgtagcttcgatgcagattaagattgagagagaactatgcagatcaggaagagagagagagtatgtcagatttggagagagagagaggggagagaaagagaaattccgtcacaatggtgttgaggagggaaaacattaaagagaatgggagatcgtgagcaaggagaggataaaatgagaaagggagatcagaattttgggcacatgattgccgattgtggcgtctgttaagctcgccagcgacgtgacgtagctccactggagctattaaggatgtcgcatcgggatccagagatggtgttgagagagagatgaagcttttcttatttaggttataatttttaataattttgaaaagagaaaatatttgcacctgttttatggaccgaagaagatgaatggggttaatagttttctgattttttattattaattaaatttaattttattttaaaaggaaaatttgatatattatgctaaaaaattacacatggtgtttaattataccactatcctaagaattttttaactatgctaatctttaagtgttaacccaaaaatgcccctctcctcaaatctaaaaatttcagcctcatctctctctctctctc

SEQ ID NO: 394377 - DNA, 675 bp, Cannabis indica
agacattgtactgcaagacagtccagtgcatatatattgggccgatttcgtagtcaaggcccaaatcaaggtgaaacccaatattttggctaaggggtaaatctaagtgaagcccaactaaaaagagctgggtctatgaattagagtaggctgtccgtcgtatatttcaaccaaatagttcgacttcgatggatttgctgctctattgctttcaactaaaatattagtcagcaaccattcactacccaatcaaagctaaaatattgagtcgagtacaaaaatcagtttaatgctttatcatcttgttatgaaacgagtacatagaatctttctttattttgatatttattcctaattaataagaccaactatatacaatacaaactaaaaatatacacacttacatgtaagcaaattaagtctaggacgtggcatataaaagaaggaatatgaattttcctatttataaacagaagtgggcatcatggaatggataagaatgagttataattaaagggatcaagtgatgagtgagaaactcatcatgatcatcatcatcatcatcaatgtggcacatttatataaattgaattcgacagcatatgattctatagggctttgtgaaatggattttttttggttacgtgcaaggtatgtacattttttttaaaaaaa

SEQ ID NO: 394378 - DNA, 629 bp, Cannabis indica
aaaaaggaataattataggttttgccatttgattaagctcatcacggtatttattaattgtacagatggagctctttattcgaattgtcatacatataaaaacatacatggtgtactattattatttatattatatatatatgtatggatatatataaaaatatatatttcttgttctcttgttctaaaagttccaagatattaaagataataggtcatagtccttcatggaataaaatattaaatataccgtggccatggtattcatgcacattatataataatatgtttacatataattattacaattaaaggctaccccatcaaactttcctcccgaactttaatatttatgtgtgcctcattttgttttggaattattaacactactttaaaaataatttttctcgacgttttaaaacagtcatttaaagtatttctgtcgttaatttttttaaaattatcgcctgactattgtaaaacaggcaaaataggcgacggttaaaaatatcgctaatgtggacttcccgacagtttaaaactattacctataacagggtataagcgacgtttttaaaccgtcaggaatgtaaaaaaaaatacaataaaatctgtattttctcctattt

SEQ ID NO: 394379 - DNA, 776 bp, Cannabis indica
ggtattaaagaggctcttggtttaggtaaaaagcaagcaatgacaaaatgtagagattgagattgataacatgatctcagttcaagacattcataataaacaactaatgacttctattttcaatttgaacattcatgattgtcagcttttgctctcatctttacaaaatgttagttatgttttattaggcgatcaataaatcgagttgctcatgctgtggcaagacattcttgatttttctttggtcgcagaatttttgaacacgatgtttgggctgatttaaaagctcttttgtactctgaatgttaatatttcaatgaaatttgttattttatttttattttttttttaataaatatagtattttcttaaaaaaaaaatagtgtttatatatagaatcatatcactttaatttgaattatatgtaaaatttattatttaattacattaataaattaatgatagataaaattttaagggaatcacttcatatactattttttttaacttttttttttcaaatttactgtttgggtttctaaagtggttgcagcgctagttgcaataagggtttttgcacgattttttgttgcaatttagattgcaacgctagttacaatcagggacggagggactttagcccatatgtgggctaaagccctcactcaaatatatacatcaaattttttatatgtagatatatacatatattaattcattttgctcaatttattaaagtccaattcacaaaagccctcactcaatatcttaatcat

SEQ ID NO: 394380 - DNA, 872 bp, Cannabis indica
atttattaaaataaataattatttgcatataccttactttccttctgccatgatccaacctcaccaggtgcagccaatcccacatgagcatagcgagcaaagaaaggaaatcgagaaaggtatctaaaacagaaacagtgtattatatatttttatttatttattataatttttaaattaataattaaagaaaaacgaataaaattatggctatggctatatatgcttcaaaataaaaatgaaatattccgtacctatcacgaactaataatctgcctccaacactgcctcgttgattagagacaaggtaatctttggattgagggaaattgtatggccatgctctaacttcttcttgcatctataattaattattgtaacaaaattaagagttatattacaaataatatataaaaaaatttagtgttattataaattttaattttatagtaccttttgtttagcattatcccaaagtgaaagaggatcttcatcggtggaaattgagttaagataaatagaaactggcccataaacctttttccatggctccccttcttcaaatgtcattgctatatcctttccagcatagtgagcacttgtaaacatctatatacaaattttattagatacccaaaaagagaagagaaaaaaaaaatctactattacatctcacagttttaatgtgagtccacattgtaatttgaattaataatcaatcatttttttaatgatctttttaggtgttttgaactatttttcatgtcatagtactaaagcataccatgtgagttcatatatatatatatatatatataatttatatatgcacacactttagtgtcacttataatgtctaattgtattttact

SEQ ID NO: 394381 - DNA, 739 bp, Cannabis indica
atttcataagtatatttttgagttgatagtgtctaatttttcttacatgtcatttggaatttttatttgagcatattttttgttattccaattttattttatttttaaaaaagtctttctttcgaatattttattaacaattcatttttaatgtatatatatttagtattatgtttcataatttttttttacttattctaaaaaatttaaattttttttaagacaatattattattattatgtttcttcaattttttgaggttgttgttgccttatttataagttttttttttttttgttgttgacttaatatgatgatactaattgatttgtattttaaaagttaggtttgtcacgtgggggctagtgacaagttctgacactactgttgcatgcgtctgccaactttgatgatttttttcctcatccgcgtgtgagtctcacttgcctttatatattcacatgtgtagctcatttttttatgcgcatctggattttctttcagctgtaatgttgtaaataaatttttttatagatagtatttttgaaatatgtaagaagtataaatatttaatatttttctaatgatggttataaaagtttacttttagtagtattaacgcaaaatagaaaaaatctctactatttaagggttatttcttttattatcaactagaatactaagagatttcagatatgtttttacacttctccaaaatcactactccacccccagagt

SEQ ID NO: 394382 - DNA, 842 bp, Cannabis indica
tttaactagcaagcactccacactaagtggaccataaagtgaacccacccatgtgggccctaaatgtcgatacataataaaaatagatttatatggcaaaagaagataaatactaatatgttctcacataggtaataaaatgcctaaagttgctcaatggaaagcactgccataaggcaactcttgcatggaacactacaagacaaacaaagaagactaaacagcctaaagtcaatatgagaatggtagtgctctccgaaatcagagaccactgtcaacatgccaacacctaatctgttaaatactgaggtaccaagtggtctcggtatttgacttgtttggtcggtgggttggcctaaattttcattctggatgaagttattaggtataactccacccgaagagtggtcaggtaggatttggtcgtctactgcttggccccacaggttggacctgtggccaaggattggacgactgaccattatgaacttgggcagtatgcccagtagcatactcttatgtactgcttagtgggatactggatgcggtagctagttgctgattaacgacttggtaggcccgccttatcagtactgtagcctgcctcttgcaatcatcgatggctgcttgctgagccttcaaagtttccatctctctgtccctccactttataaacttgcatcgctgctcatctaacgcaaggtttatagtagcacggagatcctccatgtcatgatgcaaagcattattatggctttttcctgaaccctagttttgcccgtttttgggttgctaagggtgttagcatcctatttatcgatagggttatccttagtttcaat

SEQ ID NO: 394383 - DNA, 817 bp, Cannabis indica
agagagagagagagagcactagccatcaaaagcatatttccatggataagtactagctggacaaaattctggtttaggagtgggaaagatgagctgaacctcaattattatgataagttacagcctttttgtttattatatatataaatataaatgtaaaacattatgttgatgttgatgttctctctttttatctatgttttgatcagaggggcacatgccaaaccaacattaccagtcttttattttattttttattttatttacttttcaaagtgcctcctccggcccacaacctgtggtccgatccgacccgacccccccttatcttatcgcattcagtctctaccttttcaattttcatcactataaacttggtcacatcaaactttatagaacttccattttcttctttctttcttcaaataatttttttctttctctcttttcgcgtttaaactatctttcttagttaagttgtaaatattattatttttttctgaatatgatcaaattatataaaatcaaatccatattcacattcactaaagatcaataatataaaggagtctttttttctttctttctttttcgtcgatctttaataaaccaacgtgaagagtactctcccctctttttcctctttccctttcccattctaagattccaaagcaacctaactaagtgactaaccaacttctctaattcccctttttttttcttttcttttcggaccataccgctcttcaccccaccatctccctttctttctcaaatttctctatattatctctcccattcctcaaacagctcaatt

SEQ ID NO: 394384 - DNA, 1157 bp, Cannabis indica
agaaaaattgtataaaaaaaatactcgatttaataaatctttttatatcaaacttaaaagattgatttatttattttttgttctctacacatttcttttcctatagtttccatatttattttttactaaagttcaaacttctaaatatatatagcctaaataaatatacggtgtgaacttttttttttttatttacgaatgagactaatataaatttatacacatgtttattactttgattttaaaaaaatacaatttagtaaatatttataatgatttattgtaaacaataataaaatatataaaaaaaaaacttgtcaaataatttattttataatccaactatgatgaatattgtataacattatttagtcaagttgcatttatgaaataaattaaaatgggcattttagtgttctgcacgttaatttgaaatttttcattttatacattatttttttcattgcatcaattttatcaaacaagagtataaattaagatcatgattatttatgaccctacacagttggtttatgcttgaaaatagcttgtattatagtttgtttaaaaattcaaagtatctacattttgtatttacattagaaaagtaaaagtgtagtgtagaatgtctattgtaagctaaacctattgtatggaaatatataattttaatttccatattagcatttatttatgtaaacaaagtaggttgagaaaaagtgttccttttttataagcaacttgcaacccttttttttctctcttatatgttaaatcaatcattattataattttgttttaaaaaaagtcattattataattattaatatgggttgtgagcaagttggattagctagttggcattagtgttataggcctttgtagcaaaacttgagggaattactgaaaaaaggtagttctatttggtggcaaaaattatgtattaccttttaatatttatatatatatactagcaaaaactaagacacgtatactaaattttatgctaatttttttctacgttagttgaaagtgatacaattaaaaattaaagaaaaaatattattagttattaggtgagattattattatatgcatctaaatattataatttataatgttgtcaattaaaagtgaataccgaatgcaatatatta

SEQ ID NO: 394385 - DNA, 949 bp, Cannabis indica
atatactctcaatttatactagtttttttttagaaaaacatttttcttctcatattcttaaaaaaatatataaatagaataaaaaataaataacattttaaataattacataaatttttcttagaataaaaaaattagggtgtttcgacaatgcacctcttaaaatggatgcacaccgaaacacccgtatttattttagcatctaaaaaactttttactctatttttttatagttgtgaacgttataattgtttaagacatcttataaaatttcaagaaattcaaaataatttatatagtctatttaacacgcttgtaatagatagtttaaatactattttcaacgtgttaaatttttctgaatttctcaaaattttattgcagaccttaaattattataatgtacacgatcataaaaacagttggactaaaaagtctcttagatgctaaataggagtacatcgatgcatcacttttaagatggtgcattctaacattttccaaaaaaattataatttcaaagaaaaaatgaaaaataacttaaataaaatgaaaaatgaacagagatgccgagatgggagcggcctagtgttggttgtttttctgttaatgtggacgctgggttttctattcgtggcgagggggcggcaactggggtagttattagagatgccgagggggttgtaagctttgcttcagctactgcgctctgctctgctggtactccgttggtggcagagctgttggccatacgtgatggtattaaggcagccatccagcgacgtgtggccatgtttgaagttagatcagattgcctgcaagcggtccgtcttattaatggagtggaggtgggttgttggcaggaggatggcctcattgtggagattcaacgtttacttcggcatcattcagccaatggggttcggtttgtgtttcgggaagcgaatgt

SEQ ID NO: 394386 - DNA, 1197 bp, Cannabis indica
ccctttgaaaattgctccaatgtcatgtcatatctttggttgagaacactgaattcacttataaacgccaacagatcaacatcttgtttctctagaagaagatacttaaggctgccttttttcagattttggagctttgtatgaaattccagaagttttggtgagacttggagagtgttaagtacttctcaagagtcttctatatttaaccagcagattcacacctaatgatgcgtatcgtttaccacaataaatttaataatttttatttttatattatcaattattttagtatatcggtaaatacaaatcgattctatgttgactattatcaatttattattcaaaaattagtaacaagaattaaaaaaggaggtttaattataaagatttaacaataaattagaaagtaaataaaaatagatattacatattaagatatagttaagagtaaatctccaccctcaacaatcattcaaaatcaatagtaataaaaattattctaatttctcaatttaactattaaccccgtaaaaagtgctgaagtaatcaattttctaaatatccctagctatttcaattaatcaaggtgaaacactcaataattaaatctttaagcaatagatccccaaaacatgcaatctatttaatctaagaaaattattaatttatatgaagataagttaatctaagtaacaaatcaatgaagcatataatttatttaacttatgttttatttttttatcacaatcaataatgcctttgacattactataaattgtaaattatgactttacttaaaatcctaaattattaatataaaacaatgcacaatctcaattagtaaacaatttaatatgggagaaattaagaataacatttattattaacaatcaagaatttatgttttatggttttgaaataatctttaactaaaaagaaactactccataatcacaactataatcataagcataatcataattgaaaattaaagagattagggagaagaaaagagctagaataataaataattgatgatgtaatctccttcttctctactttctatgagtttctatatcaaaaatgcaccttattgttgccaatgcctgggattcggtggcccatccttgggcccctgctcgagtttttaaaaagatcggtgccactcgggtagcgctccttcaatggaataga

SEQ ID NO: 394387 - DNA, 784 bp, Cannabis indica
atttaagttgttccgttggttgctatgtgagttttgatgtggaatttccgtaaaaataaaaaaaaaaaaaaaaaaaatctatattacatctcgtcttatagttggttagcggtttttcatgtaatttattaaattaaaatgtgcacgacccgacattaaaatataccacatatcatctcttatgtcatttgacaccttaaggtactccaaagcatttctctataattataacatattaattctcggaagtttttaacagaactgtccttatatcctcataaaagagtcttaaatacccttaataaaattaatctttcaaaaagttgtgaagatgaatgaaaagaaaaatcgataatgggttattataactattatgtatacttgtataggttatgagtgtgtagtggtttagatataacttttgaacaattcttggcagaaaatttaatcagaaggaaaagaaaaagaatttcatgttaagatcttaaattttgagagatttaagctgcaatttatgatctttttttcaaaccatgtttggaacagtttcaaacttaggaaatatttattttattttttcgatggaagggacacatttatttggagagagtaagttcagacatgttcttaccaatttcgaacttgttcaggccatttcacatattgaaaggaatcaaaattcaaactattttagatgaaatttggatttatttcaacaaataacgtaatgtagcttattttattaaggctaattagtaattttcccctcgaactttgacatgta

SEQ ID NO: 394388 - DNA, 981 bp, Cannabis indica
aaaatagtttgtgtataaataaaaaattaaaccttatagcatcattacataaaatgtttatcaagatttaggatatagataagcaatcatattgattgtgggtaaatgtctactttgccaaattatgggcaataaaattacatagtcgatcaatacaggaaaataaacaacccacaaaataaggcaaaagacttacaaaatgaagagtaattctcaactttccatcgagtctccttgccattaagagaattgattactacttttaagtcactctccacaataatgaacctacaatcttttaccttggccttgtctagggccaaacaacacgcagctgcctagccacaaagggcatcagaaaaattcaactttgtggtgcttacccaagccacctcgccttcatggttcttagctcatactttctaaatccacttttactgtcgcagttcaaattaatccaatcatgaagaggaggacgccaaacttccaccaaaattggagtaagagtagaaatgagggaagctctataatttacataagagtgagaaatatagttaatacaacgcctcacatgttatctagattattattatataccttatcattctagactctccaaatagtatcaacaacaattggagcatacataaagacctcatgtgcatttactcctttagaatttaaattttagatgaatttgactcagtcccaaattgataagtactagacaactaattaattcaagctcatttcatctttaatgttttattagagcatttccaaagtcctaaaaatggtgctttagcacacttaataaaagttactactctaatgatattttaagaagtgtgctaatttgacatatgttagagttacgctaaatttagtacaaaatataatattgtgtcaaattaaatttacagtaaattatactttttatttaccaaaatatcattaattattataattcattgactttta

SEQ ID NO: 394389 - DNA, 1064 bp, Cannabis indica
caataattaacaaaaatacaacagacctttatttttagtaaataatattaaaaaaatcaactaaaaatattaaaattcgtttgtaaactttttgtaacttttgtattgtttttgttattcgttaaataatcccttgagtaattccttacttctttcttttctttacaaatgctgggccttttttttatttgattgacttatttaatggcccatatttagggatcttgaatcttgggctcctaacaatcatggcccatattgttgggattttcggacgagattgagagtttaagtggaatttgactctctatcgaaataatacaaaaaatgattgtctgcaaattttcctaaattttaaaattaagttaataaatgtttattttttttaaaaaaaataataaaatagttaaacatactaaatcagttaataaaaattataaaaatatgtttattatatattttttaaaatataataagtaaattaaactatataatattttcaagttttaaaaggcagatcaattactcttcattagagctatatctcactctatatcttagtcatgtgtctgtattttagtttatatagatgatatactcatcacggggaatgatgataatcttgttgagcaactaattcaggagttgagctctactttttttcttaaagatcttagtttagttggttactttttggggaattcaggttagggctgtacatcggtcggttttgacggtttatcctatatattttctaacctaatttaaagttcaggttgctaaaatttaagtgcaacccgcccaatgtaaaaaaaaaaaaatttataaaccaaccaacggtttgggcagtttggtcgggttaacccgcccaaaccggccaaacttttttttttttaaagtcaaaatcaataaaaattaaaaagataaattaaaaaaatcatattccaccaaagtacaacactatatatatgactttaaaactaataattaagtatataactttatataattatatatttaatcatttatgttatatataataaaaactaaaaagttaaaaaaaa

SEQ ID NO: 394390 - DNA, 1368 bp, Cannabis indica
taaattttctagccctagattacataagcattcaaattcagtttacccaaacagcaaaacattgcaaaaaagaaatacataccaagaagttaaaattgaaagcacagaagaaaaatcaataagagaaagtgtcacttactattttgatgggatattctggataaagaagagcttcgcgacagaaattccaacgatcaaaaaattgggtcttgatgattttgaggaaaaggaatgcgattggatgaaaatcgcaggaaaaatgtgagagacaaagagggcatgcaaattcaaatgagaggtttgttgagatttttttgaagtttgaaggttcgtggattgaaaatggcgaatataatacacagtttcaaatttatacctaaaatgtggtaactatttgatcgaatgaaatctgatcaaacagataggaactgtacaagaaaagaatagtcagagcattaaataaagaactgatgtgcttcgaaagttttgaactatcaaattctaagcatgtaaattttaaatgggaaaaatacaatagtacctttaaagacatttaaaaattgaggtctatgtacaaaaactgaagttgctatgattgaaattcttaactttcaagttatcattctaagcaaattacctctcactctactcttctcacttcaaggccagtcccaatcgaacatactacactacaaaaaatattacttttagtgataatattttaatcacaatatatattttttgtaattaaatatcattatttatcactaaaatataatattttaatacaagttgttattaatttaattttaattacaataaatgttgtgactaaaaatatatatttaataataataaattataatttttataactaatacttttaaaaataaattttttaattataacataaaaataataatttatatttagtcacaaaatttgtaattataaaaaaaaaaagtaattttttttttacaatgctgttaggattaatactattacctagctaacggacaaatttggtatgatcagttaggcaggtacgttagtctagtctagtctagggcatagctatcctagcataaggtctgattaggaaaatgatgaaacaattaatgaataatatgcaactttattatatggccatttgtatatctatatatagcgtggtccaaaaggtaagtcgtaagcatatgtaggtgtactacgcatacttctatgatcacgttatcaacaattcacacccatttctatagggaaatttacataatatattaagttttactatttttttacaaaaatactgtcagacggtattttttacttttttatttgtatttttttataagtttcatactgcaatat

SEQ ID NO: 394391 - DNA, 628 bp, Cannabis indica
ggaatcgaatgtctataccaaagcatagaatcatttctgacttacggtgttagatagttaggctgagattgaaatctagattgtctaaatacaatatatatgaagaagaagaatgccatatttgtgggctgaacaaattgggaagatcgatctatttttcaaatgttacttaagtaattaggtgttagtgttttgataggattattgctgccaatactgttcatggtgtgatgagatggatctcaaatgctaaaacaaacggatttaggcaccaaatatttatagctacacttgcggcaactatatatcatatttggtggagaaggaatgaagctctatgaaacatgaagatatacacaatatattttattgtgaaaagaattaaacttgatgtaaagagaagagtaaagagtattatgcttaataaagtgtaaaaaaaaagatatagaatggttagaaaatttgttaagaaataaacaggcctactattggtgctgttagtggtgtaaaattttgttgtggaatcaatatagttacgtgattgacaaaaaaaaaaaacataacataaataatatttaaattttttattttttattttattttaaaaatattttatatttatatttat

SEQ ID NO: 394392 - DNA, 1494 bp, Cannabis indica
catcttaattatatttgagtacttatatatttatacaatattgatataatttatatatcattgtatgttattctctcatatttattttcatttttaataatatgctatataactacttaataatattttttatacaactattttaagtcaagcctctccactattaccttttgtcaagcctccgttattgattttttttaaagaattttctttgtttgaagatatcatagatcttttactttattttattttgaaaaaaaaaaaatcaattgtgtattattgggcaccctttttattttagtagtaatatatctaacaaaatttaatttgaaatataattatttatatatatttataaagattttttttttaagaaaacgttcattaaataaaatataaaataagatctccaagttattgcagataatgtttgtaggaacagttgacacattaactatttaccaacctacttagcaatattgtgagcaacaaaattataaaatctcaaaaaataaaaagcaaaattacaacctaaaaagttacacgagaatctattacaaaccaaaatatagttatcaaaccgccatttctaatcatcactttgataacaattttcgaatcactctcgacaacaacaaaacaatgcttccacacagttgttgtctgaagtgctagcacacatgcctccacttcaccaattaagggattagaataggcaaaactcttggaaccaatccacagcactattcccacatggtcttaggccaacgctacaacacacatcgacccattacccactttaacatcacaattaattttgattcaatcctcaggaaaagaggaccaaaagggggtctcatcatcaatagcaagccaaagtaaagaagatccacaatctgcataacagtgaatgataaaatcaatatcatgtttgatgttatacaaattattattgtgtacctcatcatttcgagcttgccaaatggtgtccaccacaatagaagcaaaaagaaacacttcttcgacaaccgcacccttagagtgaagaccccaatggaattgcacccagtcccacatgagccctctgaattccaacaccagaatgagaacctaaggagatgtcctccaaagatgagagtcaaaatcatagtacaagaatttgtgctccttagtttcctcacccaccccacaaatagggcaacatatatcactaaccggcgatctcttggcaagaatagctcatgtcgagagggtattagacagaatacaccaccacagaactttatgacgctctaaagttttgcgattccaaagtttgtttcacatggcaagagccacctcgtaaggaaggcacagtcaagagcttgaactaagaggttgtaataagagattgatagtaacactccaactcacaaaattactaggcagtaggcaccctaagtgccttttaaaatattcttcaccaaaaaaagagtttttttttttatttttatt

SEQ ID NO: 394393 - DNA, 1414 bp, Cannabis indica
aacacatattaaatattaattaataagccaacgttgttatttattattgaggagtatatgcatgatacatgtactagtctttcctctctctttttcaatattttatgtttgaatttttgctataattaattaatttattatggtatatttatgtgggtttttttttttgtatgggaagtatatttatgtggttgcaaattgcaatacaaacagattccattactatgtatattttgaaaatagattggccacaaaagtcaaacttaccatttatgatgagttcctatttagttacccttatatcttctacacacatcacttcccaaacctctcaatttggtgcaaaagtcagcataatttatggcttattaattaattaattgatatatatgagtattgttaatgggtaccttttgacatatcgctttgtgattggctagcgatattctctaaaagttattatattaaattatatgggacctgatacttaattggaccaatagtgatattaacacataagagggtgctaggcaccactgatgtcctttagcatttctcgatatatatatgaaatgctgaaaggtatcactgatatctagtactcttctatgtgtcaatattgtcattggtctaattaacttttaaggagtatcggtagtcaatctcaagacaacatatctagaggtactagacactactgatgctcaataataatgctctctatatacatatatgttataggaaattttacactttacaccttatttttgatttaattgtcaagtatcaataacatttttcttgctcaacgcgttagatttcaatattcctccagtttttcatgaaccaatgttgaaactgttcatgttgcttattgagagagtctcgcagttattgttgcaagtcaaccacaatttggctgagttgggcaacccgaggatcaacctcttcaggttcttcgatctctacttgaggctccccatatgagatctaatcgttggtgccagtccaaggagcatttggtgatggccttggaggaagagttgaggagctggttttgtggccttctcctggcacctggggtgcaggattcagttccaaccctgtcaactggcatgcccctagttgattggccagttgttgggatttttttgtcaacacttgcagaacgtgctccaaccatcttgctagtaactttgttgagctgtggctctcaatgaaagcgctaaaattttaactcagaaatttggactaaacttctaagccacgcttgcttgctagatcgacgagcattaataagtagttaagtaattataagagagacacaataactttatagtagttcactccctgtatcacgacagtaatggagatacgtctacctcgagtttttatttctcacaagatggtaatt

SEQ ID NO: 394394 - DNA, 693 bp, Cannabis indica
ttttgattgtgttgtgacaagttctaagaccaagaagatgaatctacacacaatggataatcaagatgtaatgatttctcttattatcaattaaaagagcatttgattgtattaattaaatacatcacacaatctaaactaaacacacttatttttgaaaaactaacaaatttccctaagtttcttatactcctcaaaacccagtaaagaatccttgactttgagccaatcggtcggctttggcatcataatggctatgtagccctctctttccgccgacgaattaagcaactgtggctgctttatcagtctatcgtttacttccaacagagaccctttcacgcaacacctcacaatgtaagacccttcgttggtgcaaactttgcaaagagccgaattcggctctaaaatttgagcgttcctcttgcgttttccggtgaccttcatctcgcttcgattagatttgccgacattgaaatctacggccgtgatgcctcctccacctcctccttcttggtccttaaaagccagatgcgtcgaagccaaaccgatcacgcataatccgtttgcgtgacgataaacgtactgatcgtgccctggcttcaagaaatctggggcgaaataggagatgaagttggattgaactgccgatggaggagtagaaggaaggtccccgacgttagggaggagaat

SEQ ID NO: 394395 - DNA, 791 bp, Cannabis indica
aaaaaaaaaagttaccacaatactataaaattgcttaaataagatatattacaaaattaaataaaatattaaagaggtccccatctaaacaaagagtccatactctccaacaaaaaaaaaatatgatcttcctccccgctctcttcccatttggacggatcttcgcccaatagagtggtagaaaaaatatgtgaaatatgaaaaatataacttaaaatttttaaataataataaaaagttactaaattaataataggaaaataataaataaaataacatttttacaaatagtgcgagtcaattatgaaccgatgagctttttatttttcttgtttataggctcatggattatacataagggttgtggcctttaattataattaacacatttcaattacagtttaaattgagacactaaaataaatatattgtcattataggggcggacaattatataatttctataatttggaaacttgagatctgtacgcaaacacatttcaaaatggttttaaatctactagattaaagttacgtgcaaaagcacgtattttttatttattttagatgttataaattatttttttaatgatacaacaaataatcatatataatttaatattgtttaattagattttttttaatatgaagtgattaattgaaaaaaaaatatataataaataaaagtataaaataagtataagctttgacttattttttttaagaatttttttttttgaagtgtttgaatattattaaaaaaattataagtaaattaagaattatataaa

SEQ ID NO: 394396 - DNA, 834 bp, Cannabis indica
aaaaattattagatttgttaggattttgatagggtatggaggggaactctctaagagcattctaatggtactctctactaaaataggtaaaaaattaaaacagataagagttattttttatttgttgttgctctaaatatactctctagtatagtgccttagggcacactcattttagggatcaaaataaaaaaaattagttttttaaaaattatgtatttttcagtaatttttaaatatatcatttatctttatagtaatactaaatttttttttttatttcaagttagtatttgattatttatataatattttttaatttaaatttgtcaaatataaattaatttcttaaaatgatgaaaaaataatagtaattttgattaaaatactattaaaaaagtttagcaaaaaaataaagaacttcctacaattatagcatttctaactatattctctaaacatgttctttaactaaattaaggagtgaatctttaaaaaaattccctatttattagagagtcattttctttgtatggtttgaactagggtgttcccagtgcaggtggtgcggttttggatcattttttcaaaccaacccacacatgcgatttttctaatttcacaaaccgcacccgcactgcaaaactaaaaatctgcagaaaccgcacctcaaaaaaatgatgcggtgcggtgcggtttttgcgggttagactattactaataattaaactatcacaaatgcaacaaagcttgagcaacacttgtcaaaaatatcataaggcttgaaaataaatatgaaacaaaattaagttttaataatacaataattagtgg

SEQ ID NO: 394397 - DNA, 976 bp, Cannabis indica
ctacacagatgtacacaactgtgactatcaaagtaaacctttagaatctctttaagtagccttaatttcttctagtagcccctttcatccataactcactcaatattgactcgattgatatgattcaacttgcatttcaaagataattcaatgttctatcaagttatgtctcacacttcaatcgcaattataaagttatcatgaccaaattttacccctatggagttacaaaaataagctccaggttacccacagtgggtcccactgggctccaaaaaatagtcatcaccactagaagctaattttcacagttagatcatcatctacggtcaaaaacatctatttgtattttcctctttttttatgggcctccttcacatataaaaggatagctcccttagctcatttttaacttttaaaaaactacccacaaggttagagcttatttctcttatttctctctctagaaattagagcttctgacacttagcctatttttgaaataccactcgtgagaaataaaaactcgaagtagacgtagctccactaccatcgcgacatggggagtgaactactataaattgtgtgtctctctctctctaaattttgtacttaaactgattattcatctcaccaatctagctggtgttggtcactttttaacgtcaagcctactattttcactaaaatccaaaactaaacccttaggcaaaattactattattcctctttcttcacacttaagttatcttaaggcttaggataaaataataaaatatcacaacttcgcccacacccgatatttcaaattatcaaattatttgtccttccaaataaaaggttctaaatcaaacccatgtgactttaatgaccaaactatcgcattttcattgttaccgagcaaaaatcacaaatataacttgcataatatcatatataatacagctaaagtttaataaaatcttcggaattgaga

SEQ ID NO: 394398 - DNA, 1663 bp, Cannabis indica
ttattttttttatttaatatgttttatttatgtcttgtataatttatgatataatatttataaaatttgatttctttacaatattttagataaaaatttaatgtttcaaatgtattaattcactagtagaagtataatttagatcccatctaaattttgcgcgcaactttccagttctagacttaacacataaagggaaccaacattcgatctattaggaaaatcaggattccattattgtaaatcctgttcctaaccatctacattattagattctcaagacaaaagttgtaagaatcgtcttctttgagaaactttaacgagtgaattaaagaaactaatagcatgaacaggagttcatgattacttagaatttaagctaatctactattgatcattgttatgatataaattaggtctttataataaacggtaaacttgataaatacaacttcatacatatcggtccttgtcatatataatctctattatatacaacaccttcacttagatgtcatacttaaactgaataacgggcatcagtaaatcacactagcaactattgattaaagattcctaaactttaatatgatgttgactgctttattcatggctaagtgattttaattctccatagaactacaagtcataacctcatgttcgatatttatatataaattatttaatattaaatattaataatttaacattcatgcatatatcaaaatgttcaactcttatttataattagaaatgtctttacaggcttttcagggcataaaccctaacaaattgctctcctctttgaacaattttcagtttgggttgggacggttgcgtaggttaggatggtggtttaggttgggaccgcgtaagacagtgagcgagcgagagggaaagagagaggaaagaggagagacgagactgagtgttttaaatgtgatggttattttggagtataatgaaaaattagcctatccttctaattttaaacactttactaatgcatgcatataaaatcaaattttctttttaggtagcaaaaagttaaaaaggtcattttctttattattctaaaaaaaagacattaactttgttaaatgagaagtaaggccatttgttgccatttctctacatccaattccacttttgtcccgtactccaaagttaagggctcatatagtcttctctttgatgcacacgtgatgaattcaactataaactattttttaaaagggaaatttgattttttattcatattgtaggttaaaaataaaaacttagacataaatattggtagtataggcatattttattgtataccccaaattatccttcctatttcgaaaaactacccaaattttctcatcccttctctctttcccaccagctcgttctctcttcctctctctggttctcaccaaactccaccaccgaaatactgtcgaactttggtgaccaccacccacgaccctccatcttactcttagctctctctattacgtgaccaagactgtaatgaccgttttagtaatttggattagtaaaggcaattagcactaatttctgttaaatttataattatttatgaattaatttatttgtgaaccccaataattagaaatgaatattagagttataatttctcaattctggagatttt

SEQ ID NO: 394399 - DNA, 960 bp, Cannabis indica
gtaatggaatttatcactggtcatttcgacaacgcaattcgggacccaggagttgcaacaaccctcattacataaacgagggagttcttgaagttatttttgctacagggttggattgggggagaacatgatgggggatttttcaaggttaatcgtttgacctgtagctttggccactcagaatgattttgtgagaatctgtttgatactccgccgaaacaaatcatcaaggcttatgacctgtctttgaaggtggctccacgacgtaaacaacataccatgggagcccaatgactccgattaggggtagccatgaaaactaccgtttctgggatgctgggtaattctcaggtgacattgaatgtaggaaatcatggggttaatgcacagatgcctcctcaatattcgactattaactccccaaatttagggggattacaaccttcaagggttctggatttgactaaggaggtggacactatgattatggatgttgttggtgatgttttaaatggtaagtctacggcccatgtggagaatggaatgccaggtgtaaatggaggaactgactcactgcttgtgttggattctaaaagaagaagaacatttgatggattagatacatatgctacaaatggaccagagttaaacaaattggatggacctagttcaaacaatttacagaaatatacaaatgttaatattcatagtgaaataagggatgttgatgtggtcatggataaccatggggatgatagccaaaaaaatttatttggggcgggttctagtttccaggcccgccaagcattatgaatgtcttgagctgaaattgtcgtgggcttgggaaccaatgaacaattcaattccttaaagaacttgttgcccagaagaaacccaactttgttttcttatgtgaaaccaagtgtaataaaaaaaagggctgagtgggtgggtcaacaa

SEQ ID NO: 394400 - DNA, 676 bp, Cannabis indica
gaagagaagtggtgaacaccatagctaaaaagtattgtctgctggaagaagaagactttgcagctttcatcttctttaaggctttcatccgctcagctctagcacgcttaagcatggcaagctcggaaatctccctgattagcttctgatcagcagcatccaaagatgggcctctagggggtctaggaggctttgaaggtttataattactaccctttttccgtttctccttcaccgatgatgtcttctctggatgaccattagtgtcttccccatccaacatcttatctgtcaccttgacactctcaagagaaactccattatcatatgacacattcccacaactcaccccatcttcagccttgattaatccatcaacaaaaccaccacaaaacttagctatcaatgtcttagcttgctgtttagaacccgaaacaggggtagtattaaactcttcctcactggttagcactccaagttccagatcaactctaaccccatcatcccttgaaactgtaagatccatcataagccaaaatcccaatataattatcaactaggtcctcactctccaattgaccaaaaccaataatatcaccaaaaacaccaaaagttcaacccataacacaaaacttccctttgggcgatgtatattattcttaaatgtgaatagaag

SEQ ID NO: 394401 - DNA, 1024 bp, Cannabis indica
tgattgttgtaagaccttaaatgggaaaaacaagagcaaccaaatggttttaaaatattgtaatcaggaggttgaccaaataggtactcagatggagatttattgtgtaaaatcggggttggtaggcgattgatgagaaaggcagctgtgtgaaaaaagcatgaccaccaaagtaggaaaagtctaatcctgattgtgctaaaagggtagagccccatttctgtaacatgtctatgcttacgttcagccctcccattttgtgtcactagttttaggacaaggatgtgtaaaagagattccttgatcacttagaaacctggaaaatggtctgtactctccccccagtcggcctgaaacccttccattggtaagttaaattgtttttctaccatagccttaaactttaaaaaaacatcaagggcttgagacttaagtgttaaggggtagatccaaacaaacctactaaaatcatcaagaaagtgaatatagtaactatatccatctttcgatttgatatgtgagggaccccataaatcggtatgaatgagttctaagggttgagaggcatgagaactagatatgggaaaaggttgtttgtgactttttcctaattggcatgctctgcaaaatgaaagctggtttatggtgccagtgtggggaacaacatgtaagattttactcaaggtggcattggagggatgccccagcttattgtgccaattagtaacattagacatgtagcagacactattaatagtaggagtgcaatttgacaaaccaagagtatgcaatttatttataggaacatttgtacatgatgaattactgattacattgtcaaaggtagattgactagaatagatgaaagcagaaggtgtacaaacatagccaagaggattttgaatgggaggtcttgagtattcttcaagcacgtacagtccatctttaagtgttcccttgagcagcactttcccagtgtgtttgtccttgacaagcaacatgttttatgaaattcaagaaacac

SEQ ID NO: 394402 - DNA, 711 bp, Cannabis indica
aaaaaaaacgtaaaaaaaaaaaaaaaaaaaaaaacctattttttattctccatagcaataaattgcaaagtcttaaaatgtgggttggtcgagtcgaggggcttggtcaggtcacatattcgaaatcagttacaataaaataataacaaaaaaaaaaaaagagaagctcggtcagatcgatggatggatccactgcaatgcccttaactttccacgcgcttttcataacgcgtgaacctcaccttccatgaccgttgccaaccgagtgctctgtcattttttttcttctacagattctgacacattaaagtactgttcactgtactctttacaaattttggatttaatttctgttatttttgtttaattttatgtcttcgtaattaagaaaaaaaagataattaaaaaaaaaaaagaagatgattctattttaacttgttgtcttttctatttccatttttcggaaataaatcaaacccttttaacgttttttttttactaattatatataaatattgtaactaaacagagttattcatgttgttaaactaaaatttatttgagattttttctattatagaccaaaaatagatgaaatttacatttatggccctaaaaaaggaaataaacaaaagtggaaactaaaaagttggtaattacaaaaataccggctgagaaaacggaaaccaccattctcaaccatttttcttc

SEQ ID NO: 394403 - DNA, 810 bp, Cannabis indica
agagtttttaatttaaaacaattttttttttttcttaaaagttcaggttgtacctactttagtttttaggtgtagtttctctataaattcctcaataagttattttttaattgcttaacatatacttttttatcacagtttttttaaaaaataatttttaactttgttaaaaaattgcaccaaacgaattctaaatattttactcattgacaataaaaattgctgttacaaggctctcaatagaaagaaaaatattattaataatacaaaatacataaaattagatgtgacctaaaaaggaaaataaacaaacaattggtgtaattagattcatctaactttatggtattaatagttaggattaatttcataaaattaaaacataccatgtgcaaagattttcatgtatctttttgtacaaaatggaacgactttcttgtctctccacattttttttaatcttgtcttgtgatgcacgaggaagtaatacaaaagagagttggtagtctttctaactcaaataatttaggaagatcatcatgattacttgtacatatatatttggtatataatatgtatgggtaaggcttgacaacagttagaaagtatgagtagatatatttattccacaatcttaccttgatgctgaaaaaggactaaaattaagtcgctagattgataaaatgaataatgagttaagtaaatattaaagaaagatacataaaatttatagtagttcactccaaaatcgaaataataatagagctacgtctactttgagtttttatttctcatgagaattacaagaaa

SEQ ID NO: 394404 - DNA, 611 bp, Cannabis indica
aattacaaaaagtgtcccacagcataatttttctcttttttttatatatttaacgcagtgaaattaagtttcaaacaatctattgcatgcatgcttctttattttatacccatgtaaaataaattatttgaaccatgccttttattagatattttaaataactacaatatacatcattaatctttaaaaaaatgaataacaaaactttaattttttatgtaaaaaaatatgtagtatttaaatgatataaaaaagaaatataggaatttaatctaagaggaagaaaaatacaaatttgaatcaccttatagtagtgtagaaatacgaacttaaaaagtagaatttattagtatttaattttaatgaattagtaaagaaatggttattttacaatttttttttttttttgcaaaattaaaattaaaacttattttcttttcaccctattattacccaaatttttcatcataggatgaaatagctataacaaattacattttgtggaggtttaatgttatgaatttgattataaagtgtattatagaaaatttacagatgaaaattttgaagaaaaaaaattacaaaaatgcgttaacacacaaaaaaaaata

SEQ ID NO: 394405 - DNA, 1103 bp, Cannabis indica
tcctagcaaagcatttacaaaagcaaagttgggaatgatccaatatatataggtatgaaattaaagcattatatttatgatgaagttgaatgagtaaataaactgtgctttttatagtagaatatgatgcatacttttgattgaaatatagatatataatatatgtggggtaaatttgagctttatgcttaaataaatccccttatgtcttcttatcaaaaaaaaaaagaaaatcccttacagcataaaggattttcatagatgatgctaaataattattttctgttcaaaatagtcatttacttcaaatattctttactatttttaaaaaatgtagaattcgaaaactatcatataagttatgaaataaataaggagacatgttttttcttgagaaatccaattcgtcacacttttttattcggagaagttaaataatgttttttttatacattacctaaatttacattcaaataaaattgaattcaaatattttttttaatgagtattgtactcaaattactcttacactctcccataatcaaaacacatttcaaacataataaattgtgttttttggagatgaatgtgtagatttatggaaagtttgagtaaaattttggttagataggaatggaaattatcgtgaaatgataagtgtaaaattagtaaaatgattaaaaaaaataaatataatagattttaaaagagaaagtaaaaattaaatgcattaatttaaaaaaaatatatatgtagtgtaattttttgtttcttccgggttatggcttacttactataatggccttacattatttaattaattactaaacaacgtaaactctggtattcatctgctccttttttttccctcttattttattacaaagaaacagtattacaaatttacaagttacaactagtaagacaattatgccatgattaagcacagtgttgaatagacccataccaagaataaagcaaacttgtcaattagtatgggatgatctgccttgtttgtatttctaacaaagggaaaaactaaacaccagcatttctcaatccttcactccggttcggataagttgagaaatactttttttttt

SEQ ID NO: 394406 - DNA, 990 bp, Cannabis indica
catatgtcactcggcaaaccccacacttgatcatcttgacttcttgctgtcgaacatggatggaaacgaggatgacgcatgctgctgcgtgacagcgttggtgattaatttgagctggattcgagtgtgatgtggttatggtggttggtgcgtgaagatggagatcgactggttgatgttgaagctgagttgaacggttggaggggaaatcgtggtgcagttcgaagttgaatgttgttgagatgagttttgtgaggtatgggttgagttaataatggtggttcggattgaggctacgggagctggtgtgatttggtcacgttggaggttatgggctgctgggtgcgacttctgtggctacggtttgtacagggatggaaatggcctgagtggggtgaagatcgactggactttcggcttggtgcagtggttcgcggctgggtcacgttggtgaagggaagtgcggctgtgtatgtgttggtgatggatgaagatgatgaaatggtagggttggatattgggctgagagaagtgggctctgattagtagatgggcccagttgactaaagtcaaaaacttaaagccccacaaaataatacatgtatactttatgtggtatttttgagtacaaaggtacatcactccaaatgattggactgagtaaaaagagttgtgcccaatgattgctcattaaaacaatttttgtcacatgtttctcttgatcagaccattcactttattcttttttttttctttcaaaccccagtagcaaacccttgctattaactaatatgcctgctgccaaatagatttgctaagccattgctatagcaactgggcatatctcttccaccccaaacttaatttctttgcccaaattgaaatttcttcacttccacaaccttcttcacttgatttcctgcacattgaaagaaaataatttctcaatttcaccatgacaattatttactaattatataatatatatat

SEQ ID NO: 394407 - DNA, 898 bp, Cannabis indica
ggccaatatactgactcgtggactagggatattaatgcccaaatcatgtaaatattcttcatcttagttacttatcagttatttaattctaaagcattcatttaattacttcactaaatgggtggaaccaaaacccatgaacgtagttacttccaaaaaggtcctaaacttcgtaatcaagaatatcatgtaaaagatatagatttccacaaaagatagtgtctggtaacggaaagcagtttgacaatgatcaattcgctgacttttgtgccaaacatggaatcatcagaagcttttcagttgtggccagatctcaagcaaatggacaaatggaagttatcaacaagattctaaagacgaccttcaaaaagaagcttcaggcttacaaagcacattggccgaaagaacttccaagagttctttaggcctacaagactactaaaagaacttcaacatgccacactccgtactccatgacatatagatgcgaagtagtaatcccagttgaatctaccatgcctatacataggagagatacctacgacccaactcgaaaccgcactctacttcaagaatctttggatttaattaaggagcttcgagaaccatcacaggttcaactccaaatatacctgttgacctcaaaagtgatcaactcacagtggggtcgtatagatctgatgcttgccacgtgttacacaaatagaatgaaaaagtataaaacacacatatttgttataaaggttcggtcccctgtgatagggggtaatgacctactccccttttagttgtatttatacctaaagataatactattcagatcactataggtaggatctgatatagctctctatcaagatacaaaacatagatcaaataggcagatctctaatgagag

SEQ ID NO: 394408 - DNA, 556 bp, Cannabis indica
attattgttgttattattaatatttgaaataatgatccattaaaaaataagtaaataataaattaataacttaattaattaatattatcattataattaggtggtgaaagaggccctgttgagaacaatcaaggaaggacttggagaaaaatggaacgaggagattggttcttcttggggagaagcctatgatcaattggctgcagctatcaaaaatgagatgaagcagtgattcatttcaaactctgttttttattaaataattgaacttgtacaagtaaaatgcttcatctcattatgggcaagctcatgaatttcaatttcatcaaaatcaaataataatatcatcatttataattaatatgactctgagtgagtctattacatttacacatgtttttttgaacaattatatttgttggatctgtaacaatgcattaatttttattaatgtttacatatatctttatatattaaaagtctctatttaacggcatttcttggtttaacagaatataccttaacaataaaagaatattctgttaaatttaaccat

SEQ ID NO: 394409 - DNA, 600 bp, Cannabis indica
ctcaagctttgccaaattcacagtcagatctgtcagtgccatttcactactaccattcctcattttatgttaaccaagtaagcatacaagttcaataaattttttttcaaagcatacatacaaaatattttatggggtttatattaatatacatgatctttaaatgtgtagcatgaagttgaattcactcataaaaattcaagtacaacaaccggcatgatagaattattgcaacaggtactatatacaaatattgatttggtaaatcaattctttagtcacttttttttttgagatggaacgacccgatggagttacaagcgaaggggataggggtcattgccattccaataccaagtgttatctaatcctatagccatttgtgccaaattatgcgtgcttgaattcccttgcctacggatatggtgaagggagacagcgggaaaagaagataacatttctcgaactgaatttacaattgctccgtagctggatagaataatatcctgtgattggatatcagtgataagactctgacaatcagcgatagtataatcagcgataggtattcttacaccttggaaaagtgttatgtccttt

SEQ ID NO: 394410 - DNA, 689 bp, Cannabis indica
gtaataatacttaaattatattcttgaaactctctaagtaactagctagttgttaaatattaaatcattatccatgtgtttttttcttattggtatatttacactaattttatttaaaaaaaaaataaaaatttaaagacttggaccactcaaagattgtcacgtggcaatttacgctaaaaagtaaacttaaatatttatttataattaggagttaaacttaaatatttacaccattactcaataaattatgaaatttcggtacggacaataatatacataaacatatgttttcaagtatatattattataatttcacttatcaaaaaaaaatatatatattattataatttcaaaaaaagtatattatattattattgttccaaaaaaaaaaatatgtattattattgtcaatttaattaaagaactaaaaaaaattcttacttttgaaatttctttgaaaataatatagataatttttatggtcacgcaatttaatttctttgtagtagcaattaaaatttaagtaataattattattggaataattaatttttttatgtttttataatttttcacactacctcacgtctcctaaaatatacggttttttaaaaaaaatcctcaaatataatagttacataatcatggcccttctgttaggttatgtttcttttaccgttaaaaat

SEQ ID NO: 394411 - DNA, 591 bp, Cannabis indica
tatattctttgatattagtgttacccccttattttattttgtattctttttttggttgcctcaccagttaatcaaatgtgatattctagaaacctaagctttgagtaccttttttgaggacatctaatgattatcattcttattatttgctagaatttttcaacttcagcttggcttctgcccgctcattgtttctttgatccacattttgacgattttattttagtgaatttaattaattgtgttgcattcttctttatatttggttgtgcttttgttctgctactaccatcattgatgctcactgtaagctagcaataccatgtagtttattgttgctgctgctgctactgctgttgttgataatctgcagcttacagttgtaccggtgtcagtgttggttgttattgtggtatcggtgttgaattgtttcggttgaaataaactcaataagtatatagcttaagaagtggaagtttttttatcacctttgatgttaaaggttgaaacatctttgatacggtacgtttcttttgggctgcatatagttgatgatattgtttctgttttttgccctgtgatggaaaaact

SEQ ID NO: 394412 - DNA, 952 bp, Cannabis indica
tttaatttatttttatatttcgccactattaatcttttgacacatacgtatatattatatgacatagttgtttgcttctatataatattatttcttttagaagtagtgattagagaacaaaaacgtaatcatcgtcatctggttttgtctcaagtgtctaaaagattccaagcttaatttgcgccgaactcgtttaaattgaataagtgctcaaattttgtcataggtaatcaataaggcttttttaaagatggaaaagaatactatttataaacggtgctcaaattgttcttctcctaaagaatatctttatattgggatgtatattctcttctaaattattattagcttttcttttttataacaccttttttgggactctactttcactacacccttctcacaaaaagagaattgtcattccaacacatttagtaaaatatattgctgtttaagtttaactaaaaaatttatctagttgtttgcacaattcgacaaccttggtataaaatattaggaaagtaatcccaagatttgcttcaagcattaaacacattttgtcaagagagacaaaaatggtgagagtttcatgggccacctatagagttttaagatgcaagttattgactctattggcaaacttccccacatgctaagatgacatgacaacaacaacaaatatatctttatatattgttaatttaaccatttattttattattttttagttaaatttaataactaaaactaacatcgttagattaaattttaattattattttttcttaaaaaaataaatctaaatttaattattatttattgtttattaaaacatacaatacaaatctatgtacactataaaaaaattccttttggtcacagcataacttgtggctagtaaaaaaattgtaactaattataaataattattcctatgttgtgattaaaaggt

SEQ ID NO: 394413 - DNA, 1251 bp, Cannabis indica
attaaacttttatctctatccaaaacacatgatattataaaaatattctcaaaatagtttaatgtcaacacaaccaataagaaaaattgggtacagtaggttatatgtaattttattattattattattattttttttgaataaatttacactttttatcatttaaaagtataattgtctacaatatatcagaaagctttatcattaatctttaattaacatggcccatactatcaatgtaaataatactattatactgagtgacactccctacatgtatataaactagatagtaatcacgttcgaggcacgtctctaactttattagaattacctctattagttggaaaggtcttatcaaatatattggatattctcaatttatataatttttttaaaggagttatggaatagttattttttttttttttgtagggaaaggtgcccattaagaagaaagaaactccgataaatcacaagagtcatcaccaatccagattgctacttcatctaaccctttagcccaggctgccagattgtgcgcgaacgagtttgcagatcggttgacatgggtaacataggctccagggatgagagataaagttttcttaatttgcttgatgaggtcaccaaaaggcgaaagatcttctttagagtgcgaaatagcatccgagatagtttacagtctgtttccacacagtgaatggggaaacactcatcgatacaccaccgcaaggagaagagaagagatttagcttccaaagtaggaacgtctcctccccctgcatgagaagacgccactgccgccactaccaagccgtcactgtttcgaataattcctccaaagccagctcttgaaaaatccttcgggactgcggcatccacattcagttttaagcgacttggatctaggggtgtccaagaagtggccgaacgggttctgtttacacctgcttgatggaatagaatatttatattatagaaaataagtaaataaaatgattaattaatttacctttcgtattatattaatcagagttatattaatcagagttatattttaattatttatgtggacttaattatatcagtaactatcatattaatttgttgtggtaaaaatagaaaagaatataaaaagttgtattgaataatttgaattgattatatcttttgtattattttgtattattttgtgttatatctttatatataaaaagtagatatctaacggtaattattggtttaacg

SEQ ID NO: 394414 - DNA, 1514 bp, Cannabis indica
gtgagataatagatctttcttcttgatgtattgatttcaggttgggttcttgaactttggagggataggaagaagtttgatttgttaggagagtggtgagtaccgctctctgtcaagttcgaattctgacaacttaggagtcatgatccccttcactaaggctactaaggtggcaaattttgcttggttgaccccatgggcagtggcctgcatcccagttggaccatctattacccgagtagggtatcctttagaagttatcacttccaccgaccgtttcttggtcaagaagtcatgcaggtgtcttggtcttccaagtcaatcttgggctctagtcagctttggtcttgttgctgtctactaaccatggggttgtgaagacaactctggtgaagtctccagaatgaactctagatcatctcaggacaattttctatttgaatggtcattcagagcattgtagtggctacttcatcaaagtagtcttcatctagatcacaagtgtgaagagaattggactggttgctcaagttcaactcctctccatgcactcgagggaagtactcgtactgttggccattagggccacgaggaaaataattgcataattcacccctttcatctcggaagtacttttgagtatgaagtggttcattggtccttacctgcaaaatctaatagcctttggttttgaagtagtatcttttattacctttattagtttgaatagtaggttcatttccccttgcagggtctctaggcctggtgtcatgagagcgttgagaaggacttggtggaggagtcatgttggctctctcggtattgcgaggtcgttcaacatcaggtggagggcccattggttggaacccttgagctttagtcctttcaagctcttgctcaaaggtgctttccctctgggaggtttccacaccttatgttttcttagtgcctactggattaccaggtgtggttgtggcattttgagtgttaaagttttccccttgagcactagttcccacatgaccagttggttgactgggagtctctctcaccaactcggaaagatccctacgggaagtagttctacaaccagagcgataagcttctctaatctattgagacaggtaagctttccattgtaagatctccattgttcctactcaactcgctggctttcaatgttcctccatttccataaaccagtgttgaaactattcgtgataattactgagagagtctcacaactgttattataagtcagccacagttagctgagttggggacccaaggattggccttctcatggtcataaatctctatgcgaggctccccaggtgggatctggtcataggcgccaatccaaggagcgtttggtagccttggaggatgagttgtggagccgattccgagacctgctcctggtacttggtgttgggttttatgccctaaataaaactcatttcattataatcagatttacttattaatatagatcagaaataacatttaatgtt

SEQ ID NO: 394415 - DNA, 1117 bp, Cannabis indica
aatcttacactgccttctcattttattttattttgggtattttttggtattttttgttttgtaattacaccgagaaaattattagtcatttcttttatttttcttcaaaagatttaccaaaatttattatatatattaggctgaagttacgtacaggcaatacatgtatacatacaaaataattcgataatttaattatgcaaaatttggataatgtcgccattaaccttgaagagcatccaattgattgtaatacaaagcctacataaaaaaataatcaatgttacagttattataagttaactgtggataaaagactgatggctattatcaaatatttaaattataaataaattattaaatgataagaaaactacctctcacaatcttttggtattacagggtcaaatttgggaggaaggtggaagacagctcaaataacttcaaaagacaaatatatataggtcattgatttaatatgttggttgctagctatcataagatcaacctgcattattatgattgttttaaatatattattcattatcataaagtggaaagttttgatataagtaatctccaattcaaattgtaatatataacataaatattgattaaagctacttcggtacatttgtgttctcttgctaattttagtagctagatgatctttcacatcattacagaatgtagcttccttgaattttatttcatctgatacaaagtcaaaccttacacttaaataacaagaaacatccggaagtagtatggaaaagtaaaacattaaacatacaaatataaaataaaagagacagtgaatattgaaataatgattataccaaatcggatagcttgaagaacatataaaggatcatccataaaagtaacttgtggaaaatgagtcacaattcttccacttcagatcatcggtgcctgaatggaatcaataatttccaatgcgaaaaacattgcaagcccaaatatgttatcattctactcaggccaaagaacttattgatggttagatcttttcagtaggcatcatgatggttagatcaaacgattgaaaattagcagattaacaggctaagaaaaaaaaatcaaaaagccattctta

SEQ ID NO: 394416 - DNA, 508 bp, Cannabis indica
ttagcaaatacttaaataaatagggtgttacataatcaatctccagtcttaattagagtgatctttaacaatggttgatctcgaacattttgttcaagatcggaccctctctctaactctcttattttctttctccttctctctagaatgatctctctaactcgaactaactctctaaattggagtagtctttaaattagttttaagttcgagtgaaggaagcaaggtcaactgtcataacggttgacagtttaatttggttagctaggcacttaggaggcgtttggttgggaggaatgaaaatataggaataggaatggaaatgggaataggaataggaatggaatggaataaaatttaaaatgcataaaaaaattgataaaaaataattatttttttttcttgttacattggaatggtcattccttcctttttaaaatggaatagccattccaccataatggtggaaagagtattccattggaatgccattccaatactttaaaat

SEQ ID NO: 394417 - DNA, 1040 bp, Cannabis indica
ttcctacaaaatccctaatattataacgttttcactctgttaacttaactccctatcatttaaattttagcatataatttggattatttacctcacatattaaaatttttgatttttttactttttaccgtgggtaagaatttttttaaaaaataatgtgtaagttttgtacttgtattaaatttttactgttgttctacggttattttttagttgtttcactgtttgtttttagttgttcttatttatgatccactttcgttttacaaaaatacagtaatttgaaaaaaaattcgtgttatagtatttttgtaaaaattaatccaaattctaatatttttgtaagtttctataatttcgtttttgataactaaattttatcatataattattaattggtttcctcaccaaaaaataaaaccaataacttttcaaataagaaaataataatctttaaaaaaaaaaataataaatgcataaaattaaatatataaatacattaattaatatttatattttgatatgttactaatgtaatatatttactctattaattaaaaatatatacacacaaatatatttataattttttaaatattttataaacactgtatatatagatttattaaatatttgatcagtattattaatgtttataatactatttttttttttttgttgacattagtagaggaggattcgaacttaggacctcctatttgtgatgagaagttagacttagaactatgcctatgaccacatttataatgatattattaatctagtgtcttcattactaaaaattaaaaataaaaaaaaatgtagtgtgtttattacaacggtaaataatattttggatcatgtgttttactaaaattactgattggatcctatgttttgttaaatgacaaaatggaccttgtattttccaaaatgataaaaacaggaccctaatcttaatttttgacaacttttttttttttggtaaataccattttggaccttctgttttcaaaagttaccaattggaccctgtgttt

SEQ ID NO: 394418 - DNA, 1516 bp, Cannabis indica
ctgagaacctaatttgtcggattatctatgggcttgtcttaagctatttagccaacttctcattcacctttattcaaatttctactttgtttgtcttcagccattaaaggattgacccattgatttaagttaggctttcattgatttatgttgagatttaggccaggctgagatgagttgcttatctctccaaatcattcataggacaaatgagaataacaatttacaatttgacatgtatatgctttatttttagagttttaaataccttggtctgaaattgtccatatctcattgaaatgtttgattttataacttaagaattgttttagtttttaaaaacaaaaatagcttttaaaagttaataggggtttttgatcaaattttttaaaaatagttttttaaaaattgagttttttagaactagaaaatagaaagcatcaaaaaacatttttgcccacatacccaaatcctacaccaaaaccatggaacctagatccgggcttggacctggaccttgaccccggacttggaccccgacccggatacaaacacagacccagacctcacttgaacatcgaaccccgacctcagatcccaacctaacccgcatcaggacccagaccgtgaaattggaccccgacccaagttcgggtctgagggtttgggactggattcatgtttgggtatgggtctgggttcaggctggggttcgggttcgagttttggttcaagattggatgggtttatgtcatggtatagtgtagaatattagatttttttaaaaaatagttttaaaaaatctaaagccaaacaccattaaattttaaatatgataaaaaattattttttattattattttttattctcattttttaaaaaacatgattctgacaaccattgacaactttataagagtagatataagcgtataaataagtaagtggatagtttggtacgccgtataagggtcgtattgtattaaatactaaataacactatgtttgaataaaacaatgtattgtattaactattacaaccaaaacaaaaattttaatacaatgtatgttgtattatttattaaatacataacaaatagtccgtattagcttgtattataatatttataaaatatttgggatcaacaccaatctttgacccggaccgagacccgggacccggacctagacccgaactagaacagacctggactcggaccccagaccccggacctgaacctcagacctgaaccctaaacatggacctgagacccgggacggggacccagacccagacccgggacttgggacccgacccggacccagactcagacccaagactcgggactcgggacccacaccccggactcggaccgagattcgggactcagacgcggacttgtagttggtgttgggatcgagtgtattgaaaatatattataactttacacaatctattaatacaagtcaatatcaaacatagtattctattaaataatactaatacaatacagta

SEQ ID NO: 394419 - DNA, 542 bp, Cannabis indica
ataaaaaattttaacttatgtaattatcctatatttatatgcacaaaatactcacaataacaataccggaatgtggcaacaaaaggtatgaaagaatcaagggatttttataccacatactgaaatttttaattttttaatttttttattgtggggtggaattttttttaaaaatacaatattttacggttattttgcagttgttccactgttgttttaattattatttttttcttattgttttgtagttattttataaaaagatgatatttttacaaaaaattcgatatgatagtaaaattgtaaacttttgatgaaaatcccaagaatcaatcaatttggtttgagcctttgtacacttgtagtggacttttaaagtgagatagagacaagcctaagaaaataatcagtccagtccaattgggctattaaagtggcctatacacatgttttatcactgccttatatctctaattatatatatatatatatatatatatatcttatctttatatattaaaagtgtctatctaacggcattt

SEQ ID NO: 394420 - DNA, 855 bp, Cannabis indica
attttaaaataaaaaattgattataaaagttttaccaaacgccatcaaaattacattaagtatcattggttattattaatttttctttttgacaataatcagaatttttttcgtttaaattataatctatatatattatgggtaataattgtgacacacacacttatgtatacacaaattttttacctgcaatataataatatatatatacatatgattaatttgagcaataaaactataaataatgtagttcacaagttttaaagcatctagttaaagataaatacacatgggtaagaaagtatgtataatttaaatatgttactaatattacctacatatagctagatatgcaatatataaaaataattgagttaatcacttacattatatatatttcgaaaaaagaacaagcaacgtggaccaaataataaattctagataatagctatgggccattgttagtttttcttatgtagacttatgaaaataaaatatatattctgatagagtattgagaatgaaataattcctaacttatatttttgttaaaatatttggtgtcatcctagtcatcttaaagtcagcattagttgttttatatatccactaagttattgattttcttttttaaatttcttaatataaaagatatttctttaaaaaaaaggtgtgtaattaaaatgtgctgatacattatataatgacattagttaattatataatatagggtgattttacaatgcacccccttaaaagggatgtactgatgcaccatttgtttcagcatccagaagaattttttagtctaatttttttttccatattcatatacgttatatgtatttaagatat

SEQ ID NO: 394421 - DNA, 654 bp, Cannabis indica
tagaactcgatctatttcaaaaaagatgtcatccaggatttcagtatcctaattcggctcgccaatacacatgagatttgctactttcttatcatttaaaccaggatgagttaagatgactttcgggttattcaaattcagaaaccaaggatcagtggtaatttttgtttttaacccattccctatgtgtattatggctccagctgcaataagagctttggtttcgattaagctcttccaaataaaacttggattacatccaagggaggctgtgaaaaagagtcttcggggtaataccttgctttataaactcttgatattatgaatgagtcattagttatcaatctccatgctaagcattgctaaattatagtctctcaagtctctaaagtccaaacttcctgcatctttatgcttgctaagttttgtccaacttgcctaacttactccttgattttgttttgatgatttccaccaaaatttgctcataataccctccatcgatttgcaagcctcaacgggtaacaagaagacagacatagcaaagcttcggagagcttgtgctatggtttttaagagtatctccttcccagcttttgatagaaaacgaccttcccactgctgcactcttttctgcatcttgtccttcaaaaa

SEQ ID NO: 394422 - DNA, 872 bp, Cannabis indica
  modified_base (124)..(124): a, c, t, g, unknown or other
ctcattttgtttgttcattacttgagctatgttcatgagagattaagctctgtacaagaagatgaagaagaagtaagacccactacgtaattcgcctaaaaaaaaaccgacccaccgtagttanattttttttttttttttggctcttctttgttggtgctgttgttgtcgttgagctagtgcttgagttgtacgagatttttccgtacaagattcgtcttcttcgtttcgtttggtgcatttgtccttactggttgtcttctccatttgagcttgtgatttttccttattttaatatatattttttttgattgttttatttcttctctcgtacaattctcctttgctgggttttcttttatttatattttttattttgatgttgcgtggggatgaaggctttgaaatgagaatggggaatttgggattcttgttactatttttgagcaagcaagtgggttttgctttttttgggattattgttaattagtataacatacataatctagggttttcacatctagtaatgtattactcctctctgtaatgtggtcgatcaatgtttgaaaaaatatatactttatccttttttaaaaaaagaaatagaaaactaattttagttttgtgatcttgtggattttctgggaacatcccaaataaaaacggtttttgtagtttaaagcacttgtaataatagaatgagtgagtgttttgattattattttataaataattttttttgtgtgcatgaatttgctacctaaacaattgactcatgatgtattagaaaatttctaggaaaactgaacgaaagtggaagtgaagtgaaggaggaggaggagggtgtagggcaatgagagagagagagagag

SEQ ID NO: 394423 - DNA, 1584 bp, Cannabis indica
ttcagttaacaaaatttcaaaaataaatgaactaatattcaaaacaattattgaacagtaaataattactatattagtaaccaagtttttttttttctggtaaatagcaaaacatatatgcttttcatattttgaaatatttatattaaagagtaaatcacaatatttatttttaggattaaccaagtaacgacgagcatgatcatagattattttaaagttaacaaaagaaaagagaaagagagaaatgtatgcattacaaacataccccaacaaagaaaaatcttattatgaacactccaatgtgtggttgttgttgttgagtctaaatagtttggtaactttacaagcaatcagaagttcaatttcccttcattcaacttttggtttttgtgttacagaataccaatctttgttttcaaacttaagtgatgttgatttatgttttataaaatgatctgcgaatcgtgtagctcaccattttgctagagcttccgttttttatgctgattgtatgtacagggaatctaatgcccctgttacgttgatgaatgtaattcgtttggatatttaataaagtatgcatcttttatttttttttaaaaaagttatttttgataattaaattaaaaatgaaatctaaaaaaaagtaatatttattatacatattactgtgattaataagtgtatgaaatttgaatgtatatctaataatattagtgaagaaataattaatatttagtgggagctaccaaaagtaatattaatgtagagagccccacaccttatgttacgtactctcacaaattaaattgatctgctatacagtctattctctgcatgtgaggatataaaggatattaattatcatttttaaaccaaaaatatattttctatcagcacatttatttattttttgaaaaaaaaatatattttctaatttgtttcccactctcccatgatatttttcttttgagaatataatttattagctgtaaaaaatatatataataaaaaaaaaaacatattttatacgtcttttatcaaaataaaagtttatagtatgtacataacaattcttgtgcatagcaattctgttttattattaaaagaaaaaataataagaagaaataaaatgtaaaaaatttatgaattttagaaaatagagtacattagaaaagtcattattgggatatgaaatgttctaaccatatatttcatgtatatttacattatttggtgaaaacatgaataatatttatctacaactacaatattatttttaaagggtaaacctattaaatttatatatatgcttctaaagtacaacttccacattaatgagaaataattataatttgcggaaaagaattaatttgtaactttgtattaaatagtattgtattatttctcattaatgtagaacatatataatacaatactaatattatctaggtttgtttatataatatataatactatattaaattttaatttataataaaatattatatatttgactgcctatataaattaatatcagatataattttacataaaaaatattgcataaaatacaattca

SEQ ID NO: 394424 - DNA, 731 bp, Cannabis indica
gttagcaacatttagcaataaaagagtatgttggaggttagagataaagtttaacaatatgtgacgatgtgtcgcaatgtatgttgcggcacactatagctttgtgtttttttgacaatttttgccatctatatcgatgttgtttgtgatgtttatcgatatatttagatagtgtctggggaagtccaaaatgacctttatcaacaagcagcgatctgtcgcgatataattgtcgatatattccacgataaattacgatgcttttcacaatatttctcgacatatgtttgatctgaatttaattttttcctcatttttgtttgcagattcaactgtgtttgtggttgtattgcatgatggggcttgggcaatttaagatttcaattgaatattcaataacccaaatagtaagatgttaatgtttgaggttgatactacgttacaaaagatgcatgaaattttgtataaagagttggatatataccctcttgtgtatgaactgaaagtagaggtgtgttacatgtacatgaaaggcaatatgataccgtcagagattttagcgaaagatagtcaagtaagaatgtccttaataatgaaggcaaaaatgagtgtggagaacttgctgccactatttgtgactaaggttaagaggcatgcgattttggggcctactccgccaactatccccccaagaagtgttgttgggagttttgtcccagaaatagatctag

SEQ ID NO: 394425 - DNA, 624 bp, Cannabis indica
ttgggaggccgcatcgatgaagctaagaaagttattcaactggtgcctctgcgaggggggcgtttcagtaatgaaactatttactactagttttttttagaaataattacaatagttttattttagttcttagtaaactttagtttttaaatttagatttcaattttaaagtttaaattttttagtttagtaaaaaaaaaaaataaatataaagttatgtaaaaactgtggaaatcgtgaaaactagtcaatttaattaatttctagtgcttaggaacaattctttaatttctaaccttgcaggtacaagctacatgtcgtattaggtgaagcagtagcgtgccacgacatggagaacgcgggccgcggcatgctccgcttgaaaagacctggcatggagaacacgggccgcggcatgctccaccctgcatttagcatgccgcggcacgctaagttaaattaggggtaaatcagttcgtccccagaattctttttcaattttttttttcttttcctagacacaaccagtcacgaaacatccacgaaaacaccttcaaaattgctaatttttccaatttttcttcatcaaaacaccaatttctttcaccaatcttcatcattatc

SEQ ID NO: 394426 - DNA, 1155 bp, Cannabis indica
tgaatttaacataaattgtatactaaatcttaagcatgaaaactacatgtaaacataaatgacttctaatattctattgataacaaatcagattatattgaaatgagttttatttagggcataaaatcccaatatttgtagcagaaggttcctcgttcggtgatgaatgatgtcttctcctggtcatctgggtgcatgagtatttggttgtatcttgagaaggcgtccatgaaactaagtaacgtgtgttcagttgttgcattcaccatcaggtctatgtgtggtaataggaaagaattattggggcacgccttgtttagatcagtgaagtcgatatagacacgccacttaccttttttctttttaccacaacaatgttaggccgttgtattctggagcaaattttctccttttttgtttgaatggaggatggttagggtctacctgcaacttatgaacaataatgttaggatcaatacttgtcatatcctcgtgagaccacggaaagatatcgtggtacttctttaggaactggatgagtcgacacggaacttaggtgttagctttgatcctatctggacaatatgttctgaaaagtctttgctgatgcacacatcctcaagatcttccatttcaggctctgtaggtgcacatgatgatgtgcggtgttaagttgctatgctgaggcttgtttgtcttccaatgttgtttaataataatctcgtgccatcttttaggctccccaaatctccttcactccccacttagttagaaaacgataacctgatggtatgttgatggtacgactttcatagtagggatccaaggacggcctgggattgcattgtaggctaagggtgagtcaattaccaagaattcggtttggaggttgactccttacgcatatacatgttggaatatattttaccaggacctaaatttactaacaagtatgtttttaacatctatgaatttctaaaacaatgaaacttaaacacatataaagtatgattaaccttacattggttacaacggaatcaaatgaatccttccactaagatctctaacccttgttcctatctgtcgcagagtataatcaagatctgagcccaacactccttcagttgtttggattcttcacagtcttacacacta

SEQ ID NO: 394427 - DNA, 908 bp, Cannabis indica
ggggtctgagcgcgtgttgatgagagagtatgatttttaatttggtatctccttacctgacggtttcgaaccatcgatcaaagtatggaccacaatttaaaaccgtggtcaatattttgcctgacggttctaaaccaccgggaatagtgtattattatttttttttcaattttttctccacatttataaatcgttgcctaatttatagaagtgttaaaatccttggcatatagtatactacaggtgatggttttcaacactcaaataatttttttagtgacagtcccaaaacaaaaagcgtttttgggatcgtcggaatttgtagtagtgaaattaatttttttttgtaataaatatataggcttatcttctcttcgtatctcccacaatttctctgaaccggcaaatgaattccctccctctatttattctacactaacaaaccctagctaggtccactactgatttggaggcgcgaacatgtatttttttgttgtggcaaacatataagtctgtatagatttattatatacaatttcaaattcaaatcaaactagaaaatatgaaaaaaaaaattatgaagaattaatgaaaaatattaaacaacaaacagggtgtcgtaagcaatatatggtttgaaggatgtataaatggacactgatgagatatggcttgaaggataaagggaaaacaaagagaaaaaatagggaaaacaacaaacgtattttgtataaaattttacaacattataaaaaatacgttttccacaaaattggttcctagcaactataaaataaaagctcatgtcatcctgagaccgaaaactccatgcctaaccatccttatatgtataatgactcgcaagctttggactcactactgctctagccttcgccttttccttacct

SEQ ID NO: 394428 - DNA, 1150 bp, Cannabis indica
ccaatgctaagaatagtttaagggtattgaattttgcaacaggggtaaaagtttcaatgtaattaatgccatgcacttgagaatccttttgcaaccagacgtgccttgtatctatcaacttcaccttgttcattgtattttattttataaacccatttgtttccaataggttgacaacttggtggtaaagagacaacagaccaggtgttgtttttcttgagcgaaaaaaattattattgatggctttcaaccattgtgagaatttagatgcttgtctgaaagtagtaggctcaagttctgtgtaagcatgaaatatgacattcctaaaggcaacacttagcttgtcatagttaagatatttcaccagaggatgatgagttgaagactgcagatgtagtcttttagatgagcaggtgggagagattatcgacctactttggtgattgatgaatgttgtgtgaccttagggagagtatcaaggtcctgtgttgatggaattgcagcaggtgctgctactggtttaggatcagcaattacagttgttggtgtggtatcagtaggagcattggctggtatatttccatcagtagtgtttgatggtgtttgaggagtggtggcaggttgtgttggagtattagaatttatgggagatttggtaattgagtagaaaagaaaatgtccagttgttgggtgtttagagaccctttaagtggaaaaattgctcataaaagacaacatcttgagagtgaaaaattttgttagtggctaaatcgagaagtgtgtaagctttcatgccattaggataacctatgaatattcaagcatgaacccgaggagagaatttgtgtttagtactaactatagatgaagcataggctagacaaccaaaattcctcaaatgctcataagctggtagtttattatgcagcaattaatagggtgttaagtgttgtaataagtgagtaggtgtttgattgatcaagtatattgcagtatgtataagatagggccaataggtcaaggctatagatgattgaaaagccaaggcacaagccacatttaagatgtgctgatgttttcgcacaacaactgaattttgttgaggtctttcaacacaagaattgtatacttgaatacctttttgaacata

SEQ ID NO: 394429 - DNA, 869 bp, Cannabis indica
atcattcaaatgtcaaatttgatttgaccatcgaatctagaatgattaaaaatggggtaagagaccccattttcaagttcatgaaccttggaagtatcaaaacgacatccgagagctcagaaatgagtacccaacacccaagttgtcaaatggtctggtgtgttgggttctacttatctgattctgattccattttgaccgtctatctagtttttcacaataactatgatccatgaagccagcgaagtaaaattcttaacttttcatttttcatttccaacatggaaaacttgcttagaatgaagagttttgagtcactcatttctacagaacaacaactctggaaactagtgaccagcttcgtcagaacacataaccagaataagtgatgcaaaaatatcacttaggaatcataaagtatatctcctggatgttttttcacttgctcagcgtccaggttggcatcatatgtcaacctgggcactaaatgtgaacttgggtattgggtcatgagcaaccttcactaaaacgaccataactcactcaacattgatccgattgatgtgattcaacttgcgtttcaaagctatttcaatgctgtattaagtcatgttgcacacttcaattgtaattttaaagctactgccccacatttcactcaaagagagttacaaaattaaagaagctctagcttactcggagcgagtctcgccatcacgacccagatttcgaaaattgacgattaactctagaagttaaatttcattgtgagatgatcatctacggtctaaaacaacaaacttgtattttttttcctatttttgtaggcctccttcacctataaaaggatagctcccttagctcatttt

SEQ ID NO: 394430 - DNA, 614 bp, Cannabis indica
ttgtttttagaaggcagactgcaaatccttctagggatgaattgatctaggagccaatcttttccactaatcctcaatagatggttaaagaaaatcacaagcacttagcatcttctcttactcttgccacttgcatcattttattgtacttggccaggtgggtcgtcagatctgggtgcccatcatacaacttcatatggggcaagttcttcgagagtaaagcttctgtgaatctcctgatgcatggctctgggtccttatcctcagagtcggtgagaaccccactttgctttcggactagctttgttagagcagtggtttactcctctagccttttggtgtcactgtttgggagatctcattcgcagaccttgtcatttaaatgattcctgagattatttcctcgtggccttgccttctcactttttgctttttgtactcggcgtcaaaatgccttcttagatctactgtggaccaattatcatcagaatattgttctctagtcccactgtcctggttaacagaataactagggtaatttttgttggaaattattttaccaggatcttagatctactcacaagtatgttgattaataccctaaatatgaactt

SEQ ID NO: 394431 - DNA, 1025 bp, Cannabis indica
ttttttttgtgtaattggttctcaaacttttttaatcatgcactttcttaacacatctatttgaaattaaaaaaaaaaacccacagttcctactactaacagtaacacattctattattttacttctttcttgaattttagaagaataacaaaatgaattccaaaatatctttttactcaagtttggattgagacaaaatgaatctgcagtgaacattttaaaagattgacaattggttataaaatacaaatgcagtttttaaggtcagaaacatatttggtggaatgcttcacagtccaattaggaaagcgtctattgcaatccagaaaaggaaagaaaatatgttgatcagttacgataaattaatcatgtcagcaagtgaacacaagaaccttgttctggttggattagtccccttcaaatatctaacctagcgtaaatcatgttcacaaagaaaaatcaccaatttatgcttttcaattcctttttctaaccctgacttgatgaagtctaatcccgaataccaaaagaaatatatatatatatatatatataaataatggacgcaccttgaggtgccgccggagctcggctggtcgggtgtgccggcagtgaggaatccgcaagcgaagaccgaagcctaagggggttggggctgggtccttgggaccctaatggaaggccggagaacgcaagggcaagcgaggagcgatggcaatggtttcagaattgggctttggagagtagggaagggtgtgagctgccaaagcggaaccaaggaggtgtgggttgggtagggtttcaactatgaaagaaggtaaatgagctaaacaacataacttgcagaaatcttaacaaaatatattgtctactttttatttttattttttgaaagagaaattattgtctaattagtagtttttttagagtctaattagtcgttttcagcataaaaaaataccctcaaaaacaataaaatttttataaaatattattaataaatgtctaaattactaaattaatt

SEQ ID NO: 394432 - DNA, 1933 bp, Cannabis indica
ctaataacatgaacatgagttcaggatgacttctacaattgattatctttatgatatgaattaggtctttatagtaaacggtaagtttgatgaagaaaactttattcatatcaatcatgtcatatataatctctattatatacaacacattcactgagatgtcatgctacatcagtaactcaaatcgagattgcttgcactaaataacaggcatcagtgaaccgtactagcaaccattgattagagattcttaaacatgaatatgttgctgactgttttatttatggctaagttatcttaattctctgtacaattacaagtcacaacctcatgcatgaatataattttttgatatttatatataaattattcaatattaaatattaataatttaacattcatacatatatcaaaatgttcaattcttattacaagcttttcagggcataattcttaacaatctctcacttgacctaaaagcaaattggggatctccattaatcccatattagtgactcataaaagattttgttggtagcatctctatgaatggatttgtcaggttatgttccagcgtaatcttaaagactatcatattacctctctatactttatttcttaatagatggtacttcttctcaatgtgattgcctctcttatagcttcttggttctttggagttagtcaccgctccactgttgtcacagtagagtactaatagtttttctactttatgaactacttccagatcagtgtagaattttttcaatcaaactgcttcattagctgcttcgtaagttgttatatattcgactttcatgtttgaatctacaatactggtttacttaatacttctccaaactacaactccaccaccaagagtgaatactaacccagattttgatcttcgtctatctttgtctaattgaaaatcagaatctatatatcgcccgaacaactcaagaccaagcaaagggataatgaacctgtcacggagttcattgcaatatcgaaaaaatcggccttttcaaaagcatcctttgatctagctctgctttagggtaaaaaaattgtcccatgccataggctgcctgcagaaatagtttaccgaccgcaaaacaattcattcttgtgtgtagcgcatggggtcatgtctcccgaacgatcataccgtggaccgctcgtcgggcctgataggtggtggtatcacacctttctcaaaggaaccgtacgtgacactctcgcgtcatacggctccgggagaatatacaatcatgagatctctcgttctccgaagatacttgggaatgtgctttacagttatctagtattccaaacctagattagattggtaacgactaacaatccctacagcgtagtatatatgttaagccttgtacataacattacatacatcaagctcccaactactgatacataagggtactttctcatgtacttcatctcttgaggagtcttttgacattgatttttacatagagtaattccatgtctagacggtaatcgtcttttcttagaattctccacataaaatcttttgagaaccttatcaatataagttttttgagaaagtgctaatgttctctgctttctatctctatagatttgaatgccgagaacatataacttgtttatcccaaattcttcatttgaaaattttcaaccaaccacttctttagcttgataaaatttctatattgtttccaataattagaatgtcatcaatataaagaactagggataccactatattacctttagtgaatttgaaattataaaagattaaaaatcattttatgttgcatgattcacataattacttttatgattatatgtttaatatatcaataatttattttgtttcgttcttagttatgtgaaaaaaaataatttttaataaatattaaataat

SEQ ID NO: 394433 - DNA, 613 bp, Cannabis indica
gtcgaatgatcattcattattattgctttcaattttctcttctctttcatatataaatatataattgaattttgtaagtgaatatatataagattgagaaatatgtttattttgttcactcactggtccaatgagtgggtcccacaaaacattctccttggcaagtgtgctgatcaagaataatacaccccactaacttcatcatccatattccaatccagatctatctatatatatatatatatacacacaccttccatttttatttatttatttatttatttatttaattatatgtgtatgtatatagaatatcatcatatcatgcatatatatatatgatcatatatgtataaatggtctttggttctttgctgtaagccacttatagcgagcatgatatatataaatatatataatatattatatgactatgtgtgtatatatcttataacggttcaataataaatatttattatgatttgttctgtaatttctactatttgctttcttattcatcaaatataataattaattaataataaatatatatttgctaataaacaaaatgtatgaataataaactatatatagatcaaatatatatatatat

SEQ ID NO: 394434 - DNA, 2025 bp, Cannabis indica
tgctttctcttctcttgtatataaatcatttgttctagcttctcataatcaatacagagaattcttttcattcgtttatgtttacagttttctctcctcaaccttcttaattatatatatattttcttttggtaaattaattatatagatattatcagtatatatagttggagtgaattgaaataaaaatcgtggtcattgattattaaaagaaatatatatcatttaacttcaaaaatatataatatgttataagagttttttattataagacatcttaaaaagactccgtggagttattgattaaatgaagtattaacaagggaaataatttttgtgtgtgagttttaggtagtacttttacatacataaaaattaaataaaaaataaaatattaattatttttctccttccattcttcttctcacttttagccatcttcacggttttctctcaaaaaattgctcaaagaaatcgatggaaatccccacactcaccaccaccagtggcagaagactctccaaggaaactcattcggagaagactctggccaccgacagggagccagtagttaaaggcgcattggtcttgctcaaatggcggggactccttctttctagtttgaagttgcatcggtcctgttccgttgatttgggtcctagtccgattacgccgacctccaatgatgtaaagacatttgttctaagctaaatcaaaggaaaatatttgggatatttagatccagtattttttatattatttgataatacaattgatacattaaattgtcacaaatgtattattatgaaaataatttattatacatttggaggttatatatggtatataatgtaacaaacacataaagttgtagctaaggagttacaaatctgaatatgagtttgtaatttgtgattcacacttgataaatatacaattaagtgagtaattgtatacgagagttaaaaaaccaaatggagatatttttatgtgtttgaaaccgtcaaaacattcatttacatcagttaaatgagttttagaacattgggtgttgagttggctcaaagaggggctttgaaactcaaaaatggtgagcagaaactggtccaggcaacatgtctcccaagcactggacgacatgtcgcctactattcaaaataggagtttctagacgttattcaacgtatcacaaggattctaaggtttagctccatgcgatatatatgtctcttggagccccttttttagaaaaacattgcaaaatgttggaaatttatgggaatatttctatcatcaattaccaacaatcctatttccattcaatgtcgtatttcggaggtgttgcaactggatgaaatagatggacctgtgatcaaactaaacaaggaaagcctcgaagattgtagaaggagattggaggtttgtttggtggggatggccattagtctgaaaccagctagtaaagaaggaattgaaaacgctatgaaaagtatttggaagattaatcattggttttaggttgagaaattaagtgcggacaatgtctttcgattcttttttggtagcaaagaggatagacaacgtgtttttggtggtagaccttggatgtttgagaagcaattaatatgctttgtgaaactaatgggattaggagaagtttctaagatgacttttgaccatgcttctttttggatctcgattaagaatgttccccttgcatgtatgtctgagttatttgctcgtgacactataagaaatgtcacttttaccagcatagttcgctactgcgctggtaaaagtaacttttaccagcgcatttcgcaaactgcgctggcgaagagatcaaagttttaccagcatacatttgcagtggctaaaatctaacttttaccagcacatttacgcgctgggaaaagtcttttttgccagcgcttttcattttatgctggcaaaagttctaataccaacattgatttgccaacccccttttgccaacacatcatgggtaaattctattttaccagc

SEQ ID NO: 394435 - DNA, 772 bp, Cannabis indica
tatccacttttcttaatgtaattggtactgcaaaattttaagatttcgagaacaaaaacaaatttagattaaattcaactctggaaattgttagtctcaattagagatggaaatgtttactgcggggatgggtaatcgtgaggatccactcttaatggagtagggacttcctatttttgccgttaatggagcggtggtagaagacaattttaacacccgaagtagggatagggcgggagtgacgggaatgaatactatttgcaccctatttgatgtcaatataaatatatatagtttttcttttatttttaacgtagtatatatatcattttttttatcaaaaagagaaaacttcattaatcactaacaaaaagccaaaacaatacaaatagaggctccacacaagctgcccaacagaaaactaaagattacattttaatctaacaagaaaatttctttcatctaaagataactttctattatttacatggtataatctctaaattataacctattttatctttttaagtatagctacaacattttttgagcagccttcaaaatgatatttgttttagttagaccaaatacaataaacacatactgccaacgttattgtaacagcagcaaccactcttgaagtcccgccagccagccatgtgatccagctcccatagtccctaggtctggcaaaaaatcccaaccacaaaaagatctcgtctgtcactttcctggataagctacactcgaaaatgttgggttttatacccta

SEQ ID NO: 394436 - DNA, 649 bp, Cannabis indica
tggatgactcgtgagagtatctgtttttatttttcttgaataattgttaatagaacaagtgtcgaccttctagatttagacatcgatttagttattgtaaagctatagttaaatacagacttttcgcatgtctttggctcatgggttgggcgatcattttgtttgagtttagtgaataggccctttaagctgatcatacaagcttggatgtatacgtgtcgttcatccaaaaatacaaataatacaaataaatttaaattattataacaatgcatatattaaacaataaatatttgatattcatacacaataagaaaacatcaatactaaaataaacttctaggaggttcgaaaattattagttatctgatcttaatctatacaatattgaaatatagagtttgggaatgtttgaatgttatattgatatctaccaaatcatgtcattcaaactttgatatgtagtaaatcatgcctcttgaactttcatccatgttagaattttttactaaaattaaacaaaagtccttaaatttaacaatctcaatagttcggggggaatttttaacggcaaaaaaagttcagggggcacgatttagtacatgtcaaagttcaaggaaaaaaattactaattagcctaataaaatta

SEQ ID NO: 394437 - DNA, 1299 bp, Cannabis indica
atatggtacgtacgtactttcatttgtaataataggaagtaattaaccttgaagaaatttatatataggccagattaattttgaagacaattgcttaaaatggtgtttgaccaagattttctcattcacatgtctttactacataaacatatattttttgtcattgaagaacaacaaagcaataatattgaactgcatgcccctctgtaaattgattaatttcataatttatttaaaaaaaaaaagtactaaaaagaatacgatataataagaatatagggcaaaaagcaatacatgaaaagtagatatagtataagggttgcaggaggaagatatatgtacttgaattgcatatgccagataatcaaatggtgtgaaaactcatcaagaatctcataagaagtagagccctctccatttaaaaaaaaaaaaacctgactttggattaatatagtgaatatttgtgttcacgtgttattgtgtataataaggaaaatgcttaacataatttattgaacgtgcaggtcctatttataaacagaccattgaaagtgactcgtttataattaaaaagatcgatcatattaaattttaggttaacttaattagcatcatcaactaattagtgcatgatgtttaactcgtattgttaacttgtttataagctcatttttatgatcaattaaataaatatatgtgtacaatattacagtcacacttattttaaataaaataaacttaagcttatataatttaaataaattaagagtttttatttttatttttatacttacataaaaattacccgagaaactattggagcaattacataaactataaattaaaaaaataaaataaaataaaataaaataaataaaataaatgaaataatttcttaatacattatgtattttttttattctattatacatcttaatttgtttttttaaaaagaaaaattgacaaaaaaatatccattatcattgataaaaataacattttaaaattaacagtgtacaatatatttctttcattgcatttggaaaactaattaattgagattgggtaattgcaaaattaaattaatattgtgttacataaattcttgtgtcaggtttgtttttgtgtttgcaattccaaacaaacagtatctcacactctcctaacctaattagtttaagatttgaatttctaattttcataaaacaatgataacgataataacaaagaaaaaaacattgaaagcacaattatccaaaaaaaataaaaaataaataaaaagctcaaaacccaaagtga

SEQ ID NO: 394438 - DNA, 894 bp, Cannabis indica
ttaaattaagcaatgttaatatattaatcaaattaaaatgaagcaaaattttgtaactttaaagttatttagcttctttcaactcaaaataatttgtagtataaaaaatatagttcaaacaattgtttatatgccaatatgttttattttatacgtatatgaaatagattgtttaaagtgaattaatttagatgaaaaaaaatattagacaatttttttttttaatttttgtaatatattttaaaaaactatgataaatattttcatataaaaaaattaaaattaaaattatccggatgctaaaattataaataaaattattattcatgttttcgaaaagaggacatgtggtacatccaagtcaaagatagtcaactaaagcccaaatacgagccaaattgaggtaacgagctggatccacgcgaagagatggattgcaagtccatctggaatacagatcgcttacatcccaatcaaaacctctctaattttgggaaggcatcacggccaagaaagaagacataatcaaaaccctctggatgagttattgggatactgccatggggcactctaagagacgtcctggaagccaaagttgatgtggcgatcctatgataccgaatcccacaatatcagggctttgtcccttgcttcagtctaccagagtgcgcacaccaccaaaggaaatatactttttgtctgacgaccactactctgacatttacagtacgtagagtcggcacacacattaagaggaatattagagagtcccacattgataatatgttaaaactaaataccatacctaagatatatgtgctaatcatctcattactaattaattttagagataagttaaaaatacctcttttttgtatcaattaatcaaaaata

SEQ ID NO: 394439 - DNA, 1964 bp, Cannabis indica
tataaatgtggtcgcgtagtggttacaaccaacaacttaagattaccgatcacacacatcagtaaaacaacaaccacgtcaagattcagcccaaaagaagtttcactccatccaggatgtctaccatgtacctgggatgataaaaaacttactattagtggcacaacttacggtgacatgccaccatgttgtattcggccctcaagatgtcaagatctaccaagatcttgaaatccttggaacaccgatgatgaaaggatgacgcttagagtctatctatgttatgttagcaaaagtctgcttatgtagataagactcggaagaacaaaacaatagatttgtggcatgcaaggctaggatatgtcagtcatcataaactcaaggtgatgatgaagaagtatatgataaagggtcttcctcaactcgaggttagaacagagatcgtatgtgctggctgccaatacagtaaggcgcatcaattaccatatgaagattcaaagttcaaagcaaaagcaccattggagatggtccattctaatgtgtttaggcgagtcaaacaaccatcaatcagggacatgcggtacatggttacattcgacgacttcttaaggtacgtatgagtttttttttatgaaagaaaaatccgaagctttttcaaaatttaaagagtttaaagaaatagtggaaggagaagtcaggaagaaaattcaatgcctccaaacaaacaacggtggcaaatataccttagatgaatttcttgagtatcttcgagaatgccgcatatgccatcaattcacatgtgcaaatacaccacaacagaatggagtagctgagcagaagaattgccacctagcagagagatgtcgaagcatgctacatgcaaagaacgtttcagggaggttttgggtagaaggaatgaaaatagcagctcatgtcatcaatagacttcctcacaaaaagttagggttcatttcacccattgaaaaattgtggggttgtaaacctatagcaagtcacttttgagtatttggctgtgtgtgttacgtattcgtgccaagtcacctacatagcaaatttgacaaaaaggcgatacgatgtatctttgtgggatacgaaaatcaacggaaagggtggagatgctgcaaacctacaactgaaaagtgttatacatcaaggaatttggtctttgatgagacatcatcatggtggtcatcgcaaaaggaagcattaccaaattctaaagaaatagaagacgaattgcagaagaaaatggaggagcaaattattaagttacctccaactcgagatacagatgaagaaggaagcatcgaggacaagacacctcataatccatggcaaataggggtgcatcaaagagcaaaacatgatgatagccaaccaaaacatcaaagatcaataagagcgcgaaagccaaatatgaaatatgttaatgttgctgtatctgaagaagaaaagttcaaagaactagagtcatatgaagaggtataccaaaactccaagtagctaggagctatgaaagaagaaataagtgcgctagcgaagaatcaaacttgagagttggtgccaaagccggaggaagtgagacccatttcgtgcaaatgggtctacaaattaaaaattcatcctgacggctcaattgaaagatacaaggcttgttagtagcttgaggattctctcaatagtatgggctagattatgacgagacctttagctcagtcgcagtcgctaacattacaacaatgcgagttctattagcactcgcaactagtaaagactggatgctatggtagatggatgtgaagaatacctttctacatggagagctggaccgagagatatacatggtgaaactaagaggatttgttgatagagcacatccctactatgtttgcaaactaaaaaaagtgctctatggattaaagcaagctccacaagcatggtat

SEQ ID NO: 394440 - DNA, 1458 bp, Cannabis indica
tgtgcagtcctttccacaacttcgtggttggattgggatgtggccaccagaggttctgggcgacccctgttggccagatccgtgcggatttggagcaagacaggaagttcccgggttttcacttgcccatggacaacttcggtacaagggaagagtggtgctcgctgccaattcaactttcttaccccaatttttgagggagtatcatgagacacccattggtgggcattcccgagaatcacgcacccaccaacgactacgggctgatgtgttttggactggtatgaagcagcaagttgtcaattttgttcgtcattgtgaggtgtgtcaaagaaacaagactatggcgatgtctctggcaggcttgctcagaccattacccttgcccgcccaagtgtgggatgacattactatggatttcatcgaagggtttcctcgttctgaaggggtggacacaatacttgtggtggttgatcgtttgagcaagtatggccatttcattccacttcgccacccatttaccgccaaaactgtagctgaggccttccttgccaatgttgtcaagctccatggtattccatgttctattgtgtccgaccgagatcgtgttttccttagtcacttttaggctgaattgttcaagcagcagggcacacttttgaagcatagtacggcatatcatccacaaaccgatggccaaacagaggtcgttaaccgctgccttgagacttacttgcggtgttttgcttctgagaagcctcgtgtttgggccaagtggttgtcttgggcggaatactagtacaatactagctttcactcctctttgggatgtacacctttcaaggtgttgtatggtcgcgaccctccttccttagtgcgttatcaccctggtggttcggcagtcttggccgtggaccagttgttggaggatagggattctttccttgatgaccttaagatgcatcttctccgtgctcaacaccgcatgaagaccaccgcggatcagcaccgccgggaggtccgctttgaggttggtgacttggtgtttgtcaagctccggccgtaccgacagaaaactttggctgttcgtcgtaatgagaagcttgctgcccgcttctatgggccatttcgagttctgagccgtgttggcgaggtggcctataagcttgaccttcctcctagtgctgcggtacaccccgtctttcatgtttcccaactccgagctgtcattggggcggcttcctcatcttccacctttccttcccaactcactccggagttggagttgcaagtggaacccgaggaagtgctgaatgtgcgccatggaccaaacggacctggtgatgaagttgaagttttgattcgctggaagaatttgcccttgtttgaagcatcatgggagaagttcgagaccatccgtcaacagtttcctacttttaaccttgaggacaaggttca

SEQ ID NO: 394441 - DNA, 1119 bp, Cannabis indica
taaatatatatatatatatatatatgtataaatgcatgtgtgtgttagttttttaaaatgggtggagttggtttcacctttttaaaaatggctgccctaccttgctgttcttcctaataatattatactcttatcagttatatcacaatacaaaaagcctgcaatgtggtatggtcttaacactatactgcctgaaaagacgtagttctgtgtgtggtttttcttgcttgcttgtcttctattccttatattatttttgttatttatatccattatgtgaccaaatatagctaaagtctctgtttcaacacattattgaatttgagtcctttttaacaagtatagtattatttacgtgtacgactagttaaattttttgtttttatttactgttattaggttattaaaacaattactgttatgttaataacacattgctcatatatccttttgttgattaaaacgtaaaattagtataattactctgagttgtttctttctctgcataatagagcttaaaacggtgagacatatactaatgttatatttggcaatgagtgaaattaaaaataatattggaacatatgagaggtcaaatcataaaaaagaaagaatgtatgatataaagagaaaaagtggagtacgttctatgaaccaatattttggatttttctacatttttaagaatgtgatatctttctccatctcttatgtttaattttcatataacatgacaaacatatgccattcaaaaaacaaaacaataatgaaaaataattacaagaataagtaactgttcataattcaatacccatcatttaaacctctatcccttatatggctaataattaaggtaaaatatttacatgtcttattcatattgacattttattaaggtaaatattagcgtgctatatatttgtaattgtaattaaacgatttagagattttgaagaaactacgagcttgtttggcattttcagtttttaaaattgtgtttttaaaagtgtgaatagaaaataatttttgtcattttaaaaatttaatggtgtttggcacaaatttttaaaagttgtttttagattttttcttacgaaaaaaaaataatattttagcacc

SEQ ID NO: 394442 - DNA, 916 bp, Cannabis indica
aaattgaaaacaacattttgatagttaaagcttaaatgttttttgttttgcctataattcatttcaactcaaggtcagtcctgcgtggatgtaagtactataattgcctaagcacataaactctggctctatcatttcacttaaataacatttgtttgctttgttattcattcttctaaacagttgattctattatgtgtgttcttggtgtttatcaccacagcatgttaagtacaatttcaattctaccaaaccaaacagcaacaacatcggacaagttagctttccttggagacttgtgagtgttttctattttatctactaaacaagcaatttatggatagtagcaatatatttagatgagcattgttattgggcaccatggtgcctagcacctctagacatgacgccttacgattgcctagcgatactccctaaaagttattctattaaattatgtgggacccgatacttaattagaccaatagcgatattaacacatagaatggtgctagacaccactagtgccttttagcatttctctttttagatagatgccatgcaattttctctttttgtttttttttcgaaagggagtttccatgcaatttatagctaaagaaaaaagaatgttaatgcatggtccatgtaagactcagttttgatcgagtcaaaaaggaaaaaattatataatataataaaaagtaaatatatatatacatataatacaaataatattgtaacaccctactagtttatgcgtgttatcgttattttatattaactgtgcagctcgttactaatcaacaagtttattaaaagtcgtgagtaattaaaattttacttaaatactatcaataatgtagcgcctcgatattttgccttattttacaaaaatactattttcatgcataat

SEQ ID NO: 394443 - DNA, 573 bp, Cannabis indica
taatctacataactagttttcgatgtcatatttttaagtagttgataaatattattgatttctctttgtcaaattctaagacccaacttcggtgacaactctaatgtccaacttcggtgataacttcgaaatttcactacggtgacttttagtagtgaagactttttcgatgatgataataattttgtcaaatattatcattctattttccaatttttattatgactaatattttattttaatggatagtgattactttgtgtagtgggttgatagtcagagtcttgatactttctataaatttagaactcattttaattttagtcttgtgtcagtcttaattatagtaattatagtagtgggttgatcttaaagtttatgtaaatttttttatatatatattttagtatttgtaacaagttttttaattaaaaaaattaatttttaataacataaaagtaaggggaattatctcatatactatttttttaactttttttttcaaatttacggtttaggtttctaaagtggttgcaacgctagttgcaatagaagtttctatacgattttttg

SEQ ID NO: 394444 - DNA, 692 bp, Cannabis indica
tgtactacatatttatttacagattgaatattctttgttaggctaactagtaaataatccgcgcttcgcagaggatgtttaaaaaaatttaaattatatatgaaataaattataatttttatctttcatatgattttactttgacttgtatgaaaataaatatacaaacgggccgacccgactcgtatttactaaatctcacttttataataaaaatctggcacaatttgtataacattatctcagatttgcttctattttgagggtcagacctaacaaaaccaataaacataaattgttcttataaacataaaattaaatttttagattgatatttttagtatttttttttcttagataaaacaaaataatgaaaacacaactataaatttccttttaactcaaaataaaattatgtgaatgagcgaatactaaagttaacatctgtaactcaaaatatattttgagagtatatgtaaattaaccactaaaaataaataacataattatagaatgtttaaaatattattagaaagaatactttgaagcaacacacaaacacaccatattcaatgtagattaataataaaataatttagatacttagatatatatatatactagcaaaaagttacgtgcgacgcacgtatattaaattttatgctagttttttctatgttatttaaaagtga

SEQ ID NO: 394445 - DNA, 794 bp, Cannabis indica
atatatatatatatataacgtactgctatatcgtattggtgatcaccttagttttagttgtaggcagagaactctcttgttttgatctgattattttcccagagcgttagatcttgttcggattttattagtaaagtgtttcttctaagaaacaaattaataaaatataaagatggaaattttgagacgtagaagaaaggaggattcatgaaattaattagattaaaaaaggggaagacgatgaagaaaatttgaatgagagagttcggtttggaagatttgagggtttatattattataggttttgcttttttaaatatttaaattttattttggttttattaaaaaaaaaataccttgatttattattgtaaaagttgtcttgtcgttttgacatgtttagtatgtgatttttgctgttgagtggtgtgtaatttttgctgttgagtggtgtggttagttctgagtggtgtgatttttgttgagagttatgaatttgttgagttggaattgtcgtggccttgggaacccccgggttgttcaattccttaaagaaatagttttttaaaagagacccaatttaatttttttgtgtgagaaaatttgcaagaaagaaaaagttgattgtgttagagctttattgggctatgatggaagttttgttgttgaggcccgtggacatagtggaggtcttgcaatgttgtagaaaaatcaagatgatggcaaacttcttagctttagtaataatcacattgatttggagttgaagcttgatggataccctttgtttcgtg

SEQ ID NO: 394446 - DNA, 831 bp, Cannabis indica
gcgaaccgaaagcctcggactcggggttttggaaaaatgtggctaaatctagagatattattcgcaaaggtgcttgtaagcgggtggccgatggtcaggataccaatatttggttggacccttggattgcgcatttaaagggattcactccccacccaattgggcgggctgtgaatagggagttgaaggtggctgagctccttttggataatggtggttggaatattcaaaaacttaacagtttgtttgaccactaaactatctctgccatcttgaaagggggtactcctgctggcctagggaatgaccactggttctggactttggaaagtaatggtcgtttctccggtaaatctgcctatttggcccaggcagtggctagagcgagtccaggcgaggttgccccctcaatgtggaacaagctgtggaatagtaaaattcctgagagactaaaggtgctgtggtggtgtattctatccaaggctcttcctgttcgctcggtgttagggaaaagatttcctattgaggacgaaagatgccccttgtgtggactagaggtagaatctatggagcatcttttcctttcctgtaatgtcgcctctcacttatggcgggcttctccctgggaaatttaccccatctgtgatactggtataagaatgtgggactcggtaaagttcttatgggatctcaaaaagaacggcatcaatgatcatgaggtctttctttatgcttcgctcactgttgacacgatctggcgggcccgtaatgataaggtacacaataattgccctgtggatatttttaaatgcattgacactattcggtttt

SEQ ID NO: 394447 - DNA, 1633 bp, Cannabis indica
ttaaaaactaaaaattaaaaaaaaaaaataattttagtgtggtctacaggatatacaatcctatatataagataaatttcattgttcggttggattaattatagtgagaaacaacactaactttgaatttttagtgtcccgttgtagataactaacgaatattttttttaaaaaaaacaaaaataagaaaagttaggagttgtttaacttcataacttaaaaattatttttaggttttaaaaactataaataaattttaaaaactaatagggctgtttggctaaatttttaaaaacagttttaaaaaactagaaaataaaaagcatcaaaatataggtttttaattttcaaaaataatttttttatctaacatattatattttatatttttgcagacatacccaaaccctgaatttggaccatggaacccagacttagacctcaaactccaaatcctggacctcggaccccggaccccaaaccctgaacccggacctagatccgaacctgggactcgaaccccggacctggactccacccaaaccccgaatccaaacccaaaccccaaacctggaccccggacttggacccagacttgacctcggaacacggacctagatccaactcatatcccaaaccgaaaccctggacactagaccctgaccccagacccggacctaaaccccaaaccccgacccaaaccccaatctaagggttgacaataatatattttttagcacgaaaattagctatgaaaatgtaataaggggttgacaataatattcctcttcctaaaatattcaacaacatatatcgtgctgagtgagtatatatattttgacaagattatttcgaaaaagtacatattttattaaaataatattttaaatctttactagctcttaatattattttgataacataataagggtgtatatgagtgttttttttttcttcccacatatgaaaaaattataattttattttttgtatatgatagtgtatattgtagttacatagtacatcttgataattttaaaaaatttaaataatttacaatattaaaaacataattcaaaatagtcaattatatgggaataaaaaatcaaacacccatacaactgaatatttaaactttatttttaatactataaattcaaatgatttaatatcatacattattcaaaattttttattataagataaaatttaaattataatttatttaaaaaaaaaatatcaaaaaataaagacaccctaccaaaatggtaccattttattatatggtccattctcaatctactaaatatggccataatttaatgctatctatctatattagttgataagagagagtaattgattggatggtctccattttctattttctcattttgtcttcttcttctaaaaaaactgtttagaaatatgtatgacaaaacaaagacaaaaaaacagaaagtaggttaaaaacaataataaaaatgagaaaaaaaaatgaaattatttagtgatagcactcttaatggaaataagtataattaattaataggatgattattataaattatatcatacccacaaatatgatccttcttgaattccatcaagaacagcaactgagtcatctgat

SEQ ID NO: 394448 - DNA, 645 bp, Cannabis indica
gagtttgagaaactttcttaattatcttctatttcaagttcttaacgttagattttccttaattagttagttgacaagttctactatcaataatttggcgttgtctagtgggaatgataggctaaggctaagttgattccttacataccatacataaaaaaatgtcaagatgttcttgtcgtgtccaagaagtggaggttttccttgacaacactcaactattttatttcaaggcaagataaagcaccacccatcattgggggagaaggtacaaatggccagaggcctgaagccagagaaggaggcacaaacagtcacaggcctccagtaagagaagaggaacaccaccacgaggagaacctaatgaacatgcaacgagatggggtgactgcctccatcacgtctgatggtggaaatggatcacaaaggaaaaaagttcagtcactgataaggaaacctcaaccgctgataccaagggatcctagaacctcacaccactgactagggaaggagaagcgggcttactcattgagtttaagctctcgatctcatattcacaacaaggagaagaacgagttgaggacaagcaacatggggctagaaaaaaaccatcacaaacatgcagagagtgttgggttttatgcc

SEQ ID NO: 394449 - DNA, 1302 bp, Cannabis indica
atttttaatattgaattttttctatttagacattacaaagtcttatgaaggaacacaattgttatggtctaattaactgattgtagtgagagagtcacaacttttgtattttggtttttcatccaaatttaaatattttatattaggttttttatataaaataaattgagtatatttatgaatcaactaaaaatattaatagaaatctctatagtatattcctaaaaagatttatacactttttatcaatttggacattcaagagagttttttattttaattttttttatattgtatttgtttaaaatcacatgtaaattttaagaaaaatttaaatagtttatagcgctaaaaatagagttcaaataattatttatcacgcgtttaagaaaaactagtcacacatgtaataaaatattttaaccttattttcaagaatataaactatttaaaaaaataaataaaatttataggtaatcctaaataaatataatgtatataattatgaaaataaatttgaccaaaaaatttcataaatcaaatttataggggtgtaccaaaagagttctttcaagttgtatacttataattagccaatattaatttatgtctcaaatacaaatatacatatatatatattctataatatttttactgcattctcaaaaagcagtatccctcacttgttttgagcagggctggccctgagggtaggcgggctaggcgtgcgcctcaggcctccgaatgctcagggctccgaaattgtgaaaaataaaatattaatatataaataaaatattaaatatgaagaaaatataataaaaattgtttggtgtagtggtaaaaggtcttactttaaactaagaggtcatgggatcaatttcctactccttactttttaaattttttaaaaaaaatatttaatgtgtagttataagggatagaaccttaatatctttaaagtttttttaaaaactctaccattacactaagtactaaatctattatttttattatagttaaaatatatataggggcgccaaaatttaatttcgccttagaccccatataccttaggaccggccctggttttgagcaagcgatttgttataatttgaacttcttaatggggcatttggtatgatgttagatatggtgggaatgagaatgtcaactcaactcatatttaataaattaaaagttaatgacccaagaatttatgtttccaagtagattttattttttatgtttatttgatggcagtgttaattaccttctcacaaacacacaaatttgtgtaat

SEQ ID NO: 394450 - DNA, 725 bp, Cannabis indica
aaaaattaaataattattgaaataaacacaaaataatgttaaaaagaaaatttagaaaaatttaagattgatttttttaaaagttaatttaagttttttttcttaatattggggtatttataattttgtggggtataatacacaaaattattagtaacaatcaattgtaattgattaaactagttatgaatgttataattaatgcgttgaaaatgataagagaatagatgatgaacaatacaattttacaccccaaaaaacaattaatgaagttcatgtactgagtagctattctatataaagtatgcctatataatcgaattcttagtttataagaaattcacaggtaactttttatttatattaaaaataaaatagtttatctattctatataaagtgtgcctatataaacgaattcttggtttatgagaaattcatgggtgactttttatttatattaaaaataaaatgatttattattaaaaataaaaaagttaagaaaaaattcatgggtcactttttatttatatataataaaataaataaaataaatcccattaaattcaaaaaaatacgattgagtttttgctgttgtacatttacgatttttctcttcttcttctcttcttctcttctagaattaccattttcctataaaaaaactcattaaaagaaaaagttatattttagcacatacagtataattaagaagccataaaattta

SEQ ID NO: 394451 - DNA, 2036 bp, Cannabis indica
attgtgccgacccagtgggggttgtgcgagtccaggggccattagatgagccggagggcattttggtgagtcgtggaaccttcatacaagtggtagagaatccgttcgacctgcgaatgaagggtgagtggggagccatgtgggcgtgcgagtggggacccaacaatcaggctgagtatgaagcgatggtagctggattaagactcgcagctgatggttttctaagtgaggggagaataccaagcgaaaggaccttagatggtggcatacttggccaatgttaggagctacctagaacggctgcaacatttcacgattgagcaaatcccaaggaaaagcaatgccaacgtcgatgcccctgctaaacttgcatcaacccgggaaattaatgctctggagtctataccagtagaattcttagcccaaccaactatcaagtgtgacttggtgttgcaagtggaggatgaaacaccctcctagatgacgccatacattgagtacatccaagaggggaggctacccgcggataagaaggaggctcgaagaatctagtataaagctgctaggtatgtcttgattcatggagttctatacaagagaggataatctatgccactcctgcgctgcataaaagaaagtgaagcacaacgagtgttgtctgatatacatgaaggagagtgcggtaaccacgtaggaagatattcaatgtcaaggaaggtatttaaacaaggatactactgccctagcttggagaaggatgcgatggaatttgtaaagaaatgtgacaaatgccaaaggcatgccagctacagtaaagtcccccagccgaactcacaagaatgaccagcccgtggtcttttgccatgtgggtaattgacttgattggggccttgccaacaggaagggccagagcgaagtatgcagtagtagccatagattattacaccaagcgggtagaggctgagacactagtcagcatcaccactaggcaagttgtgtccttcattaaaaaattcctaatatgccacacaagatcatcactgacaatgggacccagtttgagggatacttgttaagttcttactgtgcggagagggtcattgagaggggattctcggcattagtgcacccccaggctaacgggcaagttgaggcagtgaacaagataatcaagaaaaacctcaaaatgaaattggaaaagcttaaaggttgatgggtagatgaactgccgaacgtactctaggcatatagaaccacgccctgctccaccacaggtgaaattcccttctccttgatatacggatgtgaggctgtgcttcccatcgagatgaagctcaattcgtttcgcgtgaagaattttaatgagtccaacaaaaaggccatggcggaaaatctagacctcttagaagaaaggagggacatagcccaaatgaggttgggtgtatcaacaaagggcaacccggtactataattcgagagtccccatgcatgtctttaggactagagacttggtattaagaaaggtccttcccaatactagggatccaggagtaggagttttgggagccaattgcgaaggcccctatcggatcgctaaagtcatcccactcgggacctacaagttggcccgcatggatgacacggtggtaccgagggcgtggaatgcgggacacttgaggaaataccattgttgagaaggcgatgtctgatctaaaaaaaaaagatgaatgacgccaacgatgaatgaggaagtgaggtacaaaaatttcttggctggcaaagattagctacccttccttagcaaaagaaagatgcctcacctcacaaaattgtcaagccataagaggtcctcacggacactcatggcataacgccgatatgaaagggacatctctcagggagtaagcaaactattttcaatcaaggaggtagtgtggtcaagtgctataagctctctccatccaagcaaaaggatggatttacaataaggagggagactgctacgaaagacgaccaaaaacctcccccgaaaagta

SEQ ID NO: 394452 - DNA, 995 bp, Cannabis indica
gcgacaagagcgtacgcaaccttattagcagatcgtctttaacaaaattaaaagaaacatcaccaataaccattaatttataatctaattaaattgtgtaattaaattattgtagaaaaatctgttcatataacttcgtccctttgatatgatgtggtcggaccaaccaaaaacaaaattataagaaacaaaaacaataaaaaaaaaatatctttttatacatttaatttaattaattctacttaaaaaacaattaattaacttttcataccccataaaaaaaaacttttcataagaaaatatagaatttgatttttggagtgcctctaagaccaacaaagtggagacgagaagattgtgatgctatcattaataagattaaaatgtggctggttacttaggctactaggcatctttcttatgctggctgaattcaactcattcattcagtgttgctacgacttcgcaactattggatgaacatattcattcttcctcaaagtgttattaaggatgtagagaggcttcgtaggggcttcttaatatcaactaacatcccccttcaactcttactcccaaaaatcagctcctttcatatagatgttgtttattcatttgacccaaagaatctcatgcttatccataatagcccaaataaattttttaagaatagatttattctaattaggaccacttttgaaaccaagacctccaaatagtttaggaagacaaacctcatcccaagaagccaaatggattttgcttttctctcccataaattggaggaaaatctgtcaactaaggaagaagttcagcaagtgtaatgtggctactgtagccaaaaaggaaaattcatcgcctctcggctttatattgggacacttcaacatgattctgatagcttctacaaggctgtctggtgcaatctctcgctgcccaagcataggtttatcctatatatggcaggttgttcatggtcatttgctcactagaga

SEQ ID NO: 394453 - DNA, 1042 bp, Cannabis indica
atacatggatctttcctcttaccgtaaagtatcaatcctatcctacttttcttcagtttaaaactcttgctgaaaaacaatttaattttccaattaaaagtgtccaatctgattggggaggtgaatatcggtccttggccaaatttctacaccaacatggggttcactttcaacacccttgcccacatgatcatgaacaaaatgggcgtgctgaaagaaagcatcgccacatcactgaaactgggttgacattacttgctcaagctaaacttgacttgtcttactggtggaatgcttttaagacaactacttatgtgattaattggctgcctacctttgtcataggagacatatctccatttgagtgcttatttcataaagcacctgactacacattactcaaaccgtttggctgtgcatgctttccttatctcagaccatataatgctcataagttgaatttcaggttgataagtgcatttttcttggctactctctggttcacaagggatatctatgttaacataaaagtggcagactctatgttgctcgaaatgttgaatttaatgaggaggaattttctagacttccatctaccatttcacatcaggtacatccttctcataattcatctatgcctactgcaacatttacaacacctatactacctactaattcgatttacacatctgctgaggtacaaaatacaccaaattctggtgtgccacagaaccagctgctgttatcggtgtgcctgcaacatctgtaactcacaacatgaacccaccagttgctccttctacctttgcctactgtaccaccctcacatcagcccccaccagaaattaatgcctcgaattgcattccctccatgccttaacatcccataccatcccacaccacctaccacaaatgaaccagcctcaaacactgccccaaatcccaacaacaccagtaacactcactccatgcaaaaacgatccaagtctggaataaccaagccaaaagattatcatgccactattggaaattattttaccag

SEQ ID NO: 394454 - DNA, 910 bp, Cannabis indica
tgtatttttatagtattaaatatggtttaagtaaataaaaaataacaataaaaaggttgacttcaatgattgaagtagtaaatacaaatcttattgatagagattcaaaaaagaaaaaattaaaatactaaaaagtaaatatgctcttattgggatttgaatccataacctccattatgtatgtcatataacttaaccctaatgctaaatcttgtttcatgtttaaaaatatcacttttaattaaaaatatatgttcagactaactaaaatacatatatattttttttctctattttttttggggggcaactgccccacgtagccttaatgtgagtttgcccttgaattgcattcattcatttcttatgtgcttggtgttagacatttatatgtatgatatgaaatatgtgtgtgtatatgaaatgtggaattaaatgaacatatacacaatataactaaagaatcaaaatatcttaagctattgattctttgagctttaattccacacgagttttggatctgcaaaagaaaagaaaactaattattgtgggcaatcgtgcttccaagctctctctaagctcaaagaccgagaccctatctttatataggtaagaccttccatcaaagtttctgccacaattaattgtcatatattttgacaattaattcaagaaattaaatcaggaaatcaaatattttataaatcgtaatttgaccatatatacaatatcaaccagttgattacgttaagattcaataaatataaaatattcatttatcttaaataaattaattaattctattcttaaaaaataaattattctaatattcactcgcttggttattatttagatttaccacttaaacccaacaactatccttgctatataacaaacatataaatcatgg

SEQ ID NO: 394455 - DNA, 893 bp, Cannabis indica
ttatatatacatatatatatgttcttcacgttgatatataatatatatttatatataaatatatatagtttcgcctatacatgtttatatataattctctatgattatataattttatttttttaatattgattagaataatctaatctatatattcctcgtagtttcatatcataaaatttgttataggcatgtatatatatatgtacgagttttttcgttttcgggactgtcgaatgagaattttttaatttcaaagtttgttgtatttttgttcatgaatagtttaatcatatttatattgtgctatataaaggatatgagcatgaatacctttgaaaaactatgaaaatttgaaaaattcttaaaatcgacgttcggacctaaatttttattgaaattaaagtcgatattttccgtctttttgatgtataaaactcacatggatctctttatttttttcatttggatcattttgggattgaaaacacgaaaatttttcatcggaattgtttttttacgattgggttttgtcgggttctcatgaccctcgcgcaagaaaacgggaaaaattggctcggtttgttggagaagatgacgcaaaataatacgtcgttttccctttgttctgtccaaacgacttgtcgttttaaggaagtgttttttttttaaaagtaaaaatgacacgtcattttccttacattaagaaaaaacgacatgtcattttctgaaggcagattttccaaaaaaaaaaaggaaaattttaaaaaaaaaattaaaggaaattactgaaattttttttattttggtaatttatttatttccttatttttatgttaatttagtcaattaaattatattatttaaattttctatttttatttaactacata

SEQ ID NO: 394456 - DNA, 864 bp, Cannabis indica
taaaaatctcaaattaattttaataacaaaaatatttgttaagttttgtattatcattttcttgtttgcaaaatcatcattttcttgttgtccagtggtggcggaaattatggtgcttaaaaattccgccaaaggttaaggtgtttgtgtggaaattggctcatgattggcttcctacctctactattttggctaagcgccatgtatccaatcatgatgggtgcccgaggtgttctatgcataatcttgaaacaatttttcatgcgctatgggaatgtaagaagagtaaggtttgttggaaaatttgtgatttccaacaagatgtgaaatgccatgggaatgaagatgagcttgcctttttgatgcggctgtccactgcaatgagtaaggaaaatttgaactgtttcttgttattacttggaatctatggaataatagaaatgctactatccatggcggttttgtgccgcaaccagctgaaatgatggagtggagtcataggtttcttgctgattttcaaggtgacaaatgcagtaggacagcagcagtgcgacgggagcaaggtgtgtggaaggtgccgatgcatggggaagccaaaattaatgtggatgctggggttaaggaaggtaatgggtattctggtctgggatgtgttattcgtggagaacatggtgaagtgatctttgcttcgtcgacttctctgcccagggaacactcaccgttacaactggagctgctggctattttgagagggatacaagctgggttacagagacatatacaacggtttagcattgagtcggactgtttggaagctattcaattaatccaaaaaaaggaggatggctgccgagatgttgattg

SEQ ID NO: 394457 - DNA, 1287 bp, Cannabis indica
tgagaaatgctaaatacaccttgtattatttttttcttttgcacctttttaaatcaataaatgaaataatttataatataaactaggttgataatatatccacatgtcatgcattaaagaaggagaagttaaaagaaagtgcaatataaaatttcctttgcaacttcctttttttttttaaaaaaaaaaatattatgtagttaaagacattgtctaaattataagagtaatggtaatagcaaagaaataaataaataaatgtgaatgaacaaactagggagaaagatgatattactaaagaaaagaactcgagcaggtgcaactctacaaagtggaaaataatttaatgtgaatgaacaaaaaacataaatcaaggcgcctaaacaagagatgaaaagtagtaaaaacaaacaagtaaataataggggtgagcaatagtcggtttggtcggttttctcaacaaaaaaaaaaatgcaaaattcggttttcgattttcatgtttataatccgaaaaccgaccgacaattatacaaatataaaaaaattggccgttttaattcacggtttggtcagttaacttcattttttttaaaaaaaaaataaggtttttaattttttttaattatttgaaaactaaaaaattagagtattgtataatttaagaataaattttttttagttaaataaataatgtataataaacttttttaaatttgttcaaattatttgtgctattaatatgataatgagttatattaaaaaacttggtattattttatgaatgtgtatatataatatgtaaatgcatcaaactataataaaataaaacaatgaacaattgagactttaaataaaaaagatataagtaaaactagtttaataaaattgcatattaaatatgtacaaaaataatatatatttggtcggttctcggtttaatcggtcagtttgccattgacactaaaattgaccatgttaaggcagttttaaccgaatgcagttttttcggttttcaattttttcagtgtcggttttttcagtgttcgaacggtcggtgtattcggtttggtcggttttttagattttttgctcaccctagcaaataacatactagggaagggtgtacttaatattttggattgtacttccctacccaataatgctaaagcgaggcttgcagagagttatgaaactcctaaattgaaattagatattattttttttagagtaaatagcggcataagtactcaaagttttaagtttgtaagtggcataaactcaatgttt

SEQ ID NO: 394458 - DNA, 546 bp, Cannabis indica
ctaatccacataatgtttattacgcacaaaactaaagacagcaacaaaggtaaactaactaaacaagcaaacacaagcagtggcaacaattaaactaacatcattagttcagcacacacaaccaacaatagcaattaaactagattcattaaaataaggaaaaagaaacctccctcaataatcgggctctccaccactgggatccctgcttcaaaatgctgaaacaatgttgacactttgctgtaacaactgggacttactgcttcaaaaataaatcatgctttacaccattgaactcactcccttttctgcagtttatgtcttgtaccagcaaaaattgccaccaccattttaaaacacattaataacaattgaatcataaaagatatattcatatatatatatatataatagtataagtatatataatattttttctttctttttcttctttttctcaagccaaactcaattttaatcacactattcttcttttttttttacaagtagtggcactatataacttattatataatatatataact

SEQ ID NO: 394459 - DNA, 541 bp, Cannabis indica
agagagagagagaaaggtaggccatcaggattcaacactaaacactgggcttgggccgacaaaggaaacttgcgttaaacactagcttgggccgacagcctcagatcagtaattgggcttgggctttaaaaatgagataagttaaaaactaatttttttattaaataatttttttataattaaaatattatatataacttatcaaaattaaagtgcacataatatgaatatgacctttaaattaaaaagtaataagaaaagagtaaaaaataaaaaaataaaaataaaaagtatataaaatgtaatttcctaatagaaatgaccgttaatgttaagtggaggccaaacttctttaataaatcacataatttattttgataaaggtaatgaatcaaataattaacattgtccataaaaaacaaaaaataaataataaaaaaagagtggaagcaggataaaggcatattttataagatccactcttatggcacgtttactatacagtattcagaatcggaataaattaaaggagaaatgtaac

SEQ ID NO: 394460 - DNA, 609 bp, Cannabis indica
aaaaaaaaaaatagtaaacttaagtagctttttacgtaccttgatggaggattcattgacaagggaatgaaactgattggagagattcggaaagtggtgattttgtggagaagaaaggagcaaggagctcctggggatggtcctggagacgcgagctaaaaccctagaaacgaacatccctaaaataattaatggaaagatggaaatgggaatgaaaaattgaaattatttaataaggagcgagaattggattgtgagattgtagagaaggaaagattgagaaggagaacaaggaaagcgtgagaaaatatttagagggagagagagggaaggagtgcttggggaagaagaaaattaagtcagagagaaagttgagaggttttggctgttattttcgtaattgacgaaattgcccttttctcttaaaatcgtaaacaccccatgaccaaatgagcttgattttctgcaacattgtttaagttaattaggatttttgcttttatttaaaaaaattatttataaaaatggttaattaacaatttttccctttgaatttagacatataccaaattatatctcttgaactttttttggcattaaaaatttccc

SEQ ID NO: 394461 - DNA, 1195 bp, Cannabis indica
tgatatgcatatatagaactgcagctgcttggagtatcagaacaaaaaaagcttattaagaggtgaggtgggtcacattaatatgggacagtggcatatagtctccatgatttaattcaggagattctacttttcaatgaaataattaaataaataaatatatgataaaataatcgtaattcagaaagtactccaacagtgaaaatgattagcagggcaaaaattttttaaataaaaactattatatgttattatcattggaaaaaaggtaataaactggtctcttgcatttggaattgagcttctggataatgataagtattataacatacatgcatatgcatataaagatgcacaaacagccagctaattctcaaatattcctagctagtttagatatagtaaattgtattttattcaactacctataagccatttttatatcattaaacttggaattgaaaaattaaaacctcttggtattattaggtatagataagatttcaggtgaggtgtagctttcctagatgtgaatattttctacttcaatttacttaataatagactcctcatcgactatatatagatttattgatttttcaagtttctagccaaattaattttgaaatagttacttttataagtaatattgctatacagattaagttgatgtacctgtgagagagaaggaaaaaaatattaataatatgttactgaaaaagtaatatattcttaatactggcgagcactaaaggccaatgggacatataatttttgctacttacacttagttgacaacactattttgcttacgtttcaatcaaaggaatatcatcaactcctaatatttatccttattcatcaatgagttttttttttttcaccaaaatctttttaactgtcgtgttactagtatttaactttcaaactcaaattttagtggtaaaatcctctaaattactgaactagtggtaagtttaaggtgtcattcaattaactgtcattatgggttgtttatgtgtacgctcttctacacatgacatgtttatattggtagacctaatattattatttttaaaattcattttaaaattaaataaataaaaaataaaaatatgattaattttgaaataattttaaaatttttaaaataataatattaagtgtaccaatataaatttgacacatatacaaa

SEQ ID NO: 394462 - DNA, 786 bp, Cannabis indica
tttttgatcccccgcactctgctctaagttctgacctttcgagcatagcgttgttaagtagtgccactcagttttggcttgacaaagtttaggtttattcagcattcggaatgcagctaattttatgctgaattcagtgaagatgatagaaaaaaaatggagtattcaatagtgagaatgctttcattttgcagggtggtgaggactgaggaggcatcaaaattagcttcctgacataagatcagatagtatttaaagggttttactgcaaaagtgaaaattgttatcagaggtgggagtcttctagataggtcatgcggttcatccattaggcctatactttcttgatctttaagaactccatcaagagatgtgtacgaagattttcaacttttgctggtggatttttttgttttcttaatttacttattttgtactttttttttttgttttaatcaacctgttataaaatgaaaataacttttttatttaaaattaaggggttttttttttttattattatttcattgaaataggtattttgctttggtgtagtgttgttaagaattcagggtatttaggatttttactttttaattattaattatgtattattgtacctaaattttttagtccgttataaataatttttaaattattcaatattatataattgatcattctctcagttttacctaacgtgacaaatataaccataacgtaaatatttatactaagtctttagcgctatttttattttaaaaaaattattaaattaaaaattaa

SEQ ID NO: 394463 - DNA, 605 bp, Cannabis indica
acactttttgttttttttgtttttaaaattgaaaaacaaaagtggttacaaaatgtatttttttttctcaaaataaattttttaaaaacaaaaattttacttttattttgtgattaaaaaattaaaaaacaaaagtattacagcttagtgtattaatgatttttttttaactttaccattttttttttctttgaaagattgtcaatatcgatgttagtgaaaaatcaaaaaaagacattttatttctttggcaattatttgatttgaatcaattacatttcaaaaataaaaatatcattttttatgttgcacccatagaaataaccaattaatatcctcattcaaaaaagcaaatgatattccatgagtttgtatatactaacaattaacaaaaaccaaaatcaaccaaacaaataaatccaaaaacaactaatacaaaaacccaaaactaaacaacaaaagaatactatataatgaaatcagcaacattaatgaatgatgttattatagaagttgtagcttagtacttctactactacaatttgacaatgttcaaagtctcttcattttttattagacactttcttcatctcattcaagatttt

SEQ ID NO: 394464 - DNA, 569 bp, Cannabis indica
cttggacgtcgtagaattggatggcggtgtgggcggacaatcggactcggcggtctcgtgggcctttggcggtgtaaactttgctgtgacggtcctttcggccagttgagcggacaatgtgacctccttggacttgaacaatctctcctccaacacccttcattcccattgatgttgaagaagatggtctatctctgggatttgcattatttgattggttgtaagaattcagtgtatgatctaaacctacataagatggtagatgatttgggactagttggagatggtggtggtggtggtggttgtagttgtttctactattactcctactactaccactgtctagattttgttcttcttgtgggtgttgtaataataatgggtctaaaatttgtgggataggtcttatttggtggtgcagctgatgattcctctgaaaatccagattcctaacccttttttataattttttattcaggatttggttcttccaaagtggtctctttttggggttttgggtggggaaattctttttcttttcttgtagttaagtaatgtactctttctca

SEQ ID NO: 394465 - DNA, 561 bp, Cannabis indica
attcttcatttttgcctgggttactatagattgaggagaaacccaccgagctcctactgcactttgtattctctgagaaacagcctcggtgtattcttcagtaacatagtcctcatcggcctcagacacgggttctccatcttcgttgaacccaccaaaaggcagcctccgagctgttccctcctccccggcttcagatggagtatcaggatgtacctcaccctaatcctccacctcttagacttcaccgtccccctcgatgtcttcctcctcagcagcaggccgggcctgctccgcacttggcatcattgcaagccgagctacgtgtgggtcaattagagaagagctttcaaatttcttatagtaaaaacctagaaaatcaaatattctagcataaaagaggaaagagatgaagaacttactcacagtttgaagctttagagttgctcgaatgacactgatcggcgcttccttgggattcttcgaaggatttgagaggaaaagattttcttgctctgacttcttcaagaacgaaaaatgctaaaagtggttgattaggga

SEQ ID NO: 394466 - DNA, 1445 bp, Cannabis indica
catactgtgaagctcccccacctagccttttgctaacaaatcttaagcatcttgaatatctctaggtgtgatctgacgacctccacttctatctccatagctaaacatagcattaaagtctccaaaaataatcttgtgatcttttagatgaccaagagtcgagaacttgtcccacagagaaatcaattctgtcatggaattacttccatacactgcagtacataacaactatctttgtccccaatctttctaattttgcaatgaacaaactgatcatcttccacaagaatctcaacattcacatagctagcttgccataacaacaagattctataagaaataatagggcaggagtagaaattccagctcctaaagttattttccatcacatctaacaccctgtttcaaaagagccaagaaaccaaccttgtttatttacaaacatctagaagcactttctgcttctccttcttattaaaccccctaatgttccatcccattaaactaacattgtccattaactggctgagtcttagttatttccccaaatccatctctattattctgtagcacatcatatccattactggttgtggccttcagacaagctatttccactagtttatgcctcttcttcctaggcgtaatccagttttctgaacctctcgaatatgctgtagttgttgacttgttcttctctgttttcttcctttcattcttcttcacaatggtgccttcaagtttctccataatagctccccctacaatctcagcatcatttttcacttttgttttagccccactatttggttcttgcttcttgctcgttgcactctttttcttccagacaaaccctttttctttattacaattagccaccgtatggcctaacatagtacaagccatacatttagaaggtaaccactcatactctattgattgttccaccatttgcttcttctcattaatgaatgatatagcttttggaggattgtctgaaatatcaatgtccaccagaattctcgcaaatttgatcattgacttctcctatgtgaccttatccatcatgattagttttcctatggtgctaactaaagcacttaggttgttcctaccccaatattgaagacccaagccatttaaccttatccaaactaggacagatttaaccatttgggcagtatccatatcaatagaccatggcctcaacaccacatgttttttgtcatagtgtatcacaccagtttcaagcactaaatctcttatagcctcatctttaaagctaacaagagtgaatccaggatgcattctcactatcttctcaactcctaaattccccccacactctcttcacaaaaccttcaaacactctaaaaggtgggttagcaccaagaactatacaaactatagcattttttctaataggcagcctcaacttctatttc

SEQ ID NO: 394467 - DNA, 620 bp, Cannabis indica
tctttccccgtatacatcttccaagtcaatattttgaattttaagggtaactcaaggacttcaattttcggggagaagggtgatccacgtgttcgatccatctcgacatcagtgagttttgggccgataaggccatgtaccatgttttttagttgatctaattaaatggatgaactagttcagcctgttgaccgacctatgtcacatcaggatctcttggagctaggtcctgaacgtggatgcctggttggatagctggttggatgtattgttcatccaagccccttattctattcaggtcagccttgaggtcgtgtgcatcacccaatttgttaaataccaaggtactaggtggtctcggtgtctaatttgtttggccggtaggttggctagaattttcagtcttgatgaagttattaggtataactccacccaaagggcggttaggaaggatctggccatctaccgcttgggccataggttggacctgtggccagagattggacgactgatcattatgagcttgggcggtatgcccagtagcatactcttttagaccgctcagtgggattgtaaagcccgcttagttaatttggaaattagcagttatttatgttaat

SEQ ID NO: 394468 - DNA, 589 bp, Cannabis indica
aaaaaatttagggcgccctaaactgccccaaccggtagtagatcggttcccaaccagaaaatcggttctgtggggtctgctatgggaggaactggtagaccgattctacaggaccatactgaactggtcaaccggtttaatataggaaccccccaaaaccacacaaatacctcaaatcaaccccaacccacaccaaaacttctagagtacctaaataactcatatagaacctaattcatgctataaagcccaaaaacaccctcagaaacaaaaaccaccatagaagagcaaagtttgagctctaaaattcaagccttgctcaaacaccacaccaagcaacaattgcaacttaaaattactaaaatcaccaactacaaacttcagaatactcaaacaaaccaaaacaattcgcacagtaacctaattcaagaaaacaagcaacaacctaacttataacttaagaaaacaaagagaagtgagtttgggggttttaccttggattggattcactgatattgctaagacaccaagaattgagctaaaaaccctaactttttgttggttttcttaagagagagagagagagaga

SEQ ID NO: 394469 - DNA, 1497 bp, Cannabis indica
aataatccccactctctactggctcgggttttcaaggcatgctactacaccaactccaacttcttagaagcaaaagtaggtggatatggatcatttatgtggagaagtattctttggggaagacaaattattgacaaaggcattagatggagggttcaatcgggtagagaggttcggattaatgaagataaatggcttcctcgcccgaccactttctccctccgaatcccagcaaagttcagccaaggaacaacactcgatcaaataaaagatgagcaaggtaattggaagaaggagttaattgaacaaagcttccatatggatgatatccccattattctgggattggctccttgttttaataatgccaacgatgatcatgtgtggcacttcacaccaaatggaatttacacagtaaaaagtgggtatagagtggctgccacaaatgaactagaagctgaagcatctacagataaacacacaaggaattggtggaacaagatatggaagttggaggtccctcccaaagttagaaacttcatttggagggtatgtaatggatggatacctgtgaagacggtactaagatatcggggtatgaaaatagattcaaaatgttgttggtgtggggctgaagacgaaacaattgagcatagcctatggttctgcccttcaataaaatggttttggaaagaactccaagtttggaaagtgattaaacgttgcaaaggaacaccattagatatgcttctccaaacatatcaacaggtaacttaccccaactttattcttttcatcatatttacttggttgatatggaataggaggaataaaaaacgcctcaatctcaaactactgcccaatgagttgtgggctaattgggctcaattggaagctgaggagttattgaaccattaccattcgaaggaaacaaccttagaggtgaatccaaatatagaaaagagatgggagccgcctaaaccaggtgtttactgcctcaacaatgatactagcgtgccaaagaatggtattaatggtgggctgggtgcactaattcgtaaccacctgggtgaagtggtggctgccgaaatccaactgcaacaagggacctattcggtggaagtggctgaggtactagcgctaagaatgggcatccaattagctatcaaaatggctgcctatccttacatcatccaaaccgattgccttcgtgttgtgaactacctgaataggatttcccaagccacaacggactggagtgcattattagacgatataagagagaccccggaatttgttcactgccttgccgtgcagcatattagcagagattgcaaccggtctgctcactctttggccaaagaagctttggtttcaaactgtaataagttgtgggagggttgttttcccttttgtgcgtctgcttctttaacagcagacttgcctaaactggtgtagttttctcttttaaataaataaacagatttcaaaaaaaaa

SEQ ID NO: 394470 - DNA, 688 bp, Cannabis indica
aactaaaagaacataaaagtaaacagaaaaaaatgaaaagtaaacatggcaattcccacagcggcgagatttttattttactttattcatttatatttctctatacatcatattttctatatttctctcaaaaaatcatacctttataatacatagacaataaaatattaatgtatattatatcctaaatatttaattaaaaactcaaaagtaccctataaaaataataaaatattatagtactaaaacctagaagttttttgtagctacacaatattcattagttaaattttttagtgaaaatagttcatttattgtatgtactactttgatacttttttttagctcttagatatatttttagctttgtagctattagatcatttttaatacaaaatgtaaaatttgtgctaagtttgccacaaaaattaaatttgtgtttactccactatttaaattgtgtgctccaatataaaaaagaaataaaaaatttaatgacttggaccaatcaaggattgccacgtgacaatttacttaccacttatcagtcaggtacctataaaagtttcagaattataacttaagtattattgcggtcaaaaattaaatttaggtatttatttataactgaaaattaaacttaaatatttatactgcaaattactcctattttaataataaaaaaaag

SEQ ID NO: 394471 - DNA, 1278 bp, Cannabis indica
gtccaaccccccgtacccgccctagttaggggctagtactcggtgggtacccgaacccgcgggtataattgccatccctagatggggacgaggatggagcgagaaatctccgtcccattagaagccgggtccccacggagccccatcccattccccgcgggagaaatgtgcattcctatcgctaacacacataattgggatattacctataaaattgagtatgaattaataaataataaaagaaaagtaaaaacaaataagaaataaaaagtgggtatacaatgtaattttttcaaaagaaaaacttaaaatatgagatttctaaaaaaagtccacactaaagtaaaagaaattaaaaaaattcataactcaaagcattatttatttatttccttttaaaataaatcattatttatttatgccataaaaaattaactcttataattttctaaataatttttacaaaataaaattgcccacaatataaagtgtatataaattgggttgtacaatttatgggctgatcaacccaaaccggtcgactatttaattttaggctttagacacgataacaccaacttgaactgaattgaaaacccaacccgacccaacagcacacggtaaaaaccctaaaacaacggtaattgaacttaaaacctctttcaccgttctaacttccaagttctctcaacttcccctctttcacaacttctaaaaactgttccaacttccaagtactctcaacttcccttaatttgtaacttctgaaaactgctccctccctcatctctcttctcctttaaacatactgtaacagcaacttgaaccgataccctcttttacaacttctgaaaaccctcatctctcttctccctcccttgaagcctctttcaaaacttgctccgtccctcatctctcgtctcctttgacggttagttttcttattattattgtaagaggtgtaattgtagttagaatttttgagttgtagcctttgtttctttaaatttgagttcatcaataattaattatttttctccacattttgtgtgtgcttatacatatgaattgatgaattattgtagagcttagccattcattaaacatctttttgtattgtaattttgacatttgctttttgtttctagttgtgcctctttgaaaaatttaaactcaattcctttttctaatggaaactgatccattgttggaacgacgtactcattattattctctaattaatgtgatacttataattgtattgcagtgttctttctc

SEQ ID NO: 394472 - DNA, 689 bp, Cannabis indica
aaagtgccatatggacacgtaaacattgtcttatcttggtcctccagtgttatggctatttgatgatagctggaacagccatctaaaaaacaatagtactcttctccaaccaattaatctagcatatgttcaatggaaaaggaaaattctcttatggggatcaaatcattcttttcattcttgatcactgtcataccccctttcttcgacactacttggactaggcttacccatttactgtctaaaattggctaggccacatgagcatctaactgttgggattttatgccctaaataaaacacatttcaatctaatctgatttgttatcaataaaagattagaagtcatttatgttttcatgtatgctttcatgtttatggtttaatgtgtacaaaatctgttaagtccagaacatatagttattcacaattatagtgatgtcaacacagtggaatgtaattgtgattatatgcttcaaaagataatgttcctgatttatcagtgcactggatttatactgatgtgataatcagtgataaagtatacttacaccttggataagtgttatgttctttcaaaaatattggcaaagtatgctagtttcggatgaatggaatatacattggactgtgaacaatattaatctttgtaaagatattataatcttattgttgtatctttctaagtc

SEQ ID NO: 394473 - DNA, 1698 bp, Cannabis indica
tcaccacttgttatccacgagctacgtatgtcactatcgttgcctgatacaacgaacgataagtaagaaacctaaccacagtttaagaagtaattcataacagtaatgatcgtttccaaccctcggtcataaccgaggcataacaaacacataaacaagatctccattataatcgagactataacaatcacaattgttaattatttaaccataagtggtgtgtatcactttttcttaccttagtcaagaaaacaggtgtgcaggacctgagttgaattatgctcgacgattctgggtcctatgtcactacaacaaaactcgataaacaacttatccaaactctagagccaaaccataatctctgaaacttgacatgtaacttcctactggattagaataattcaagtatcactaaaataccctaatctaagctttgaaagacaccctgaaaaaaaaaacagtttcgaggcaaaaaccagacgtttcccctgctggcaaaactagttgaatggttttacagcacctgtaaaactagttcactcggttctcagctggcagaaatgggaactctagtttttcacaccaaaaaccaatcaaatctcctccaaacttgttcaaacttacaataccataattataatgtatcccaagcatcaatatacaaaaaaattcatccattagctcaaaatttcatacttacatgaaattaaaactcaataatcttcacctagaccaattcaagtgaaatagctactaaaatcactcaatctaaattaaaacaaaccctaaaacaaacctaaaaacataatctaaccttaatttaacatcacaaccccgaattcctaaaaccctaacccaaaactaagttaaaacttatgaagtccttaattaatcacaaataaagcttacctcaaagattaaatagcttctatctcttgtaaaaccagctggaaaatagacaattgaagaggaaaactccttgggtttttcggtccttagggttcgaagggagagggggaggtgaagatgggttccctttgagtttttatcttttctaataaacttatctattacgtatttatctaatattataaaccttttatttaatttatatttcagcataatcaaactcaaaagagacaaaatcacacatattagaaaggactaattccccctttttcttaattacttaaattaatcaaagcttaggggtaaatttgtaatttttaactaatccaccaatctgacaacataaaattttaactagtccaatataattctaattcaattcatcatttattgtcatgacatttttgaccactcagtcaagcttccacggccgttgggcccgaaaacattttattccaagagtggtatctacgataccctcataatctaatataatctccgtaattgataaattacgctttattaataactttttaaattttcaataatcatcttaagtaagatcgtaatcttacttcattattaaaataatcacatatttaataaaatatgtccaattaaatattataatattttttttggggatattacatgcctactgcccttccattgatcccctctccttaacttcaaactggcccttgtgttcgaaagaagttaatgcctatgtatgagaaagtggagaggcccacaatactcagaggcatcggaaaaagtaagtggcgatag

SEQ ID NO: 394474 - DNA, 1327 bp, Cannabis indica
  modified_base (39)..(39): a, c, t, g, unknown or other
cttacaatagctaagagtaatttaattatatttaaaaanatttgaccttatggtcctaaattttaatacttttaaaaaatataaagttttaaaataagtttttttaaaaaatataaaggtctaaaccgttaaaatgcaaaaatctaaaataatataaaattctatttaattattacatttttaaaaaaaagtgagatgcttccaatctaacctaaaaatctctttatatatttgaaataatatcatcatccttttctattagtaatatgattgagagtgttcaaaaacatgcttacatacatttcatattacgagtaaaatcataatttataaatcaatttgatataaaagatataaaagagtgtgctaaaatattttaggggcttttttattttaacacttcaaaacaattttgtatgtatttttacgaaattttacatagaaactcctattacaactggcgctgcaatctaaattgcaacaaaaaatcgtatagaaacctctattacgaaatcactttagaaactcaaaccgtaaatttgaaaaaaaaaaaaaaaaaaataatatatatagtaattcccctatattttattacataaatatagattattttgggttttttttttttttcacatttgggatagagattctaatttgtgacccttttttttaaaactactaaactatactatgactacaaatatagattattttgtgaaaaaaaaatgagaagtcttttttatttacttatgatgtatttattgacattttcttttctgatgatatttaatatcataaaacatatcccaaaatcaatatgtaaaataaatgataaaggagcctaataaataagataatgaattctcaaagctcatcagatcagactgctccactcattcaaaagctaaaaactttacttcctttttttctggtgtcatatggctgccgctgaatatgaacataacaattgctgactaggcttatgaaaagctttatttaaaaaacaaaattaataaaaaaaaaaaaaaaaaaaaaaccccaattttttcttccttggaaaatatatactagtataaggtggtggtatatatgtctctttttacatgcatgtgcttatgctatggtaatgccacttgttttggctgctttatatcttgagacttgagtaaattttctctctttgggaaagtgaaagaagcccaaaagcaagagtggattctttctatattctctatactgttttgggacaggaaggcttccattccactctctatccttcatcacaaagcaatgtcttttcttttctttaattttattttatttttgt

SEQ ID NO: 394475 - DNA, 1013 bp, Cannabis indica
atgtatggcccatggattaaaactgatggtccgcctgggaattgtttctaaacagtggcttttcgaagggatgtgattcatgtcgaggaaggagtgaagctctcgggagccaaccattgtccaaaaggtagctggagaagaagaccattatccattcaatcggagaaggtggaggggtcttcgaaggcggcggttgtggctgaacgaccgacgattgctggggaaggtactccggttggcacgtggcatggtactatgcatggtactgtgcatggtggtggacgtccgcggagtacggatttggatgacgtggcccagaatttgggaatgcaagtggtcccaggagtggaagttagtactgcacgtggtgaatttttgaatattcccccccaaaaattctgtctagctacctacccctgattttgctcacgtggggccaggggaggaaatgggggaatttcctgatgttgggccttctttaattcagtgtttggacattcctcacatttgggcttgtaaatctcaagtacctcataatttcccagagcccacaaacttcaaatggccctcaaatgaccctaatcttcaaaagctttattgtgagttattagggccggactacacaaacatgtacaaagctcaaccttctttaatctcaaacccaccaaatgtatctgagatgatcatacaccttttggggtccaagaaaaggaaagcccacacttgttatcagcccatccctgaaaaattccttgattcaccgttcgaagatgaaaatcgatcccctgtagagactaatgtgactactgccccagaaatcgacaagctaaaggataataatgggcatgaagtggtgattcagccgttcaatccaggcacaagtcatggcgcgacaaaagggagacgtaagaaggggcttagggcggcttcatcttcggctttgaagaagaattcgggcgtaaagacaagaaggagcaagaaacttgtaacgccctaatgctaaggcacgctac

SEQ ID NO: 394476 - DNA, 1159 bp, Cannabis indica
taattttttacttaattatttttctactgctttctattttaacaaaacttcttttttttctattattatattcctacaataaatatggccaaaagtgaaagtcaacatatatataattaaaaaaatatttagaaaaaaatttttaaacaaaattcaaattatattatatattatatcaatcaaatattatatataaaaaaatatatatttatattatttagagatatttactacgtaacaacttaaaactttaagtttataaccagcaggtacctaataacttttttttagtagtaagattccaaagttactaaaaaattgtcatttggtcacttattaatacaatttggagagagaagatgaaactttatttgaattcatgaatacaatggatgagacttttatatagctaaacgttatcacctattcaactaacagtttcaataacagaaacaaatcgactaactaaactaattataacaattgaaacctaacttaataggtcctctcaagatagagtataaaatttttttgacacccatcttatatacaatctcgtgagtaggaaataaatgtttagttagtatgtcaactagattggctttagaagagagatgatttatcttcaaactactattggtgatcttctcacaaagaatgtggcagttgatctcaacatgttttgttctttagtgagaaattaggttctcgaagatatgtataacagcactgttatcacataagagaatgaatggaagtatgatattgatgttgaagtcttggagaagagaggtgagccaagttaattcacatatagcactttccatggcatagtattctgcctagttgattaacgtggcactgtctgcttctttttcgatattcaggaagtgagagattggcctaaaaagacacagtatcaagatattgaaggccaatctgcatttgcgaaggcttgaagctagagtttagatggagatgaagcatagaagaatagaccttgacttaggacccacggattgaggcccaacccgtgggactgtgttatttagtacaactgaggatcatttgatgccgatagtaggggtgttcatccgatccaatctgcacttttttggtcaaacaacattcaatccgcactaagtgcagatttcatatt

SEQ ID NO: 394477 - DNA, 1173 bp, Cannabis indica
atacatatattatcccagatggcgtgttttctttagtaatgccatatatctttgtagtcaaagcacaaggaacaccataattggaaaacaaaaacttgttctgacgcttttgcctaatactgctcataatcagacaattccatatatcctcacccatattaccaatccaatttgaaaacatgaaagcagcaaaagtgttagccataagccttatgcaataccttatgacccaaatggtgttgtttaaacttggcgatgaaggattctccctcttcttttccgttaccgacactgcggtgtagtgaaccaatcgcacctccttcttgtaataccccaagggtggagacgtactgctccccggatcccaaaccataaacaattgtcctaattgaattattgggacttgagtaatatttaatgggccttccttcttactcggatcccatataacccaatgaccaaaagcataaaatgggtcatctccttgggttgatttgggccttaggtaaggttttaacagtccaaatgcaaacatctctgtaacgaatgaccgtagccccccatgacctgaaacgaaatcaaagcacacgagtgacagcgacttctctggttcttccgtcgatgattgccagcaaaagttttctggcgaggcacaagtcttctccgacactggcgagcagcccatttcatggtgtaaggccggtaacgtactcgacccaaagtcgacattagaattcgttgttgttctgtcattaacggcatcgaaggcttgctggttgtgctttccacgatcaaaaagcttgtgagcctccattgccataggcaaaagatggcgttcaagtcgcgtcgccttcccttgccaagcttgacgaatttttggcggaatattctggctcggcttctccttatacaacaccggtatcgtctccagcaccgatgtcatctccaaccttggtagttcgatcttcgtctctggtgatgcaagcttcgttgctagaattacttgatggctgaatctaatctctactcctttttcagaaagcaacttagaattaattgaggaagatgatgtgtccctatttactgattgaggttgaaactcatcgacggcagttgccatcatcaatgaaggaaatcgaacctctggttccgtcggagttgagtacaaagagc

SEQ ID NO: 394478 - DNA, 1124 bp, Cannabis indica
tgataacttatttataagtgaaaaagatgaatgataagaaagtgtaattttattataaattaattaattattttttaactaatatttttaagtatttgtgagggatgtatattaaaaaaaagaattgatatctattatataatataattttagttttgattaagatatctataaagatatatcactagaaaaataataattaattttttatatttaacttatttgtacaaaatattataaaaaagattatattgaaatttaaatttaaattcaaacgatattttttttctcaataaaaaaataaaaaaaaaacttgtttattgataattagaatcaaaattggaatgaatataataaaattaaaattataatatagtgatacaatgactacaagtgagaaaaagatagatacggtatgtgagatactgtgatgataatgaatgagacacggtgatgactgtgagttaatacaatgatgacagtaactttgaatgattgtgttgatgtgattttttatcaactgatttaagaagatcgtaaaaataaagaagattgcgagaaattaatttggctaaataaaatcacattaaataaaatggagatcagggatttatagtagttcactcccatatcgcgatggtaatggggttatgtctactttattttattatttgggtccgacacaccagagttatgttctcaagagtgtgtggacaataatacaaaaataaatttctaggtgaaatctgtatcgagacttatgaacacaaagctcatgggagacccaacattcacgaatctgataaggatggtggttgtaaggttcttgggaacaataaaccaatagaagcaagaaaagagaatggtctcttgtccttgatgaccgtgtttgtcaatgtgtttgagtaatggaggtttggtgtctacgaagtgtgaagaacttgggaaaaaagatgaagaaagtaaatttcaatgggtgaagcgttcttagtagtcaaagcgtttaatacccttcataggagatattcggagaaataccatctctgatctgaaaattaatatttcgtagctttggatcagcataactttttatctactttgagcagcgagcattcacgctctaa

SEQ ID NO: 394479 - DNA, 1716 bp, Cannabis indica
tggggtcagtcacatctaacgccgtatgagctgtaatatttcataacttttctcaacaattcagtggtccttttgttgggaattcttaggaaaagaaggaattagctctaggtaagcaagttcccttctttttcccataaatttgatggttttgagtttaactgttcgtgcgatttttaagttgtgtttctataggattgaattaagtttgattctattttttgaggttgatttcatgttatttggtctagtttaagcttagatagtagcttctagttgtgtttgaataaagtttgaggtttagagctcaaactttgctcttcagtggttgattgtatttcaaaggttattacttagttctattgcttgagttaagtttgttgttgcccaaataggttgtctggaaggtttgaatcaatttggggaagattgctttgtgggtgaagtttttagagtttctgtagagaaccagtcaatcgactcatgcttgccatgtagaactgattaaccagttccccaggcagaatcctaagaaccggttttttgttttgaaaattttgttaaccagttctagtggttttggaaccctatgttttcatatattagtgatacgtaaggtattgccatgttatccaatgatagagaacttttagttatgattttatgtccccaaaaagtaattgagcgtatcacttattagttttgcgaacattgtgacttaggggcctgtaaactgtcgagcaacagtttcactcaggctgaccgacacacctaagttcaggatagaggtaaaattagtataatgatatacataagtgattatatatttagtgtacatatttatgaatacatgttagatagtatattgaaatagcggtatcagtatgcataaattatatttgatatcgatgaatgtaagattagcataagtattgattgatgctatgaatcgatacgactagagtatcgagtataggctgatattatggtcaatagtactatcgtacgaacattctagaattagtacgcgtggaacacgtattagggctatgattgtgtgcatgggcgccttgttgtaattcggtttaagtttatgttatgattatgcttttcttgctaagttttccaacttatagttactatttacatgtgtaagtaagagaaaagctaaagttgagcatcattgagtgtgagtagatgaagattgtacatgttgaggcggttaggcctggagcatacaatctttgtgacagcaggctattttgaatagtcgctaggcgacaacttttgtaactaatattttctaatacggttgtaaaaattttacgtacgagatccaattttatgcaaatgttatttattttcatttcagggttacttagtaatatttaattaatcacgtttttctaaccaacacgtttattagcaatggattgcatagttagtatgaaatcatgacaacacgcctaaactagtagggtgttacacgtggcctcgaattggatgaccattaccttgcgtcttctgagtgtagttggtcaaaagtttttctgacccatattgcgcttcatttgggatatagacttctttcccttgtcccaaatcttggatgaatggattatcttccactgattgtcatgttgggatttattccctaaaaataattaattaatggataatatattagaaaatatatgaaatataattataagataa

SEQ ID NO: 394480 - DNA, 552 bp, Cannabis indica
tatcaattgataacatcatatatagtaccaagatttctatttatggtaccaataataataataataataattcacttatatataaattatgtgtcacactataattctttaaaaattgtatatataaccattcacttctattaacctcataaaaaaatctagaaaagttaaaaaataaaccaaatttttttcaagttcataagagaaaaagtgcaacaaaatgacataaaaattatagcataatttaaacaatcacataaaagttaatacttcttgttcttaagatatattttttgttatgaattgcaaactctaagatccaaagttcaaaattttgaatcaaaacaaatcaagtaaaaaaagattaaaaatatgtagatatatatagattataaatcttaatttaaaaaaaaaaaggaagaagtgaaaaacgtgacaacaaaaacaaatataaaaacaacgcaaaaaattggtgacttaaaaaataatataaagtaatattaagtagatgaaaagaaagaagaagatgaagagagaaagagaaagtgaatg

SEQ ID NO: 394481 - DNA, 605 bp, Cannabis indica
aacaaaaacacacaattcgatcctgatcatgaatgaaaaatataacaaaacttccatgaaagaagcaatcaattattcgattacaagtgaagctaaaaattgtagaaattcagctgttagaatgaaaattcggtatccagtaaccaaacgaatccataactgagttggggtttgagtgttttataccgtttctaagatccttgtgaagattatgagtggaaggagaaggttgtgagtcgttgtagcagtgagaaaaaattcgaaccaaagtaagatatgtttggctttggaggtgtcttcgacggtgaggagggaaatgcagtagggcttcggatgttttaagtgtttcaatttgtggttcctccactgccatcgctgtcctgtacttttatcaaatgtcccaaaaccctaataagaagaggaaggagggttttgtgaagtgtttcgctcacaccaacaagatggtccctggtcaggctcaggcgtttttaatgggggtcggcgtttcgattgcccgttgttgcttttctttttcttttttaatggcacacagtgaccattaatggtaaggtaatgaattttgttgagaaaggataatgaatttt

SEQ ID NO: 394482 - DNA, 766 bp, Cannabis indica
acttgaagaccaccattggagacttccatctaagactaccattggagaccaccattacagtgcttctccatctctcatccccatataaacccatatcacaatcttaattgaaactcaaatcacaacccactgctttgctctaccttgctctgtctttctcttcaccggtgagttttcttctttcctttactttagtgagattatataactttgagagtacaaacccaagctgaaactcaaattgcaaccctcaccatcgaacccaagctgaaactcaaatttatatattttttatttacaataagttactttttaaatatttaatttattgatgattattaatgtcatttgattttttttttttcataatttacaatataaaatgttattatgtattagaatacaataataaatattgtagcaaatataacatttacttattttgtatttatcaaatttaacacaatatttacatcttatcataaattaatcaatatatttacaaatttgtttgactacccctatagttaggcctaggaacaaaccaaaaagagagggtttcaaagaaaaaaaaatctattggaatgaataattatcaaagcttatagtattgaggtaacttctaaagtactaaaacacaaagaaaatagggaaaaatagtgaattattactaataataatgttcaatatctacaatgcttgtgtttcacgttgtgatccttagacagcctgttagagattttataacaatggaagaaaatcaaga

SEQ ID NO: 394483 - DNA, 1902 bp, Cannabis indica
ctaatatgtagttttctttttatttttcttttgttttttctagttttttatttattttttattacttttagtaatatgtgaccttatttttatttttaaaaagtcttaattggtttagaaaccattgtatatatatatatatatatatatttaattttatgttatattgatcactatctttaagtttagtttatcttaaagttagtattatttattttctattgccgtcctacatttacatttgtggagaaaatattctactgacacaataaaataaaatgttaaaattttcataaatagtatgttaaattgtttctttctgttaaagaaaaaaaaggtctaaataatattttaaagagaaaattacaccctatactctttttttgttaacccatttcatttttacctttcttttctatatatttaatttataccctcttttatttgttatatcctgattatacctttatgtaatgaaaaaaaccttcctcacctctctgaacagtacccttatgtaaggatataatcggtaatggacttataaaatgggattcatttcaattgaatttaaaatgagactacttttagttaactgatgaaaaaaaggggtatatttcaacttacccctattttaaaaacatgctacatcatccatcacaaacccaatttattgattcaaaaactgttatctttttcctttattttattataaaaacccatgtaattttttttcaccatttaacatttcgttatctttcaatgcattttaaaaataacaaattatttttttaaatttagtactatttatttataatacatacatcaaaatgttatattgtagagtatatcattcaataagtacaatatatatttatataaaatttataaaagtcgggcaatatgcgaatcacagcttaattccctagtatttgtatatatgatgttgaataataaatatttttatataacattcactaatcagtttatattatcaaaattatctaaatgaaaaaatattttaattttaatcaatattaaatataataagattttttaaaaaaaaaaaatataaaaccattagaggcagagtggccccgcagctaataatgacatcagtttatcaatctgacactagtattagcagtgagggtgtcagtccgccactaaatactagtttttatcgaccaagtattaccgacaaattattattagcagagcctgccgttactaccttttaccagtggattgagggattaatagtagcagaatccttgacctctaataaccataacaaatggtctgtattagcttgtattataatatttataaaggattcagggtcaaccccaatctccgacccaaactcgaacctgacccagattcggacacatgacttgagacccagacctagacctggacttggatctggattcagaccaggactcgagacccgagactcgagactcgggacctaaacccgaacccggatccgggtccaaacccagacccgaactcagactgggacccaaaccggaacctagacttggaacctagaccaggacccagactcgggacccaaaccttgaccaggacccgagacccaaacccagacccaaacccgatctcagaccaggtcccgaacacggactcaggatttggacctagtcctaaacccaaactcggcacctagacacaaatccaaagccggacccgatcttgaacccgaacccgagattcaaacttggtcttgaacccaaactcgagacctggacccgaactcggatttggacccggacccgacccgggactagaacccaagacccagacccagacttaggacctgtaatatccagattaaaatagtacttaatttttttttttttggatattaattgagcgagg

SEQ ID NO: 394484 - DNA, 1470 bp, Cannabis indica
taaaactaagtatacgtgcttggtatatacgtgtttggcacactagataaatattttaagtttttttaaaattatatatttaatgatattattatttaaaatgtatatagctagtatatatatatatatatatatataattagtagtagtaagcttggccccccctcaaatctaaacctggctccgtcctttaaatgttgcctttttactgctctgctatgctcaaccaagttgttggaacttgaaagtgtattattactttgtttatggaaaaatgatataaaaatatatgattagtagaaagaacactatataaatggaagttttttcatgatagccaccagttgtatagctgttgatatttgttttggttttgtttcagttttataaatttactattattgttttttattatattttattaatattttaagtttaattttcatttcttaaacttctatacaatatattattattatttcaaatacaattatattattattattatttcaaatgcagttatgttatctattattatcattctattctaaatattatttattttaaaaaatcgttatgtactaaaatttatgtgatttgaattatgaaataattccctatattaatgagtgagaactcattttgtttattggccttttatagcagaacaaatagaaagtaagagagtttaagtagtagacaatgtcaagattattactctaaattttctataagtaaataataaaaattattttgttatgatttatatatatctaattatattttactaactaaatataatagcacaaatattactttaatgaaacaaatcattcgcataatcatacttttagttacagaaatctaaataaaaataaaaaactaaattttaaataaaactaatatttacgtgtctcggcacgtaacttctaactagtaataataaaatatattattctaaacctaaacaacaaatacacggcaccctctcaaaatattaatttattttattattttattattacagccgcgaatctcaaatttttcaaataccctttgtgtggcagctctctgaaaatattaaactgttaaaacttttatcctctctcttaattacagccgcacaaattaagggtttcacacatatcttcttcttcctttcttctttacgggttaggttctagggttcttatgggttcaagttttctgctctcctctctcttaattacactgccagttttgacttttaactcaactaagagcctctttaattcctaccttaatatttactttaaaaaatacactaattatattttaaattgacatgtcatgtcatattatataaatgtgtgtagtaattaaaattaaaaaaggactatatattttattttgaaaattatgaattttcacgagatcttatacttatatatatacatatatttttgtcaaaaaaatatatctttatatatt

SEQ ID NO: 394485 - DNA, 517 bp, Cannabis indica
agagaagcacacgtgtcattattgttgtaaataaatataacattggcacataatttatttcgctaatccattacaatgcgccacattaatatagtattaaaaattatatggggccgagaaatgttaagggcattttatcgcgtcaaatactacaaaatgtgagatatcactattgacataaattattatgagtttttttacataatttaatttaataaataatataaacttgctaactaatcgcaacgtgctatatttatacagtgttggacaccttataattcttaataacaatgctctaataataactctaaaaaatgttaaaggataccttatagtcacaagcaccacaacatgagttatattgatattgatacatattattatcaagttctacacaatttggtttaataaattgatacttgcaccaaagtcattttaacatgtgtaattattacacatataactataataaaaaaaaagtggcgataaaagtactttattttacaattttatt

SEQ ID NO: 394486 - DNA, 1700 bp, Cannabis indica
tagatgtgatgagtacattacgaaactttggtacccaacatttcgtagaagctatttgtttagagttttttatgtatgtaaaatttctaattttagtttttaaagcaagttagtgggtattgtgtatatatggatggtataaatactatataagtggctttgatgagtccgtctctttctctctctccattataattgatgatatatatgttcgtccaaatcgtttaagctaaagtttggatatatatatatatatatgatatgatatgatatgatcacattatatagtgaatattatttattaactcaattttaatttcttccctcccacacagcccaactttattgactattatttaaatagtacagatagtgacaatacatatatacacacaataaattttatatttttatccatattgaagtaaaatgaaagtgacccacaacttgtgttgtggtgtcatttttttatatggaagttacactgtcacaaaatggtccaattagccatgttacaatatatgattggattgaattgtaagaaaaatcaggatccaatctaatcagctgtagagtaacctgaggtgttaatttcttaattacatcgagtttaataaaatcaattcattaaaagtgtcattatatagagatattaaataacaaagctttacgtgtaaacttaaggatgattattatggagttcggatttaatccgaatttaatgtcatttttataataagatttggaaatcataattgataagggaaaaataataagatataagaagatagaatataatattgtttgacattttataagttatattacaataattacaagtaatgtggctcacgcataagttaattaatttttaatatcattttattttttgcttagcttttgtttgtctggctaatattattatattatatatctatgcactatgcacatatataataataagaataatatatctataaatatatatttattgacaaaagggacaagttgaagagggttaagatgcatgttaacatgcatgattctttgatgaaaagaaacatatataaattatttaaattaaatatattatatttatataatatatggtgacacccaaaagcacatggatttgagatgtgaaatatatgtgagaaaaacaagggatacaataaattaaaaatatcaattataataaattagggaattaattaaggacttcgataagaatgaggcaagtgattattaatgtattatatattaattaaaaaaacaaattaaataaaccaattagagtaaagcatcgcaattctttattctaaattctaatcttatatactaattgcgaatgtcgagtttacggccatgaagtaagcaaagattttagagttttattttttatgtacataattccacaaccattgattgatttatttgtttttatatatggaaaataaataattatacatatatagtccaaaatttgtgactaatatatatatggctagagagaattatttgatgtgtaaagggacaagaatacttttcatatatatgtttcaattcattatgtgtaagagggacacaaatctataaattaaaaggttaaatattattttgaattttaatttataaaaattattaataagattttttattttgttaaataataataggaagtttttacattatatattaaa

SEQ ID NO: 394487 - DNA, 1088 bp, Cannabis indica
ttcttccctataaattaaagtgaagtcatttcactatttagagggataaaaagctagagaaaacaatcatggattgaagagagaaatactacaaaaatcattgtaagagctttcgagagagatcaagaacttcttgtttctcttcttataagttaatacaagtaaaaggggagtaggctattaccactatcattgggcaacctctataacaaactcggtgttctctttgctttatctttattattatcatttattaattatttctaattactttaattgactcattgtcattggactaaaagttacattttaatgcttacattgagagcctaaaatatcgtcttgatctcatcatatttttattctcaagctattagtgaatcaacccacaatggttgatgaatacatatttgtttataaatataatcaatttatgtgttaatattcttaaatttatttataaaattattgattagtgtgagtttaatgtatttttgatattttaaagactaatcatgcattggagtctttggagcgattttagcatattttggttaaaaattgtagaagtccgcaagctcggttttataagagggaacttaattacaaattttgatgacattagaagcagaactggacttggagctccatataaaatttgtagatctcgttcttaaaatttcacaacatcttgaatcatcgaattctgagttgtattgaagaagttatagccaaaatacaaatcatgtgacataaatttttcggcaagaagtcatggccccggtgaggaggtgatttctgggaaatttcaaaatttttatcttttttttttaaaagggagatatcttttattaagtaagatattttcaagcattataaataatacttttaggccagaacccaaaagctaccaaattgagatagaaacttagagagagagcaaggaagagacggagatcgcaactttgaagtgttcttcatcatagttcttttattctccttaaactcttattatttattatgattttaattataatgtctagtttcgagtaggttttttagttaagggttatttcaaaacccgagac

SEQ ID NO: 394488 - DNA, 835 bp, Cannabis indica
attatattatttattattacttattaaagaagtgtaaattatcactagactcaagcaaacaagtttttggtgttatgttcaagttgaactctacattaatgacttaatgagtaagcgcaacctcaataactaaacctaaattttcttaaattttcatgaaaaatatcaaaaaatatctttataaatttttaatactaatattttatggagaatcatttcctataatattttttaagtttttttttatttttacagtttaggttatctctatatgaatttgaattgcgatttaaattaccttgttaatttcttggtgaattgctatgtgaatttccgtaataataataaaagagctttgaaatgtatgaataaaaaaactcttatttccattggcatttctattttcttcagttgcctttagcattaaaatttcgtattttataattactaatttattatttaatcgatcaattaataaatgtggaataataaaatcgatatacgctaacaaatattctatagttacagatcaagattctgtaactacaaaccatcaaactagtaaagaattactaaagtgtagtaaattaaaaaatacaaagtttttatatgtggtgtcagcaattctcgcatattgctagtagtccataaagtacggcaaagagattagattcattagtaagatctcaaaaatagactctctctaattatatgtcgcaaacttgatgtattccaccttgaaaaatgaaccttgctgaaactccaaaaactctaactcccttcgatatgcttgaagagtcccaaagcaagacttgaaaaaccttgtatgcacttc

SEQ ID NO: 394489 - DNA, 733 bp, Cannabis indica
tatttcatatttcaatacctctctacattatttatttgtattccattggattctacaattttttttgctccatttttttcttcataacatatatattttttctttcttgatactttaagcgaggagagatgagaatgtgagttgtcgtttgccttgtcattaaggcagaatcaattgtcgtttttttgtaggagagtttatgaggaaggaagaaagctcaaacattagatttgcatgtacaagtggccataagtgggtgtgtgagtgttggaggtcctgggttcgagtcccaggtaaaacatgttagtaatatataaacgtttaaataaaaaaaaaaagatttgcatgtacaaaaacaaaaagtgctatttaacacatttaaatgacgaggtgttttataattaattagagatattttttaaaaattattgtcttgatatgatatccaaaaaaatacaattacaggtgcttttaacatttcttataaaaataaattaaaaaaatttaactaactaaacttttttaaatattattacaattgcacttaactttttaaaatcaaattttagtgggtaaaattttttaaattactgaattcttagtaaatttaaagtgtataaactgcttatgtctgcaaaggtcttctttctagtttgaacaatgttaattttcgttttgttaaacgatttgctaaccgtgttgctcatgctctcgctcgagaatcatggttata

SEQ ID NO: 394490 - DNA, 1228 bp, Cannabis indica
tatggataaatataatattacaacactaaatgatttctaagtttattaaaactaaagttgttttatttcggtatacatgcgtacaaaataattgaaaaaattgacagtattatttatattaatataaataagcccatttctgaaaataaaattaaaagtaggtatctttatgcaattaattcaaaaaataattgcaagttaaagttaatgaatcatatagtttattattatcatgaattttcacaaatctttcataatattttagttataactttttatctagaaatctgatttgaataaattaaatatattggaaagttaattaaacttctataattttgtgtgaaataatattttacatattctcaagagcaaaaatttagtcacatatttagttaattttgaaattttatatttattctaaattaaaagttatttgatttaattttagagagatatttctaaatatttattttatttgagttgttttcttctttctttttttcttttaaattttaaaatgatgacaaaatcattcaattaaaaatactattaaggtatttgataaaattacatttgaaaatactgtatggtaaaataataatattttttttactgacattatacgtgcaattaataatgttatttaaggaggagatatggagtacgaaggaggagacgaaggttattctaacgaaacctttatcattagagtttgctgattcacatgatgaatacaaggcccccaatctccttcaactcgttcttagtctattcaaaaatatacgacgaggatctgatttaatccaaatgcaggcaagtttaagtttatatatcattattatcattactatatattttgttaaaagataaattatgcctttatattttttaaaatgatacaaaataatactaacctcaattttcgtcatttttttaatataatagtgaacttaatttttagttgaataaaaaaaaataaagtaaacattctagttaatatttttagatcatgttatcagtgacgaagctagaaatttagttgagtgagagcttgaataaatatcaagtcaaaactaataaaaataataataaatgtatctttcaaattttcatcttcaacaaaataaaataatactattgacaaaaataaaataaaatattgtcaatggtattaatttattttttaataaagtattatttttttattatttgtattggactactt

SEQ ID NO: 394491 - DNA, 760 bp, Cannabis indica
ataaaatattttatcgcattaatataaagaataagtttatcaatcaaacatagtaaatcaataatataaatcactcgcatatagaatatataatactaattttagaatggacaatattaaaactatataacttataaatttaacattcataatagtctcatatcactacaagtatatgaacaaaatatctttaaggagtattattattttaatagaaatccaatattaataaattattataattttaattattttatgtaaataataattttatatgcattaaataaaaattgcaataaaaaattacaataaaaaaaattctaaaataatacttttttatattctaagatgttctagtttgaagctgccaccttgcttttgctgacgatgtcttattattttgtcatggggatttcatgagtgttttatacatgttgcaggctctaaaaacattctcgctcacatctggattatacccaaatgccagcaaaactaccatatactgtagtaacatccagcttggtgaagtgaaccacattatgcagatctcagggttcatcaggcaggagatgccattcacctatttgggtattccaatttgtgggaaaaagatctcaggaaaagaatgtgatatattagctgagagaatgactgctagaattagaagttggagttcaaggaatctttcctttgctgggaggatcactctaattaactcagttctcattgctatacaggcctactggagtcaaatgatgat

SEQ ID NO: 394492 - DNA, 562 bp, Cannabis indica
aaaatactattattgagaattcaaacccttgaccttaaaggtaaatgtatgatagcttaaacattacatcaaagctaataatatatcaatatatattaaatttaattataaatatatattgtaactaacaaaaatatatgtttacttttttctaaggagcgacttcgcttccgccaatacgtgaatccgcccattatcaatagtgtctagcactcatattaatattattgtaattaaagattaagtaacacataatttaattaaataattattataatattagtaattatttaccatatgtcacttttagataatgctagatagcaattatatatatatatatctatatatatataaaaataataataaaagctttacacaaataatataccatcaatgacttagatactagggggagagtaggtaagttactagatacttatatacatatgtggcgtttggtaacacttttttaatcagttttcttttttaaaagtaaaaaagtaaatatatttttcaaaaacatgttctataaaactgtttttacttttcaattttataa

SEQ ID NO: 394493 - DNA, 1046 bp, Cannabis indica
tatggccagcataggctggccaacctccagcaaatgaagggccagacagcctttatcctgacatgcacttggccaaccagcttggaccttagcaggcacttgatgtggagctttcatttgggacagcaacccaagttgcgaattgggcttcaataacccccaaaaataggggtaaatatcaactatttacctattcttgtgggatagctaacctatttattatatattattttattatgtaataacaaatactttataattcttattttttatggatattaggttattattctctcgtaagctctcctatataaagaacatcaacctaaacctaattcctctaagtctcaagcacccttattttaccccccaaaccttagtttccaacaaagcaacaaatccaatcttattcaatcaacaaacattcagtatggatttttgtttattgactttattcatgcccctaacatcccaactcataatattacaacactccatctagaagagaagtagatctaggaccactctcatccataggctcttgcaagaccttatagacatcactagttgaagcattcaagtcagcaccaacattacaatcatcactaatctgagttgtcattttattgattctgtttctttggggagtaatctattgaccaccattgtttgagctctgatgcacaagcagtttttcaacctttgtaccaatatcatcaaccatctcgatcttttgctccatcagaccaatttcttctaatgccctttcttcaagcctccgttaggcatactcccacgaacttatggctcttatacatgggtacatcactctagttgtttcttggattgacgattgaccctacaaacaaccacgagtgtttccaacgtgctttatcctcacttgcacgctttcttggtaaacttctcaagaggtcacccatcctaaggttattccaagtcaagcacacttaactttagatgtaacacgctaactatattaggcatgttaacgtgatttttaactaattgtgcagctcgttgctaat

SEQ ID NO: 394494 - DNA, 1121 bp, Cannabis indica
aaataaatatataaataaatagagacaaatatatatgtactatgtgtttttttactcattttctgtttaataaaagcctccactctacatcgctcttgatgcaatctggttttagtgcttgttgtttattatcaattttagcattgataatatgtttgacaagtctaaattttgaggctctctatagatcaaccattatttaaaagtattttttttttccccaaatcacgatgtaaatcatatttggcctataataagatataaatgttaaaactacacataatatatttaggaagtaagttatctaaaatcaacggttacctaaatagaggcccaaaaaatatctctcatcattggtgtcattttactacaattagatagagtgtaaggaacaatctcccttacaagaataccaacaaaagatgcaaattgtactgaatcatcacgaattggttgcccattcacgttctaattaatttttatcaaatgaccatttcttccagtaagattagctagcatagttctgcatctagccttcttggtgatcatctctaattcttcatctgcactactatcctgaggtattgcatccaactgattttgaattgcaacacttgtattttgtaatcgagctgattgtctacacgtgtctaatttttgttgagtcgcaataggagaatcagttatactttagttggttggagcctctactacttcaagagaatcaattagaatcatgagaataacaaatgctattttctatttttaaaaaataatttacttttgctcatattttttctccactttatctcacattattttctctctcaccactttctctctctttctctctctctctctctctctctcataattttatcacattattttatttctcatcactttctctctcttatcatttttttcacattatttgctatgccatcattttctctctcgccactttctctttcatcacttttcttctcgccactttctttttcatcactttctctctcatcaaggttggggtttgaggttagggttcaggttcggatctaggtcaggagttgggatcggtgtttgggtttaatgccaggtttcaagttcgggtttgggtc

SEQ ID NO: 394495 - DNA, 511 bp, Cannabis indica
tgcatagtggagaaggggatgagaaatggtgtgctcgagaggtaaataaactcaagattaatgtggatgcggcaacatttgcggatagaaacaagtttggttatggttaggttctccgtgattctaggggtcatgtcttgcaggcgagaacgagatcttggaataagtgtgtcaatctggccctagctgaggcttttggtgtaaaagaggtgctaagttggataaaggagtccaagctttctcatgtcactgtagaatcggatagcctcttaactgttcaagatgtccgtagctcggtgaacatgaattctcctttcagctgctgcattactgaatgcaagagaattatttcagatttgaatcatgtttgtttacgctttgttaaacgttctgctaaccgtgtggctcatggttttgcccgagtctcatggttatatgatgagcgtagttattcagttgacactgttccgaataacattagtgatgtaattatgcaagaattattttaaat

SEQ ID NO: 394496 - DNA, 850 bp, Cannabis indica
aataggtagaccaataaaattttagttactttgtaacataacaaagtcgaccgaaggattatagagcaaaaagattgtaaaaattgagaagtataaacataatttttccaataaccccataccaaactcaaaatttttaggaagttttaaccgtaaattaccctatattcgacatatgcatacatacaaaaagaaaaaaaagaaaaaattcatgttgtgctaaaaattttcagaatttacgtagtcctaattaattatgatatgacgtatgctcatcatataaatcattagagttaatatctccatgtactaacaaaaaggatttctctgtacctaaacaaaaaattaagggaccatgagcttctaaactgtcgaatattatcatgaggattcgaaacctaatgctgttaattcatatgtcgtagtggattagatagtgctctttaattccaacaaaagatttcgtataatatagtctgcgtgactggaataatgttgtggtctacttatgcgttcagtttcccacgtgatatatcaatatcatatataatgtacttgatttggtggattctaatcctttaattgtttcacaatttcaattagtaaacgaccacgtttcttaaataataataataataaactccaaatgcaagtataatttgtaatcgaagttcaccaaccaatttcaggtccaaaaaagaaagaagagaagcaataaagtggaacgtggtcattattgaaggtgagagtgaagtggaagtatagtatcaacctatagaaccccagaagagaggcatgcattgcagaggtattaatatatatatatataattctatgtatatatatatat

SEQ ID NO: 394497 - DNA, 839 bp, Cannabis indica
tatgttagctagtgtgagaatttgacatatatacatacatagtgaattgatgtatttgtataaagatgatcctaaatgttaattatgagtatgtcggattataaaagtataatatatattgattttctaaatcgatagtataatttaatgaaaataaaattaattcagccataaaaaaaaacaaattataagagaaaacaaatatgatcgggagagttctatcttatataatagtcaaataataataaaattgtataatcatcaagattctttttcttttcatatggaaattacgtacataacttaaaacacaaatatgtaattctattttatattttacctttaagggtaaaatagtgaaggattatcatataccaatatgacacttttatattagtaaaaaataatagtatttgtttcctaaacaaaattttgaattagaagacatatgaaaaactttaaacgacaatccagtgcagcttgccctatttttgagtcggccctagattaaacgggcacaacaacctccttaaatccaagctaatgtataataaatcatgatatcatcatttaaaatatattttagggataagttgagaaatatctcttttttatatccattaatcaaaaataatcttatattttatttcattaaaatctacccacttttatgagtgagttgtctaatatattgttaccttccactgaagtgtagcacacgatttacatttataaaaggggtataataggtacatcatctataaaagtgggtatatctcaaagaatatggaaatgaaaggtaaaaaattaaaacaaataaagtaaagtggatatacaat

SEQ ID NO: 394498 - DNA, 879 bp, Cannabis indica
caaactgagttgtgtattcagtaccactcctattttctttttgggtcaaccgagtaaattcctttctttttacacttctcactgattcattatagtacttcacattaaacagctcctcaaacttttctcaggtcattggtaacatcacaagttagagacaccatgtcccactaaacaaatcttcttgaaacaggtttgtggcataggccactctatcattgtcattgacgcccatgaattcaaaagtcttataataacagtcagccactgctcgactttcattacatcgaaacctcccaaaaaaactggaggtgcttgcttgcggaacctttcatacagtggttccatacggttcactgcaataactggttttgtctgcacatcaggggcaagagctacctgcatttctggagcagggatcacaggagcaccctattatcttaagtgcttgatttcttcagcttgctcattaattttggcttgcatttctgcaaagctattttcccattcttgggcagcctacagcgggttaacatcacccggaccgcgtgccctgcctctagggcctctgcctctgccacaacatttacgggaatctgaactccttcactgccactgaatccgaccgcgttacactgagtcttgttgtttcgcctagcgtccatactactagactaacttttgtaaccaagagctagtctggtcagatcgcgatcaagaagaacttactgattattgcttattttggaaatttaaaacatacacctattcagctattaggctactaacatgcttcctatcaggcttctcttaaatcatactattaaaatagactactaaagcaataaaggcttactgaaccgtgaaacgagctaactg

SEQ ID NO: 394499 - DNA, 1514 bp, Cannabis indica
gaatgtgaatctatagtagagaagatggtgtaaagaattcgtagttggggctctagggttcttttctttgctgcccaaattacgctgatcaactcaattttgttaacaatactttctaagagcatctccaatagagtgccagaaaagtggtgtattgctatattttagcacacctaaaaaaaactatactccaatggtgttctaaaaagtgtgctaaatttggcatatgctaaaagttgtgctaaatttggcacaagatataacattgagccaaatttagcccacaataaatgctactttttttatttactataataccactaattattgttattcattgacttttactaaactttatttactttatttaccataataccattatttaaataatgaaagaataaaaaatactaaattttgcatattctcaataaaatatgaaatgaccatcaatataatcaattattttttttcttattttacattttgtgcattggaacacaattgtaaatagtgggctaaatataacacaaacttattttttgtgccaaatttagcacaaattttagatcttccattgaagatggtcttactgtgcacaaattatgattctaaccaaagttgtcctaaaaacaataaatgttatctacatgtcctttttgtcgaaaagttcggtagaatccaactgccccggttatgtatcatgggatcatcattgcaagccaaaaacagagggaggccttggtatgaggaatacaatgctatagaatgaagcaaccttagggaaatatgtttgggacatagctaccaagcaagataccttgtgggtaagatgacttcatgcggtatacttaaaaaaatcaaattggtgggactatcgctcaactttagatggaagctggtattggagacaaatagtgaatataacaccctgactcttagagatgccacgtgtgtgcttttataaacttattattactaatctataaactttggaaaagtgtgatttaattaaaacctttaattagattcaaaataaagacttttatttaaatattgtcgtaatatggggatcccctgctaataaaattcttttataactaattacaaattcgttagtacgagaataggttatacaaccaatcatagaaaatagttgatcctgcttctcgaaagccaagacaacatgtttgatatgtacactactgggagacctctgactcatggtcgaatagaactgctaatcttcttacctgcaccatgaagcacccgtgagtcatagtgactcagcaagaaaagctactagataaagaaaatcatggaaagtgatagcagattttagtaccacagattatacataccaagaggtcattctctttgaacgtacatatacaattcaacgtctatacgagcaaacttgttacaaaattaagagtatttatagttatacataatcaacaacctcagtgtttcattaaacattctaatcatacattattataaacacttacttt

SEQ ID NO: 394500 - DNA, 1133 bp, Cannabis indica
aaaaaaaaaatgtatttggtgcggatggaggatctgcccgagaaaacatggccctggacgctgcacgcagcctttccacgtgcggataggggaattcggacaaccccgtgcgtgcttctttggacacgcagctgaccgagtggaactcgatgtcctcgcgtgtgtgtggtgtacaagatttcttatttttttttcaaattttcaaaaaatcataactaattcaaataaaattgaaattgtattctgtaaaaaaaaatgaattgcttaatttttcaaaaaatatccaaaaaaaataattctagaacgaaaattttattattttttataataatttcgcaaacatcaatcatcaaataacacacaaattaacatgaaaccatccaaatcacacataaatcattttaagtccaaatttcttgaaagtaaatcaattaccatagctctgataccagttgttggaattcttttaccaagatatagatctactaacaagtttgttattaacatcttaaatatgaacttctaaaacgatatgaaataaacacatataaagtattaggaaccttacagtggttgcagcggaatataatgtctccttccactaagattcactctttcactataggcttcggtttagaagagaggaagacatagagagagaggtttcagctagggtagtgagaagaggcttgaagtttttgatgaaggaataagatgcatcatgttttcccttaagcaatcactacctatttataggaaaccacttagggttaggtttgatttaattagcattaaaataatagaaaaataaagtgacaaatcaatccctagtggccggccatggatggtattgggccccactttgtaattttgccattttgtcaattttccaacttatttctcaaaatgctaattttccaatttaaccacttaaatggcaattctaattatttaatacctaaatattaattattaaataatattatcatttaatatatttattaataagacttgtcaaagtctcttaattgacaaattaaccctagaaactctttcttcacaatatagcccttgcttagtgaaatttcataaactagacgtactctaactttgaaattataattgattaatca

SEQ ID NO: 394501 - DNA, 1119 bp, Cannabis indica
atatatatgtatatatatgtatatatatatatgtacttacgcttccatttcctggatttgacgttgggtgtgacgatgataacgtttcctttttgatttttgagttggatctagttcatcatctccagatggatcagcttccatgattaattcagtacctgatttagtctcaagatcatcgtctctcatgttggcccccaaacccaactgatcactttcagaaatgcttttattgtggcttatatccattaagtgatgatgatgatgatgcgtggtttcaaacatatttggctgaaacattttcttccaccaaattccaaatctcttagctatagccttgactctatattattatattatgatgatgattctgcagccaacaaaaacctatgcatttttctagttagagtagaactatagttaattttatggatcttaaaaaatattgatgatagagaacttataaatttaaagagagtacaagaaaggactaataaaatgatatgttatgcttttaatgagataattattatctgtattccactgtgtaattaataacatgtatcaaagtcttctccaaccccaccctactcacattcattctatcgagaaaatgatttatttatttttttagggtgagaagggttttacaacttgaatcatttaattgattagatcccttattataaaaaaactcatttctatatactatgtaatatttatgagaaactataatgataaatacacatagaattaaaccttcatggatttcccaatgaaatcccaccccaccgccataaacccacaacaattaccaaaaagaaaaattaactgacctgataaacgaactagctactcagtcgcctgcgaagttgaccagaatcaattaatacggcaaataatactactgtcttccgacgaatgatgatcgaactggaaacattttttcttagtggtaaagactatagacatatgtatataaacagtctcctacaaaccctagacgataaattcatttctatagaaactcagtcgtacttggggttttttttttaaaaaaaaaatgttggccagctggaagagaaattttgttttgggtttgggtttaggttttggttt

SEQ ID NO: 394502 - DNA, 707 bp, Cannabis indica
tacattagtaggaaatattagcggcgggaccgtcctatgtcaatttcgaatattgaaactgacacagggcattagcggcaggaccctgccgctaataatattaatagtgacggaaccgtattcggcagctaataatattattagcggctatttaatagcggcggactattagcgagagatttccgccactaatagcctataacgacataattggagtatattaactgtggagtagttcgccgctaattatagtaataattattacacaaatttgttaaagttaaattaaatttatatatatgcaaaatttaacagaaattttacacatctggaagatggtctacaaaaataaatttggcataaagaagtttacatcaaataaaataccgcggcaacggcaaaatgatattatcatcaattaattacttatttaaatcatattattatctattcctacatatatattcagccaaatcactagtcaaaatattggtttatctaagccttacagaaatatatatacatttatatatttatataaaatcatatcacgcttatattatatgtttgtttatatttgatacaatatttattattatattttgtgaagtaaattagtaaaagaaaaaccaaattattattaagataaatagtggtataagtacccaaagttttaggtttgtaagtggcataaacccaatgatttt

SEQ ID NO: 394503 - DNA, 715 bp, Cannabis indica
tattcttatatttatattgtattataattggttatcataaggtattcaaaacatgttgtgcattgggagtagttagtggttttaatactatttattaaattaaaatagtgagacttaatattaaatttcactaataataatatctcgttttgataaatattaaacttctttataatctgttgtattttgttattccgaacgtttagtacaggttgttagtttcttgtccacttgtattctgttttgaaagagtaaaaatgaaatttttttctatatcgacatatttttgtaatttttttttcaagtttttaatttattatgtaaatttttctaaatttaatattatttttataaatttttaattttttataattacaccaaccatattaaattacccaaacacgtgcaagtgttcttcttttaatcggaaatactttttcttaataaaaacaattcaccaaattatcactataaataattatatattacataggtcatttaataagtaaaaataaaatttatagtgattacaattattaatatttacaatttattttttgtttaattttttttttttgaaaggaaaatcttcattaaacacaaaatcaaacaggattaggcatgtcaagaaaaatttcttgacgtgcacacaagggatcaaccccaatccacatggcactagctttgttaagtaaagcataattggctaatacat

SEQ ID NO: 394504 - DNA, 1376 bp, Cannabis indica
gattttcaattaaaaaattgaaaagtaaaaacagttttatagaacatgtttttgaaaaatattttcactttttcaattttaaaaacagaaaactgattaaaaaagtgttaccaaacggcacctaaatcattaaaaaagtgttaccaaacggcacctaaatcatttgattctttcttataatgatcaagtcttgtcatttttaactctagcctacctcctatgtaaattaaattatacaccataaaagcagaatcgatatcaaatgaaagaacaccagataataaattttaatattttttccataactaaacaaaaaaaaagagacattaacacacattgttcaagatttcgattaataatcatgctacagagtgaaaaaataaggacaaatattaaaaacccacatctatatttctgctcaaaaacattgaaacaactaccagaaaatggcaaagagatagatagcaaaaatatcattaaaatatgtcaaccacattttctgtgttgatcatcatcaaaccgtgctctatctgactttcacacgctcatctcagctggggaattacacatgagatagcaccagcaagtgtaaagcaaattcatctatttcttgtttgacataacaacacaaatttaagtttcctcaaacattcaattttcatccttttggaatatataacataatcttattatcaaaataactaagtttatatgttttgtaggccaactcttccaaatcttagttctaaagttatgtctatattagatgaaaaaaaaaatcatgtaccctgccaaacaactcaaggacgttatttcaaggaaacacattcatgaattcattttttaaaagaaaatattccacaaacacaaaataaaataccttcatagcagcagcaaattctccaaaaccaacatacccttgtctcttcgaatctacaaccgcccaaaccataaagatagaaaaaagtgtggtcaataatgtaaggacataatagtactaaaacacccaatagtaactacattaacaaaccaaactttttttcattattgggttgaaagaattatctcaactcaatagtacaaataacaatagaacatgaaatttgctatttttcaattaataacaccatggtatcaactatcattctattgtaataagtttaattaaaaagaaataaccattccaaagcagtgtaatcattataaaatttattatattaattcggctaaaatacttacctgaacaataaaagtgataacccttttaaaaaaaatgataactaagaattaaccaaattcatattaaatgtcaaaacctaaaaacaaaacgaccccaaaaaaaatgggaaatttttatatatatacattatatacat

SEQ ID NO: 394505 - DNA, 1176 bp, Cannabis indica
  modified_base (52)..(52): a, c, t, g, unknown or other
agaacaaaaaaacaaaaggtcaataactagtaagtaaaataaaattacaagngcaagcaccagtctattacacaaactaaattaaaaactaataaagagtttagcagcaagtaaaaatggacagggactttaaaatttaagaccagtcttatattatagaaagttttagaaaatatttaatagcatataaaagtgacatgagggcataaaatcaacaaaagttaatacttggacattagttttaaattattttgattctatgttgaaattaattatttcagttagagaaataatcatggtgccttatataatttaatatgaatctttcttactttatcgtaaccatttatataaggcattgccttataataacggtggccatcataataaataacaatgttcttttagttaaaactaaaatataggaaaaagatttttagttgggagagtcaatttttgtatgaaatccagaagctttcataatattggacaagttcgggtttgggatgttgctcatgattctaatggctgtctgaagttgcagaaataattaagatcaaggaaattttaaattggataaagagaaaacaataggctaatgtcataattgagactaatgagttggtagtggttcaagttataaaaaactctattattatgcctttccagtttaaataattagctcgagattgtcgcattttaattttttttttaaataatatgtctttaacttttattaaaggatctacaaataaaatcactcattatattgctagaagacctcatttagtgagcttcatgctccttttgatctttaaaccattgttactactgattgtctttgaataaaaaccaaaccatctttgattagaaaaaaaaaaccaaaatataggaccaaaaacacaactaattagaggaatcattaaatccctctcgtaaaacaccaacacagacgtcagagcttcaattatgttttgacttttctttgctaaagaggaaaatcttttattaaattttgttttattcagctatcagtcaagatgacaaacctaaggattaacttaagagaatccaattatctccaaataataaaccaaaaggccagaagactaatttgccatttacttcactactaaaaaatctaaaaatctagagataaatagttcaattcataat

SEQ ID NO: 394506 - DNA, 949 bp, Cannabis indica
tctcagcagatgactatataccaatctggagcttccattgaccacaggcagaaaactgcccatttctaggtattgttgataaacattgaactgtcgctctcttgatcttcactcagtttgccctcattttatttatttgtcctaagaaaagaaaagtctttcacattaaggctttgacattttattatatagagatgtcgcagtactgtttgtcagtgtcagcttagcatgttccattggctgcttccactacagatgatatgggtcaggagactgaaactatatatgatcccctatagctagctgcttttaattaatttaatgttatatatatttatataaccaagctgattaaattgacaaagagaactacataaagggattttacaccatatcacatagctaaccacatctgcctttcatcaccaataaatgttttatgatatgtataggtacaagacaattcgtggagatatatataaatgtatatacgaggtgtaaagcacattcaaggttcaaggtatgtgttagtgtttttattttattattattttaattaatgacaaaaatatattggattaaaatcttagtttatatgtattagtgtattattatttaaagtgtgattattttagtaattataggttattaggtaagaaattatcatgtgctaaatatttctaatttattaaagggttacattaatacttaaaattaataacctatcggtgagattatagtggtctccacgaaacaagagtaattcctccatcaagagagaaaattagaaaattttaagtcttatttattggaagattattacctaaaatcactataaagatcacttctacaagatagattaaggggttgaagatagattaaggggttgagatgcaaaatgaacctaaatttggaaactaagttaataaatgtccattttttaaaaaaa

SEQ ID NO: 394507 - DNA, 597 bp, Cannabis indica
cagtaccatccaaatgatccaacaaggaataaacttttcaatgttagaagtaaaagccacggagtagaaatattaatataaaatacagttcaatagcaaaataattaagtacaaaaattacgtaggaaattgatcaaataaagttacaacgagaaaattacaactaaatagaagaaaaacaactccatacttgaaaatacaaatgaaagatgaacataaatatataaataacaagaataaagagaaaagatgaaaaaccaagccctacacaaacacaatcttaagtggaaatcaccgaaatttaacaaggttgaacccttttgtctaaatatcttatttttccttcctctaagcactaaataaaagtagttttggtaattatcaactcttttggtagttttttagtaagtgattagttgataaaaaaaaagtgtcaaacaagagaactttaacacctattgatagcatttaagagtcacactttgtaattcacatcacacaccccataattggtacgatgccttcaataaggtagcgttcggtttgaatgaatgaaagcatatgaataagaatgagaataggaataagaataagaat

SEQ ID NO: 394508 - DNA, 1000 bp, Cannabis indica
aaaaaaaaaaatatatatattacgtgtaattttagaatatgctacaagggctgtttttgttagttttattattattttgatttatgaaggggcaaagtagtttattttttattattatttttgaggtaaacaagtagtttacttttaggtttacttttatttattttattttttttttgaactacttttatttattattttcatttctattactcaaccttatttatttgttatttttatataagatgacgtagaacttcaaaatatatgaaatcgctttgctctctctctctctctatatgtattggaaaaattaattgaaaaaatatactttcccaatgtagaaaaaaatgagtaatttatggtatttataattaattacacgaatattagaaaaaaaattataacaattctgtagttgtttgtaataattttttatttagtttataaatattatttttaaaattaaaccccttaacatatatgatcttaataagaaatgacagtaaaaatattttgtcttataattttattgtcatcctacttaagtgtcaattaagctaataaatgtcaactaaaaaatatgtgaccacatattaaataatttttatttatcttttttaaaataaaaatatataaatttgaatagcaaaacaaattaatttttctttaattaaataaatagaagttttttttaagagaaaaacataaaagttttttttgtttatttaatatgtggtcaaataatatgttgtcacgtatttttgagttgatactagtacaagaaatattatttttgccaacgcattttgtaaactgcattggcaaaaatatcaaaattttaccaacacacatttatagtagcaaaactctaacttttaccagcgcgcatttacgtgctaggaagagtcatttttgctagcacttttcattttgcactgacaaaagttctaataccaacgttgatttgccaaccccttttgccaacacatcaaaagta

SEQ ID NO: 394509 - DNA, 1271 bp, Cannabis indica
aaaatactagtttattggaatttttagtatttttacgtattttttgtatttttattttacagaaaattacgattctttttattttgtactcttattatttgttgttgtattttttatatttgtatgttatttttgttgttgttttgatgttatttagatgttgttttcatgttacttttatgttaattttttgttatttcgtgtttttctatgaaaaaccgtaaatagtaaaaaaaaaaattataaatgtaaaatataatttttttacgaaagtagtgccttatataattacaaatatataattacatgatatatattaatttaacttatttaagcttttatatatgagtcctcactgaagtttgctcatatctaatttgagaagataacataataaattatactactaaaatttaacatcacatttaaaaaataattaactaccttttttttaagtaaatatgtaatactctctttaacattcttatgaaagtcatgttgattcaatttttattcaagccttttagtaaaaaaaaaaaaaaaaattacaagcccacactgatctgaatttctagctccttcattgactacaccatcggtgttcattttttctatataatattactatatgatgtttaataaatttttaatatatattaggaaaattttatagtataccactaaaagatgcatcgatacacccttatttgttttgacatctatgaaaatattttagtctattttttatggttgtatacgttgtagttttttaagacatcttgtaaatttttttgatgaaatctgaaaaatttataacataccgaaaataaaggtatctcttttattttatacgcatgtttttttgctgggtatttttataagcatgttaaataaattgtttgaacactattttttttatattgtcacttattttgaattttttaaaattttgtaaaatatcttaaataattacaacatacacgactataaaaaaaaactagactaaaaaattattgtagatgccaaaacaataaaagtacatcaacactgtaataacttctatatattattatttatatgtttataaagtttaaaaattaacttattttatttaaaaaataatataataatagaaaatattttttttagactatgatattatattttgtaatagcacactaccaaattttatgctttagatacaagggtaaatactattttagactctgtgttttgcaaaagttatagattggaccctgtgttttgttaaa

SEQ ID NO: 394510 - DNA, 1007 bp, Cannabis indica
tataattatatgtatattaattgctttttatatattatatacaaaacataattattgatataggggaattttagtataagttgcttatttaaacaaattgaactaatcacaagcttaagaaaatagagtgtgcataaattttatgaaaccataacaggagattattttattatttaattgatttatttaatttttttctgctaactatttaattagatgcttcattctaccgttaaaatcaatccaaatcttcccctccttgtaattgatcagcaaacacatatatgtaatatgcttatattgggagaacgagataaaaaaaagacttttgagagaataagaaaatgcaaaaactcaactcaaagaaagtgaggcttagaggtatagaattataatgggataagccattacataaatttgtaacacaaaggggaccacacaaaacttttacacaaaagggttaaaaatttataacagaaaaaggaaacgtgccttaggcacagttgtacaagagcagcaataacaggggatacaagaaaaggattaggaagttaaaacacagttaatcaaagatcatagtttcttaacaccacccctcaagcgagaaggggatgttgtaaccctgagcttgtcaactaaatactgtaattgtgaatgagatagacccttttgaattagggtacatatcgaatatttgttttcttctatagaactctatcacaaacaaaatgaatgtccaactctatgtgtttggtacgagcatggtagacaggataagaggctagagcactagcactggtgttgttacaccaaatgactggtattgaaggaggagtgaactgcatttcttggagaagagattcaagccatatgatttcagcagaaacctgagcaagagctctatactctgacttagtacttgatcgtgacacaactatttatttcttggactgccaagacacaagagtttcaccaaagtaaacacaataactgttggatatttattt

SEQ ID NO: 394511 - DNA, 527 bp, Cannabis indica
tatgtttgaaattatattttaattatgtggtggtatgaagataatttaggtacaatattcataaaataaaatatatatttaaattaaattttatttaaaaataaattcaattaatgtataaaaaaatatattctttatcaagtaaaactcgaaaacaagtttttgagataaaataatacttatgtataatgcgaaacacaattgtattgataggggcgagactagatgtccaaaagaattcatccttgaattcagtcttattgggcaacctttaaatgatcattttatcattagtgtgggtcctgaaaatagtagaaatacttgctcctcgcttcattgcgggacaggccttcatagaatagaaatacaaaatttctagtggggttggacactcccacttcaaaatatggtacaaaactttaaagctggccaatgccgaggtaattgcagaattctttgtagtagtctttgagagggagtactgccctagctcttatgtgttcaggaggaaaacaactgaattctcc

SEQ ID NO: 394512 - DNA, 1180 bp, Cannabis indica
  modified_base (557)..(557): a, c, t, g, unknown or other
gatttatatttttttgttgtttacataataacaataataaaaaaataaatgataaagttaaggaaattctacggtgaaagggtgcagcgatgcatcctctttgtatgtatgatatttagatagttttaatcttaattttttatatgacaatatgcatcgtagttatttaaaacttcttgcaaagttttaaaaaattataataatttaacgcgttaaaaatatggttcaagtagtctgttacacatgtaaaatttgtaccaaatataacacaattgttacatatctacatattgaccaaagtttgtagaagagtgtgactaggtcggtagtgctttaggcagataataatcctggtttgctgagcttttaaaactgttttgggtttctacagctctaaaagcactttattattggttggataataagtgaatttcagcttttggcctctaaaaaagctcttttaacacttagtagctacaaagtcataaacatcataataagatttgggtaattagataaatattatgtttagtatgatttatatatatataaaaaanaaaaaaaaaaaacttgtgtgtttgtctcacattgctcatttgtgaggaatgtgtatttatattaggtttagagcactcccaacaacttatttactttattctttaaaatatctcacaataattttattttttttttattttacctcacacatttacattacaccataaatcactttttcaatattttttttctagcatttaaatattatattttaaatatattttattaattaaagtaaaaaaggacaaaaaagagtagaaaagtaattaaataaaagaatatgagagaaaaataaataatatatagtatttttgtctcaccactacttggagcactcacattaggtgagtaaatttgaactattatagctaattctctaaaatataaagaaaaataaataaaagtagtttttcatcaaataaacaaaaattgaactataatacaatttttttagctcatgaaaaatactttttagtaaagaagcactattcattgagctataaatattatattagttttatttaaacttttttcaatataggtgtgtgatattattatactaatttatttgacttttaaaagataatataatatattataaatataatatttaaatgatata

SEQ ID NO: 394513 - DNA, 1241 bp, Cannabis indica
attatttttccaatctccctccaaactccaaagcctaaaatttcaaacaacataatctttgtctcttatgtaaacacattttaatattttataccaaaaatacattaattatcaccagctgtaatcatcttctcaaccgtttcagtctcatcgcaacaaaccaacggtcaagatcacccctcagaaatagtaacaccaataaaaaaataagctgactaacacacaatcattaaccttctttcatataatcccttcgcttttttaacaaaccaaacagagactgagaaaggttttacacacacacagaaagagagaatagaatgtcttggtcagcattccgatctacgatattccggtggccggattcaatggcttcgaggtgggatcttctgggaggaaactcgaaccggcaatggcaactcctccgtggttgggacgcgctaacgatcgttgatgatgtcgtttggaaagtaattatggcggttgagtctgtggccttagcttctatgctctgcttcttcttcctcttctgcggttgtactctgtgattcgattctccgatcgaaattcgaaaccctcctaaccttgaatttccggcgcggagattcctatggtgaccggcatactggcgttcgattaactcagatggttttcttctcttgtcttggttggtttgttatgggtctgtgattttgacacgtgttaaattttcaatatgggcctggcaactgttcagttgggcccaatgggtaattagcttgtactagaagtaaaagtattttgtcgtttgtgacgatgacttttttgagttttgttatttatttatttttattttattttagataaaatttattttagtcgagtgattgagaaatggttcccatgctaatttattaaaaaaaagaaatccaagtgtggtgctaagattaaattatggtaaaatctttaatattttcactttgtttgcacttaatttaaatttataatttttacaaattatggtaaaatctttaataatttataatttttattcaaatttagctattaaatgtcatgttaaattattcacatatacacaatgtattcaattttattagttcgtgtaaattttttataaaaaaaattaaaataaaatttaaaaataagtaaattttttttgagaaattatcctatatactgtttttctaattttttttttttttaaaaaaaaaatttacggtttgtgtttctaaagtggttgc

SEQ ID NO: 394514 - DNA, 541 bp, Cannabis indica
aacttactctgccagttagggagctgcggtcctgtcgaggcgatggagtgaggaggggttcatggactcacggagaagagcggaagctgagagagagaaaccctaattaggagatgtaatcaagaatttcagaaatggtgaagagaagaaagatgaagatggaaaatactgacctagcgaaggaagataggttggttcttccgaaatggtctgagctgagctgatgctcttaattttttttctttctacaataattatggttgaactaactactaacagtaacaaccatctaaattctaatcctatatcataattatggtctcagaatttgttactttaatatttttataatcttctacgttttaataatataagacattttttaaatgtaagagatataaaaaaaattcagcatccaaaaataaagtttaaacagtatattacacatgatatttttttattttatacatatattaaagttttttaaattttttaaaattttacaaaatatcattgttgaccgagattttcggcaactatt

SEQ ID NO: 394515 - DNA, 1286 bp, Cannabis indica
tcggaatctacatagtcactaggaaaattaccaagaccagttcttggtaattttctaatgattttttcgaggacaatgccaattctgatgacttttatgacttcagtagcaactccgacgactttttcgacaccggtagctactccggcgacttttctagtactgacagcaaactctgaaaaatttgttggaattggcattatccccagaaaaattaccagaaaaatcaccaagaaactggtttcttcatcaagaactccgatgataataccaattctgatgacttttcttggtattttttcggtgatttttcgggcgatgataccaattttgatgacttttccaacgccgacaataactccagtgacttttttggcgccgacagcaaactccggttcattttccagtaccggtgacaactccggcgatcactatagtttcaattaatttatttttttaaaaaaatatatgaagagaattttaatatctttcacggtaattcaatctcatatatgttaagtttttattttaaataccatattttttcctattaagtttccttacaatatttatctaaactatctttatttttctatatttatgaaattaccccatgaataaagccacgtaaagcccaagtagagtgttcacctcatttgaaatttaactcgattcttagttatttagagcttatacctgaatattttttttacctttatacaaatattaatgtaggtaaatattattcaactgtattgtttggtgtagtagttgttagggtatcaacctaagttcaacatcagaagaataagagttggcttgaatgtaaatattacacttactccattagtatgaggcctaatgggaaggtgccaaaaaaagtgaaggcttagcccaaagcgaaaaatatcatactaatgtaagagttaaagtgagactacaacccaactaatggtatcagagccaaacgttcaagagtgttgtgatagtggactgcataatgtgatgacttcacgattgaaaatctgtatggttccttgtatcgaatgtctaccttatattgaggtggccaggcagcgtgtcttattgatgattacgactgtacaatatggatattgatttttaggacttgtgtcaaaagtcttcctcacaaagttgatggtcaagcggcgagttatgttggtgatagcaacgagaaaaggttgttccactggaggggaggtcgcgagtacatggttcttggtttgaggggagagttgttggggtatctgttgggttttatgccc

SEQ ID NO: 394516 - DNA, 828 bp, Cannabis indica
gaaccctcaagaacaaggagtgtgcaacctcagttcttctttagttggcatcaaacaattgataaaaattaaaactaaataatattaaattacaaaattttaggattgttgctattaacttttgcaatatgtaattaatttatagttagtttttatgatacgtacctagaatataagttttaggatcatttctagctattaaaatttttggtatttatgtaattagttaatagttaattttattgttatcgatcatacaattgattattaattttatatgagttttataaacattattttaactttttttgtaatatgtatatactattatataaaattatcttaaaatttgaaaatacaggtagggaaaattgcatgaaaatttgcaatttcctcttatatacatttatgcttcatgttataactgacgcaatagataaaatagaaattatttaacaatttatgtgtcattttataactgacgatataagtttttagtgtcagttttgaaatggcacaaacgaatttgcgtcctttctaaaccgtcgcaaaaggtaaaaaagaatagagtatattttgcgtcggtttttaaatgaagagaattattttttgtgtcatttaaaaaacgacgctaatagaaaactatttgcgtctatggtatatacgtcggtttaaaaaaccgacgcaaaatcttttaataacacttaaaaaccgacgggaattgcattttttgtagtagtgggcataaatatttaagtttaactctcacgattgtagataaatatataagtttaatttttgacagtaataatacttaaattatatata

SEQ ID NO: 394517 - DNA, 1001 bp, Cannabis indica
gaactttgtccttaagaaaagcagaagaatgatactttgatcgagtaagacattggggcaaacctaagtatttgctaatgaaaggcctatcttcaagatcaaaagtggtgtagaaaagatttctattatcctgaggggtattaggagaaaataaaacagaggatttagcaaatttaatagcctgaccagaggcctggatatagagctgaaaaatactcctaagggagctacaagaatccctattagtagagcaaaaaataagactgtcatcaacaaaaaagagatgggaaatagaaggagccctcctaaaaatggctataccctttagaagaccttcagattgatgagcacgaatgagggatgacaaaccttcagcataaagaagaaagagatagggtgatagaggatccccctgtctcaggcctcgagagggtttaaccgaccctttaacagtaccattaatcaaaaaagaaaggctggaggtggtcacacatttcataataagggatacgaaaaaacatgaatattgaaatgaagcataacgctcttcaaagaataccaattgaccctgtcaaaagccttagccatatcaagcttcaaggcagcccagccacatttaccatgctttcgggaattgatagcatgaacaacctccttagcaatcaaaatgttatcaaaaataactttcccagtcacaaaagcgctttgaaaaagagaaataattttatctaacaccattttgagcctatttgctaaaactttagagaggactttatagaaggtggtacaaaggcttatgggcctataatctttaagggtgctagccctctgttttttagggataaggacaatcaaggtggagttaacctcagagaagtcagcctcattgtttaagcaacctaagactgcatgaacaagatcaattccaacgatatcccaattcttttggtagaaataggcattaaggccatcaagacctggagccttatctccagagagct

SEQ ID NO: 394518 - DNA, 1080 bp, Cannabis indica
tttgtgctagttattatattaaatcaacgaaatgatgatttatttatctttatttagcattatattattttttaatttttcaatttaagcttaataaggaataaatatagatgattgtgttaatttcataagcttataaggaataaatatagatgattgtgttaatttattaattttattattttatttaacgtattatccctaaaagatttattgttaacacaattataattgagatattatatgtataatttataattgtgtattttttttcccttttaagagccttctattcactttgagattgaagaataagggctatgaataatatcattttaggattttaaaaagaaaaaacaatatataatttttcaaaaaaaatgtataatatttttctctcatttaagtaaatagtgcatctcttattattgttcaaggtgttcaacattctcatccctaccatatacagtcgcttctttgatttacttagtgatatttgttttcaattgtcttttatctctaatgtttctttcaagtatgtccgtcgaactgtaaattttgtagctcatgaacttgctaaatatgttcggatactaattttatttggtagacagatattcctgttcctatttgtactattgttgtaaatagaatactttctcttaaaaaaaaaaagtagatagtgcatctaaaaaagttaagttgcaaatctttatttgaaaaaattattttttctaataatatataacaaattattttgttaaatatactttaggtctagttttaaatttaattcaattaacgttttttttttttttttaatataataactaattttattgctgaaaaattagtttataacttctaagatatatcttatgttagacaataactatatatatattaattaaaacttaattgcttctagagttaataattaataatcaatttaagattaaaataaattttaattttgaaaatacatatttcttttcgttttttttttttttcaattgagaaaactacatatttcttaagtaagttatactttcttttggcaaatttatatccaaaaagaac

SEQ ID NO: 394519 - DNA, 1030 bp, Cannabis indica
tggtctgctcaaatacacacacacatacaaacaactaattaatacctcacctcgacctatatatatatatatattcacatataagaaataaaaaaactaaaatcatcaaatgatgctcacttttttttgcatcaaaaagatgattactaatttgagtagtgttttgatgcatggaactagttgagagaaaagagtagtgcagatacacttttggtggagttgtatcataaataatggtgttaaaaacgttagaagtcataagaggaagagtagcagtagtgatagcggtatgaatagtcttatttttattagtgaaggtaagaagctggtcatggttaaaggtcaaattatagaagagggaaaaaaggaacaaagttaagagtaataacaatgttgttgaggcgcagcttaaggttgaagccatggggcgtatatatccggtggccggaaatggattactggcttttcagttctcaataatatccttttcgtaaggatcttcccaaaacttcattttcacgaaaaggggaagggtattatgtaaggtggtctgataagtgacacgttttcctcattttttttttgttatgtatattgttgcataatatactatacctaatccatttaacggcttcatagcattatagcatgttctccccgtttgacatatattttgacccgtttgaaaaagaaaagaacaaatatatgtatgcataattacatagagtaatttcattccttatatataatattagcaagaaaatattagaatatcattatagttacgtacatagtacaaagataaggaccacaaccacaatatatttatgaggaaaaggacatgtacaataaagtgattgaaatatcatggagtcaccacaataaggataatggaggcggttgtgccttgttatctatcttcaatggtcacctcttcattttcaatgacaaatttatcatcttcaatataaatcatcttcttttaatataccactaattaaaaatagagtatatttttaatatttttttt

SEQ ID NO: 394520 - DNA, 998 bp, Cannabis indica
cgccttttagtgagagatcgaacatttttcttaatcaactccgccggggtgtcgaataaacgatcacagaaccgctctgagtgccccaatactaccacaaataaaacagaaggtgggtaagtcttcatatttaaattggactatgcacgtctgcccatttttcctttccaaagtcatcttcttcttcaatggcttttcgacattaatagtggtacgaactctaagataatctctccaaactcctgtgaaattattagggtctgatttcacaaaagtaccaatataatttgccatatgcttcagagtgttttcagacataaaaccagttttcatctcatggcattggatccagacgtccaatcgggtgagagtaatctgtctaggattctcccccactttcactctctcaaaaatcaatggaacacgatcaaaagtccatgggctactgtcgataactcttgtaatatcaatctcatgataaaattgaaataaaaaatgattcggatcaagttctttaacatacaaacctcggttcggttgccacagagatgcctttttgtgttgcatggcttggcaatcgatactgcgttttgtaaggaagcgccccaccaaacaccaccgatcatcgatctccgataaatcaccatcatcatcatctaataacaacctgtcgttatcttcttcgaacagcacgttctcgttatcactcattctctcagcttggacttctgctgggattcgtaaggaaaataccaccgtaaaacaccaccgtaggacaccactgattactcgtgaaaaaacaaaacgcacacgaacagacttagcaaaacttttcaaccatgacaaaagtcaagacaaaattttaagaaccttctagacggattgtttaattttatggtttgatattttaaaattaatatttatagttaaatttgtttaataaccattcatgggtaatacccattaaaaagttttccatatatatatatatatacagt

SEQ ID NO: 394521 - DNA, 1181 bp, Cannabis indica
ggggatatggatttttatctgtgattgtacttttacggaatgcattccgtgatgtacgacagctgtcagatgagaggcttatttaatctgatggctgagattgatctaagagtaattagggttaaaaagtaaaaatgtaccctgatactcatttaatgaactcctagacccatctaatgtactacagaatacattctgtgaaagtatatcacgggacaaaatcgtgtccctatattattattagtgtaatgatttagtattttaatttattaatttttataaaaataatttattaatcataaaataatactttaaaaggatataattggatactattaacactataaaaaattttacttttagttataataaaattttgactaaaattaaaaaaattataattaattataaattaaaattcttaaactaaaaagtttggctaaaaatattaattataaaaattacactaactaaatatatttttaattataatactttgttgcgatttaaattaaatgtaataatttatatttaagcattatatttaaattacaagttaaattttttgaaaagtttgtatatatatttttattaatgtaatacctagtaacaatatgtacgtgctatctccatttaaaatataagacattaacccttgaagcatgggacgtatttataaaaattagtttggaagacagcatattgtttcctgtcaaaagagtaataatgataggaaaagaaaaatattaataatttatataagaatatatatatgtttatattatatgtacaataattaatactacaaatatgcccaccacatgtgccattttctgaaaatgaagtacgtccgtgaagattcattaattggcaggcacttctttgaaaatacatatacatcagaaagagaagacggcaactatgtatagtatagtagtactcatctacataaatattaaacatacaacattatctttagctaatcatgattagtgcttcccaatcactttttattaattaatatactctgtgtttattatttcatatatttataaacaacataaattccagatttaagtcctactgagatggaagttaccaagaactagggtagcgtttggttggaggtaatgaaatggaatggaatggaaaggaaataattttcattccattcctttgtt

SEQ ID NO: 394522 - DNA, 874 bp, Cannabis indica
tagaatacaataaaaacacaacacaattagtatactatacaaaccaatatagcgttgatctatggcaagtgctagactttgacagttagattttggtgaaataagaaaaaataagaaatacgtttgggaaaaaaatgtaaaaataaattaattaaaaaattaatttttcatatttgatatggaaaattgtattaaattaagtgtttttctatatactttttctttccataccaaatataagtatttgttattattattattatttgaggagaaatatctcaaccactaacaccaaaaataatgaatacaactccaaaaaaaaaaaaaagtgagaatttattaaacggtaacatttgctactaaatgagaccgaatacaatttacataatccgaccacaatacattattataagactcaattaaagcatctatatatatatatataaataaaatatatgatgcgatgacatgacaatctaaaaacgattgaaagtacttttcttttttctcattttttctaattttttattaaagttaattattttttctcattctaaaaaacactatttgttctctgtttcattttcttatttttttaatgttttattaggtttataaatatttatttattattaattaattaatgatagatcacaatatcactctaaatctatatatcacgtttttttaaaaaaaaaattaaaatataataaaaatctatctatgataatgtaatgaccgctttagtaatgtggattagaaaaggcaattagcactaatttttattattttattattatttgtgaattaattttaaaggtggaccccaatatttagaaataaatattagagttataatttctcaattccggag

SEQ ID NO: 394523 - DNA, 1018 bp, Cannabis indica
ttccatgaaggaaggctgaagttatgtttgaattcaaacaatggtttcactttcatggaatgaaggttaaaaccataatgggtgttcaatagacttcaagcaattctttcctttggggtcgtgttcttcaaatagtgggtgtgagcaacataatctctatcctcctcatcagcaggaacaagaacttcttgccaatctaaaaactttggaactttgaagtcattagtaaattggtctttgccaaggagagcacaagcctttaggttgttctcgtgcaataataaattagctgctcgcaacacgaaaggaaggccaagaaggatcctatgactttttttgatctcaggagtggggacgggcctcctagtgatcgctgtcaacacaaaaaataaacaaagttagtaaaataaagcctacatttattgaattaaaactcaaaaccaagcttttgagaaaaggcaatacttaggaatgatttgaaattttgtggtgttgatgggaaagagatccgaggtctaaaagaagtcatgtttgaactcctttttatggggaagtctcacaataatcctataatcgttggtgtatgttccaaggtaataaaaccacttgcacctcgttttcttgcaaggcaggcctttacagagtaaaaacataaaatttctagtggggtcgaacaatcccactttaaaatatgatatagagttttaggtatgtatttcaagtaaacatatagttttattttctttaaaattacttagggggcatatatgtatataaaattagatttcacctagaaatatatacaaaaatgctaaaaaatctaaaaattaaaattttttcacaaaggaaaggatgattgattaaaaattgtcttaggatagtacaaagttaagagttgaaaaatctctctttaagtggaaattgaaatagaattataagtgagattttttcccataaaacaacaaaagctatatgcaatctgagtaaataactgttgggaattattttaccaggatct

SEQ ID NO: 394524 - DNA, 750 bp, Cannabis indica
taacactccagctacacccgaaccagattgctcttgcgtagtggcactcccaaagcaagtggaacctattctcagcagatgtagagcaaaaggagcatgtggtatcttgaatggggatagacatactaagtctttcttttgtagggatgcaattggcaaggagtctccaccagaacatcttaaggcggttgtggatctttgctccccaaatggatttccatttcccatcgccttcattactgtggttgccattctttaacaatctataagccgatttaatagtaaactccccattagtacttggcagccacagccaagagtcacgaacaggcctcccatgaagtgaaatgttgataatgcgttttgcatcttcatgtcgaaaccatctccttaccaactcggtattccattgttggtccgtaataaaattgcttaccaagctgatcattcccgcatcaactacacaaggagtaggttgtcggatatcccctggaacccacggatcaaaccagatcgaggtggagttgccatccccaattttccgacaaatgccttttccaagattcgtccgcgtacggagaatcgctttccacaggattgagtccgactgttgttacgaaaattctgtttattacgcaagtgtacgtatcaagtagtatctcacgcaagtgaggtcgaaccacagggaattggattgagtactactaaattataattatgattctatttggtagaataataagttgcaat

SEQ ID NO: 394525 - DNA, 1406 bp, Cannabis indica
tcttttgtaagccccaaactatataaagggcattaggcaaagttaaagtgacctgaattctaatcctttaagctatatagcagtctctcttactcatgtgattcctcagtcattagccacttagtgtattttctcatctcaaatgtccagaatttataacactaagttctcaccattgtaacattcaatgagagccatagctagaaattacaaggttaaagcttgtaatctacatggtatttatctttagaattaatacaactagaaggggagtaggtcattacccgccagacaaggaggctaaacctctataaattgttgtgtcaacttgattatttggttttacaatttacacatggtgatcgtcactaatatataaggctccgctgtaagttgatcaaatccaaagtcaacaaagtgctaaaacataactatgtgacgatgattgccaatatgtcgcttttccactgttattgggaaaaattctcaacaataataaaattcacatatagcatatataatacatctagaattcaataaaatctctggaatcgatgatttatacttttatggtatatttctgataactaacaagaatttttaactaagaatcatatactaattaaatatgaattaaatcactgattatctgctaattgacatgattaaactatgcagtcattacaattgcaatcccgttaaaaagaattttaaccttgaatctaacttaaataactctaaatattgagccctcaagtcaaactcaaactccaaggtggcttcctccaccttactatttctttacagtactttgaccatggctatggtcttgtttcgaagcactttatctttcttatcgaggatttacactggttgcttctcatattttctcagcattgaaacaagaaatacgttgtgcaccgttgacagtgttggaggcaaggctagaccataagccactacccaaactttcttaagaattttaaaaggccctataacatagggcatacttaccttctttccaaaacgtatcacccctttcattagagatacacgtaggaagacatgatcccctaccgaaaattttatgtttctgcactttagatctgcataacttttctgcctgatttttgaagcaagcatcctggccttggttttctctatagtctagtggttgtttgaattgattccagacctatatattttctttctccaatctcttccaagtgaattggagaatgacacttcctaccatacaataactcataggaagtcatccctatcgtactctaatagctatatgaaaattctaccaagggaaggtacttactccatgaaccttcaaaatccatcacacaagcccacaacatgtaacaccctaactaacataggcgtattacgtgatt

SEQ ID NO: 394526 - DNA, 759 bp, Cannabis indica
agaacatacattctgtgtatttcttaaggcatttacaaacaaaagacctattgaataatactgactcgtggactaaggctagttaatgccccaatcacgttaaaatctgttcgtctcattttatactttctcttttgattatttattcttcacttcttattattaatattctatttctaaaaatcttggtaaacgttttggtgctttcattgggatcggaagaaagtagtgagaccacttgtagattacgctcgagtaatcacgaccctcacctgaaccaaatctggctttcgtttcactagagttggagattctagtgaccttaaaggtcactagtcgttagaaaagttgtcgagacaaagatcagaattgagacgatcccattattaaggacgcaaaatccaaagaaattagttatcaggtcattgaagttaataccaacgacgcaactgaggatatgcatgaagatgaccctcaggagaaagtagctaatgataacacttgagagaatagctagcctgatgagtcagaccccatggtcatcatagcaagacaacttcaactggctaatagcaggttaacttggcaagatcaattcaacgagttcctactcggaaagatgaccagagtggaggcagtgatgaatgccctaactaaactatcttctaacgtgctagctcctcaaaccacagatgcacctgagaaagcaaatctgaaggaccctagattttcaggcgttcgtaaagacaaaggcaaagg

SEQ ID NO: 394527 - DNA, 1004 bp, Cannabis indica
tcaaccaaaacactcaaaggttgcgtactgacgaccacaaccaacaagtaccttaggaccatcgaacctatccacaagaagtggacaccctaagaaactaacatgagagggtagtttacgggcttgaggaatgtccaaggaaccaagagagggctagaagttacccctctaacagggttcccaacaacaacaacaatcgaccgctccctgcaaacgagcaagtcctacccggtcatcatatgggacaaaacgactcacgtaatgttcgtctaaggtcgagcggtaggggaaactccaggaacaacaatagtgactgtggtggaaacagtggaaggacagcccagcaacgggtgtggcgatcctgtcaaagcgaccaaccacgagaaggcaacagtcagtcgagaaacgataagcctagggggagaagggaagaccccgcgatcaatagtgaatactgtcctaactaccctgatggtcatggcaataatgaagctgaaagtcgtgtcaacgaccaaccaaacccagggatgaaggggttgccaagtcgtaaggtcgtatgccctaataggtagcaataacattaacccaaaaatctaccccagagaggtggaaatggcgagatacctctctcgatcgctaaaagggttgatcgccaaaatgcgggaggaaggccatgaagatttaggtcaatcttttaaatgtgtgagaccccaaggaggtggagaactttggaatgcccttaatagaaatagggataatcgtggttcaaatatcgtacacttgaggcaattcaaggaaaccaagttaatgcgggcatgaatgctgtccaatcccaagcagccatggattcggtgatccaggctcaattggatgagttaacccgattattcaaggatgttactgcactgaaactcattaacttaaaactggagaggaggagggggtctgctttctcacaaacgatcaataacctccccaaactagtagggtgttacatttatagc

SEQ ID NO: 394528 - DNA, 1105 bp, Cannabis indica
gaatggctcaaagctttgtatgtgaagtatttgtgtcttaaacaccttttgaggaagtttaacaaggaaaccattggtgacattgaaataaagtttcaacaagccaaagacaaataccagtcagctaagcaccatgatcaagctaatcatggggacttggagttcttgaatttggaaaagaaagctgctgctgattattgtgagtatgagaaaatgcttcacagttttttagtccaaggagatgacaatacagctttcttctatgcgtgtattaaaaagagaagagaggaaaatagaatcacgagcttcatgaatgatcaaggtcgtataattgatggctatgtagatgttgcgaaccacttcaagaaccatttcaaaggctttatgggaagctcggttccagttgatctcagcaagatttagcttgttcaagcaggtaacactcaaaatctttcccaacaactgaagctgcttactcctttcaagaaagggaaataaagaaggttctatttagtatccctagtacaaaaagcctggggcctgatggctatggtgctgaatttacaaggttctttggaaagaattaggtgacgaacttggcgaagctattcagagttttttctgaaataggggtgataccggaggagttcaatgagaccacaatttctctcattcctaagacagctaccctggagaaggctatagactacaggcatattacctgctacacaacagtttacaagtgcatctctaaattgctgtgtttgagactgtcagaggtgctgccaagtatcatttatcataatcagggagtgtttctcaagaatagaactatagctcacaatatcatgatcttccaagatctcattaagaactatggcaggaagataacttctcttagatgtgttatcaaagttgatcttagtaaagcttatgatactgtaagctgtgagtttttggaagcttggatgaatcatctttgcttcccaacaaaatttgtgaagtggataataatgatatgcattagaggccccttctataacttaatgtatttaattaagtttttatttttattttaattctcagtacaatatatgcttatgat

SEQ ID NO: 394529 - DNA, 568 bp, Cannabis indica
actaatattttctattcaaaatgtgttaaagtagtttttttataatattgctattagatataagtggtgtttaatatttttttagacgtattgtcttaccattagttagatatttcgttattatattaaaatatataaaactcgatacttaaaccaattataatattgtcattagatggctattaaacacttcaagtgtcttttctcttttttgttttttgacacgttttacaaaatgctcatgtggatatttaatctacacatagtgaattgtttttttttttttattttattttatgttgcacacttagtgctggtgaacaataatctaaacattcatgtgagaccacatgtttataatactagaaatagttggggactatttttaaggtgcttaaagaaatcaagatcgagcataacaatggatttgttggggtataaaaatcttacaaggctaaccatttttatttattggggctgaaaaaaacttttctcaaaagtattataaattcttttatttaaaaattacagaatactttttaaatgcctcttttcttttttttttttt

SEQ ID NO: 394530 - DNA, 506 bp, Cannabis indica
aaaaaaaaaaaaactgctaaaattatttttgtagacacaattttgtttccatgatgtaatttccacttttctttatcatgtttttgtaatttttccttagggtcaggcccattacattgtgcatgaagaccaaggcccatatatatgtgaattatgctgtctacactctgaatacaaagttacaacaatggaagaattttattaattttagcttattaacttttttttgttattataattgaatttatttttgaagaatatatagtttttcttaaaaaaaaataaataacgcttggctgagaattagaacgaaagcctatacaaattctataatctaatttttcatatgtttcaaacattcctaaaacctttccatagtggcatttatgctgcaaaagaaagatcatattatatagcaacaattacgatatttttagcagattattttataaatatataaaagcaaaaaaaaaaaatacaaaaatacggttgtatggaattttaaa

SEQ ID NO: 394531 - DNA, 734 bp, Cannabis indica
tgacttccaaaaaaggtcatttgatcctattgtaatccttactcatgtccaattaaagccatagaccccgtcttgcctcttctcttctttttcaagtaatggaggacttcaaaagacaccatcacaatgtcaaagataagtcgttctagtataaaagcactttgcgaatccgtaatgatagtatccataaacggtttcatacgattagtcatgaccttggttatcaccttgtacaaaacgttacatagagtaattggtctcaagtctttcatacattgcggatccttcttttttgggattaggactacattggaatccccacaaccatcttcaaagaaatgttgaactagctccataacatctactttaacaatatgttaatatttttggtaaaatactgaggtcataccatccgaacctgggctcttatttggatgcatttaaagaactgcttcatcttcagttacagggtgagatagctcaacattagcacactcaggcacagcagtagagacatcatcaataacttcttggtagtaggtgttagaggcatgaaacaaagaggagaagtagtcgaacatcaaaggagagagaccatttgaccaatcgacccattgaatatcctctccttaaactaaaatataaaagttaaaagaaaatatataatatggaagggtagggttgattgtatatctttttatttattctttatgggcatcatccaatctaatcca

SEQ ID NO: 394532 - DNA, 826 bp, Cannabis indica
aaaatatcatataaatcaattactccttatacagtttttgttttttaaatactccctatgcagttaaaaaaaactaaagctaaaataaattttatgtttttttttttaatttttgaattgaaacaaatagatgtaattgatagcttgacacaattgatatagttccaacatcttaattgaactaattataataaatatttattaaaattatgttataaaatttgaattgaaataaaaaatctacaataaaaataattaatcaatattaaaaattaattaactaattgtattaattattagtaatttaatctatttatccttcttctcttatttttctattattttttaagttttttaatctatttaattaattaataaattaaaaaaaattaaaaaaaaactcttcaaagtaatattaataatcattattatctttattttatttttttggaaaaaagaactcatttattccaaaaaaatttcggtaacaatatgaactaattactttatatatatggaatattttttaatatatattacccattaatgggtaataaacaaatttaactataaatattaattttaaaaatattaaattattagattataaaagaaaattttgaatttctatgtttaatttaactacttaattaaagaaaatatcaaaatatacctctttttacacaatatcaaaaatatgtttatatgaaaaaatatttaagtcaaattcaacttttttaatcacttttttgtcgaaaattttttttttattattttttttttcagttgatggaccaatctcagcccatataatgtaaaaatgaga

SEQ ID NO: 394533 - DNA, 575 bp, Cannabis indica
ttttttttttttatttttatgttacctaactatgtatagtgatcacaagtttttgtactctacttgattctttgaagaatggccaattatgagctatgaactagttgttattattttattcaatttctttaaagtttaatgggagtgagaatgagatgagaggttaaagtttagtaaagggttgttgtttttaattgaatattgagtataagaaacttaaaaaggaaaatagaaagttcaatgcagtaaagtggtaataaaatgtcaattaaatagacacaaggaaggagattccttttctctttgtttttattaattagtgtctcttcaccccaaaacacccatggtaattgtagtatatggttttgggtagaggcaaaggagaaaaaaaatactatctttggtattgggattagagtaaatagtggtataagttttaagtttgtaatgtttattttagcggtaaaaatacttaatatttgtaaaattatttttttttttcagttttcattcagtatagactttgttttgaatttattaaaagaatatttagaagtaactgatactacatgttt

SEQ ID NO: 394534 - DNA, 739 bp, Cannabis indica
tgctataattgccatcacctaattataacaacaacactcataattattattattatttaattaactaactaattactactactaatcatcatttatcatgataaaacaacacaaaattaattaaatattctagcagagtcacacacttacaatttcaaaaaatgtatttataatggttactaaagtaagattatttcactatttctcaaactttcatatactctaagattaccaaaaaataaatatatatatatacataccacatcagcacacacaaaatcgagctcttagtgaaattttctctcctcttttccaactctgcagcagtctacaacacatacaaaaaaatgttacagtaatatcgttattggtgcaatttcatatcagatcgtacttattttactttaataattaccttagtgaatattccaacaccacactcaatcccaactttagtcaagaacaaatcatcagcaagcaacctctccttaaacccaccaaaaccaagcaaccaccggaaaaccgccgacttctccaactcgaaatacctcttcacaatcgatcccggaagcctcccggcctcaatcgcggccgccatatccttaggtaaactctccaaggaccgatttgcctccgccattgccatgattgcctctcccctatttctcttcctattctcatctccatctccatctccaccgccaccaccaccaccgctatcatttcctcctcctcctcc

SEQ ID NO: 394535 - DNA, 1723 bp, Cannabis indica
agatgatggatatgtttcaatggtgtatgtgttttttacagtgttatcgatgaaatatcgatacgctatcaaaggtagatcaaaatggtgtattttgattgtttgaacgttatttttttatttgttttaatgtatatcgataggtaattgacatattatctatggtttgtcgacatatttgagtaattatttttaaactgtttatcaataagatgttgacatgatatcaatagtatgtagatattatagcaaagaaattaaactgggttatatagttttcatatcgatgttatatcgatggtatgtcgatatgatgtcgacaattgtaataatgatctgttttttattctttgcttgaatgtcgatataatatcgacatattgtcaatattttgtcgatggtttgcatgtctttatttttgagggataataattttgtcgataggtttttgatagtttcttgatgacattgctaattttttcccttttgtagatacctccgaagcttatagttccattccctaagcattttacaggtcgtgtaacctatagaggaagtggtatttttagcaagttgatcaaaccacaatttgataagcacagtttgactgatagggcaaaggcaaaccctttcagtcaattatggcaagctggtgctctatcatttttgtcagtactattccaccaactgatgctgcataaaatgattgtggacgctgagaaggatgacgaaatgcggttttacattccacagaatgagatgaaatttagtgtggtcgagttcgcagtgattataggcctcaacttcacaaaggggccaacagacgatgagaaagaagccatgtcagggtctaaccggttgataaatctttatttcatcccatcagataatgtgaagacaaaactactttagaataagttcctagcctacgaggtcccataagacgcatacaagctagggttgtgcttgtttgtggagattgtcttactggactgagagggaaatgcatgtattacaactgacacactaaaatgggttgaagatcttgattttttcttcaagagtccatgggagaactactcattttccagactgatgcactccctccgaaaagacatgttgaaatagaaggaaaattatgagaagaagaagctgaagatggatgttcagcatgaatgcaaatacactacctacggcttcgcacctgcattacagtattgggcctatgaggccattatagaggtggggagtaagtatggtttgtctcagggaattcattttcccaggatgctaagctggaccagcagggctgacatcgaaaagaagaaaatgagtacattattttcaaaacagttatgatcatttaatttttttgaactgttatgtttattttttaaaaaatttttgtttgttgatatgatatcgacataatgtcgatgccttatcgatgatgtgcattttgtgtttaatatttgtattattgggagtttgtcgataatttgtcgacattttatcgacatgttttcgacggtttgtctatatttaagtgttgttaggatgtcgacatgttatcgatagttattttatatttgttgacatgatattgacatgatgccgatatgttatcaataattttagtgtatttgtttttgttcttgatatgatatgatatcgataggatgtcgatattttgtcgatggtttttaatgatttgaaaaaaaat

SEQ ID NO: 394536 - DNA, 1206 bp, Cannabis indica
caagtcgtggtaggagtaagtcagatgatagaagagacaatcgtgctcactcatgttcatggaaggaattcgagtgctactcttataaaaaaataacatttaaggggaattgtgagcaactggccaagtaccttgaagtaatgagaaattaagaatacaaatgcacatcagattctactagtgttgttggtaaaagttttgaaagtgacattgatgttttgtttgtcatagccgatgaaaatgtttctaactcttggatttggcttttggttgttcgttccacatgtgtccatataaggagtgttttgatccttataaggaatatgatggttgtactgttttgatgggcagtgattttagctctaaagttaatagaataggaactattaatgtgaagatgtttaatgtattatgagaacactgactgatgtaagacatgttccaactttaaggaggagcttgatttcattgggagctttggatacttgtggctacgactattttgcaaaagatagtgaaataattattaaaaaaaaggtggcttagtagtcgtgaagggtaataaaaagtgaaatttgtataacttagtcagcaagactattttaggtggagctgagaacgtgaagtcaagtcacaaaaaaaatttagtaagagtgaaggaatgcaacaaggggagaagactcaaattccagttagagtttgtttgaagaaaaaagacattggcgaaagattgaagaaagtgaaaagaagctctcaagtgaggttcaatgagagtatgaactcaatgattagagttgtgagtttagagaatttgagtcaatgtggagattgttgaactttgactcaaatttattttagagcattgctattggacaccaatggtgcctaacaccttctagacgtgtggtcttgcgatttactaacgacactctctaaaaattattacattaaactataagagacccaatacttaattgcatcaatagcgatattaacatataggagggtgctaagcaccactggtaccttttagcatttctctttattttattttattaattaacatgtttaaagttttttgttaactaagttttgaagagttttcttgagaaagctttggagtatcttggtgtccaaatttatttttctatatatatgtttgttttgtatgtgagaagtagagtgtgtgtgagagagagaagaaga

SEQ ID NO: 394537 - DNA, 769 bp, Cannabis indica
atttgtagaattagtgttacaaaatgtataattcaactagtattgccttcaatatctctaataaaataaacacagcaatgacatgagaagggtctaaaaggttaacatatttaaaccatttgttgtatttattttacacgatgaaaaatttctaatcccaaatcttgatctgtgtgaatagtagtaataaataaataaaatgttgaagttccaataccaagactgcaatagcaacaaatattaatgctacatcatccaacctcttcttcaaagatctatgatcctccaaaagaatggaaaaaccaaaatcgattctacccagtaatgacttgtcattgggaacccttttttatcaacatctatatcccaacattttctcccaaactattggatgattgaacctaaactgtgttcccatatttatagcttatgcccaaaaacagcttaaccttccatcatacctgtggaaacagctccaatgagtgaaagtggatcaaagggtcatctagggagtgttaaaagtaaagccccaatgagaagaaggtacttagatatatatatgtatatcagataatgcaaaaacagccggcttggagttctacttcagcagtactctccatatcttgctcatatacacaaccaaagaccaaacagcaagcccagctgagatataaagcaaagcaaccccggtagctacaaaaattcctggccctccaaggctgcaataattgacatgtgaaaaagaagaatttagaagatagccataaag

SEQ ID NO: 394538 - DNA, 646 bp, Cannabis indica
ttaattaaaatatatttaaaaatcattaaagtaattttttgttctattttcaaaactaaaattaagaaactaatgaaaaatgtaacttttaaacttctattttaaatttttaatattaaatttaatttgttttgctatttattttcttgattttaggatttttttttgggttcaatttttagatctactagttaacttttaattatttaatatttaaaatatattttaattgattttatagcaattattgaattaaaactatttttgggccaatatgatgatgaaatatgtgattttagcttaacactaggtttttgttttttttttctttttgagtaaaagcttaacactaggttaaacattaagaaattgaaatcctgacaaaaataaataaataaattaaaaaagtgaattacaataagtttaaagagaatttttttttttatcaaatattttacacagagaatcaagtgttataaaatgaaactacttaataacatgtaattacttaaaaagtaggttgcataacatcaagtgttattctcattcatttatttactaaacttaaatgaaaagaactagtagggccacataaataaaagagaaaagaaacttcaatttttatattccttttcaggatttattt

SEQ ID NO: 394539 - DNA, 786 bp, Cannabis indica
taacaaaggcctcccctcggtcatgagccgaaacacacacccgagactagcggtgcgaccccatagccgagagaaaaagaaggatgatcgttctaccgctaaaaaaaatcattgagtgtaggttgtttacaaaatttaaactttagatacttacacactatttacctataaaaaattgaagaatctatttccctagagcatgatttaaacaagtaaaagtctattattacttagtgaaaaaatgttaaaagggcagacatcggtatctaacactaccacaaaatatcatatctctattaatataaaattaagaattgaattccacgttttttagtttaatatccattataaacgttttttagtttaatatccattataaatattattaattatatgcaagatgctacctcgtggttgtactcagtaccattgttgcataattacaatgtttgaagtgaataaatattttattacaagttttggcttggatagatagggatagtgctgtaaatatggactcgactttttgacacaatatgaaattggcacgagtatgattagacacgaaaaaaatacaggcttgggtacgacacgacacgaaaaatatgtccttaagcacgagaagcacgaaaggcacgacacgtaagcacaaatagattagcccgaaaagcacgacacacgacaaacccaaaaagcacgacatgacatattaaaaaaatcttttaattaattaatattaataataaaagatatgaatttatcaattataaataagttaaaatagta

SEQ ID NO: 394540 - DNA, 1244 bp, Cannabis indica
ctctctctctctctctctctctctctctctctctctctctctctctctctctctctctctctctctctctcttctttacatgtcgtaggattgtagaagagaataactctctctcattcctcttacttgagatttccctactgattatcatattgtaatcgtaagagaggcacttcagtatccacaatatttgtgatctgagtggtattatctttggtattaatacagcttaaagggaagtaggtcattacccgtaactaaaggcgtcgaacctctataaaaatattgtgtctctttactttcctgctctttattgtgtacacgtgttaatatcagtcataaatactacaccactgtcggttggccaaatttgaggtcaataatctagtgatttcattaagagcgttgtctattgatctgttctatcgccatggttaacacaaggagaactccagttacaaatccaacctcattgggtctttctcaagaccctatgattggtgatcctgatgttcgtgttccagccaaacttggaatctccacgaatctgacggatgtggccaaccctcccaactcggcaggcaccacaaacttcaccaccacaactggttaggttgacactgcctatttaattatttatttattgataaaatctgctgaattattttatgatgcctattaaatttgcatattacattgtaattattatataattatttatttgttattatttagttgcattcaaaataaaataaaattacatatgtttagttttctatggacacatatatattaagtgtgtttttctattattttttttagattatttgtgttttttttttatgtatataatgtgttggtgcctaataactttttatattaatatatacacttgttatttaattatttgctcgttgttatttaattattcaacaaagtaaaaattaaatgagtatatgttaatttttcatggtacatatttttttgaattaatgcattagtattttgtagtgtttttattttatgttcttttattttttgagataattcatgtgttatttttaatttcttttagttgatgtctaattgttcaataaagagaaaaatagtctatgttttagtttttcatggtatatattttttgagtttacgtaagtgttttgtagttgcttttattttttttaagttataatttttaatttatgtggagatatttttatgtataattatttttaaattgattt

SEQ ID NO: 394541 - DNA, 660 bp, Cannabis indica
taataaaagcatggtaggagtgtaaatgatcgggtcagatgtgatcactctatgatccgacctgatccgaactagttgttgatccaactcacttcactctgcagagttactttttcgaatcgggtaagatctgaatcttcaattttttttgtacaaatttaatctttgtatcaaaactcatgtatgactatatatctaacccagcaataaaattaacaatttacaaatatttactaatattaattatgaaattatatttttataatatatgtttacattttatcaaagatgaagtcaaatttataagaaagaaaaaaattaatcaaaatctctatgtttttaatcattcaataataatagaatctgagtttataatttatcctaatagattttgttttagaaaaactaaaaaaactgtataaggaaatataaaaatttccaaatataatgttaatattttttaaaatatattatcaataaataataatatagtatgtcaattacatgaaattaatcttttataattgatattaaattgtttagacattattaactttattaattgctttaaaaaaaatccccgaaggcgggttaggggtcgagtttggcacatttttggaaaagttgtcttttaaaaaaagttgtgataaaaatatgttt

SEQ ID NO: 394542 - DNA, 1737 bp, Cannabis indica
taaaaaaaaaagatcattgaaattgtttcagtcagatgagtatatatataaatatatatttagtgtatcgtgactttgaaacaattcaagaactttaacaaaatacttacattgggtcttaggcagagactcatgcttgaagcttgggcagagactcatgcttgaagcttgggcagagactcgtgctgataacgtgttataaaataatataaaataatataaagtagatgagaagaaagaagaagaagatgaagagagaaagagaaagtgaatgagaatttctgagttgtttattccaatggggtgaacccctatttatacaaatacaagagtgagatattaagaaactaagaaaaagggaaactaaggaaaagaggaatgttgattacaattcatggtaataaataaaagatttggacatccacataattattaatatttataacacttaaagatatatatttagaaaaaaaacaaaaaatctaacaaattgaaattgtcataataaaataaggtggcgaaaaatgggataatttccatttatttttataatatggtacttaattaatccttaggttagatcgattaaaatagttggagatgtagattttacatgttataggttaaccctagtcaaagacacgactaaggaaatattccatcgccgacctcacatgatcatttcttatccaaatatatggttggtataaatttatggtctacgtttgtaaatttgccaaatcttacgtagatacaaattggatttgtttgataattaaaatataattctatataaaatatgcaatatatatgtaaatatttgttcgaagtattgttccctctaatctataggatgtactagttgccctttcaagctatttgttatctaccagatcaaacacattaatgaccaatatatctgtatatataaaatatgtaatatatatattattcagttcttttttattccctcttatatatatataccaacttacattttatatgttttgtcaacagcttatttatttttttttatttaagcgtttatatattacaatcatgcataacttaagactcgaactcaggacttccaacacacacgcattctcctatagctacgtgagctagcctcaagtggttttgtcaaatgcttacttatcttcactttttagtttcttatcatattttataacaacattatgttagaatttttatttagatttacattaaattttattagtttttattaaaatttggattaattggatagttctttgttgtgttagcccatggtgatcaataattaatgagcttagcatctgtgtgtaaagtaacacaattagtcaatgctattattttattctgttatataaagtttgattatttttgtactcattatgattgtaaccgaaaggaactattaattagttggatattgtgtaatgagcttttacattgcgctggccctttttgtatatgtataaatgcattttatctgattaatttgaggcaattacattgtgtgcatactttattttaaatattttagtttttatctttattattatattctttgatatatatctacttttataaatgatagggtaaataccattttaaaccctgtgttttgcaaaagttatcaattggaccctctgttttgttaaatgacaaaatggaccctgtattctaaaatagtacaaataggatactgaattgattttttttttatcaaaa

SEQ ID NO: 394543 - DNA, 576 bp, Cannabis indica
acataattttaagctattttccacatgctcaagtatgtaaatgacttccttcgagaactcaaatctttatcgaacgagatcaatgtagggcaatggtcaaggtcccattttgaaaggaagataatttctgaattcaaaaaagaatctgtccaatttgagttcacaaaggcacaatcaatcttagagaaaattatctcgttaggctccggcttattgttccatgtgaagtagcaccctaaaaatttaaggtcctccattttacaatggactgcacagtccttaaacctctcagattgatttttatggttccttcttctaactctttcatcatagctcaaaatctcattaaaatcccctactatcatccatggttcttcaatgtaaatggcttaatactgatccacgtaggaagaaaataatcactaagaataatgtcactagtatcaacgttagtggtgaatggtacaaagatgaccattttatacttgctactcaagctaagctagtattttatctcaatgatctacttagaggtagaaactgaaaaaaagttgaggatgtaaaccatcgataaat

SEQ ID NO: 394544 - DNA, 693 bp, Cannabis indica
aatttttaaaaaaaagtatttaaagtaattcatcttaaataaataagtgtatcttattctaaattgttcaagatgttacaagaattttttttaactttcgagatcgtaatttaaaaattttcgtccgatttcattcaaattttactaatagataaattgaaaatgtaaggattagtacatgtcaaaattaaaaagacattatttgttaaatggacaatctcgtcacattaggcttttaatagtaaattaatcggaattgagcgaaaacttttaaattcaacaatattaataattccagagaaatttttaataacttaaatatttataaacataatttagtacatattaaatttgaaaaatatttctacacattaataatatatgagagtgtttctaatataaaaagtggaaaattattgcaatgcaacattatgattaaatgatgcccaatatgtgattaatgaaatatagagtaaaatagctaatagctaaattatttagctaaggtaaaaataatatgaaataccatcctctatatcaaatgagctattatatctaaaaatagcctatgaatagctacataagaattatttataaaactaaaaatattatattactttttcaattcttttgaaatatacgtactgtgggataaaattatatattttttaaaattaataaaatatagagata

SEQ ID NO: 394545 - DNA, 1144 bp, Cannabis indica
aaaaaaaatttaaaatctaatatagttttatattaattatcactaaaaataaagacaaccgcacgcaaagcacgagttgttttctagtttctttatacatacaaattttttttttctttttttgaatttgttatttgttattttatttattttaatttgttattggaaacataaataactataatttattttatttcattgatagctatgcgaaaaaaatattttttataaatattaaataatttaatattaaaaagtaactaatcgaaaataattgattcaatccgcacttttacggattgaattggattgaatttgggttattgtgtggatttgattggatccaaaaaaataaaatcggcacttagtgcggatcggatacattatgagtaaaaatggtgcggattgaattggatgaacatcccactgatttcgagatattcttgtcattaaagaacttcctattgtcaagtgggtagtgagtcaccctaacataaaagttaaatgatccacttgtacatcctattgtcatttaatattaaatgatatacatatatatatatatacccgtacacacatcactcaccaccaaacttatgaacactgcattattattattattattttaacacacaacaatttaatccacaaatggttgtaaatgaataaaattgtttatacaaatccgtacaacagacaaattgttataaatatattgtttacacgaaacatatttaggactaacaagacgacattaattacagaacgtttgagggttatttaaaaaaacataaatatattggcctccctcccatcaagaattgagcttccaacagtcacttgcaggaatggttttgtgtgatgatgttatattattttataatataataagtgtagattaaaatgtagtaatatatattattatgtgaataatatgtattaggtgtttggtaaataaattgtgtaacatataatttatttaacctaaaattgtaacatacactttataacatggagaagagttataaagttaattgcttttgtaacttcttttggttgatcataatattgtataataaaagagatgttacacaatttgatgataggatttaaatggtttgaaatatagttgttacaaactata

SEQ ID NO: 394546 - DNA, 1181 bp, Cannabis indica
agtatcaaacggaccttcccagaaagtaatttgcccaatttttcctattttgcaatcaatttattcattttaaagatcacaataaatttatcctaagatcatattcattatttacaatggaatagtatacaaagttaacaaatttcaatgaaaagatcaaataagttctatggctacacaaattgttgagagaagttctaaatcttattcaagacaaacaagtgtaaggagtttattgaaaccattaaattcataaaattgtagctcttgggtggggaaactactcccttaatggatatgtgtccagctcagtattgttttaaattttatttataattatttaaattaataaaagtaaagaaaagaaaaaaaaaactactgctaaaataacttgtttttatatatttagaaattaaaaattccaatcgatagaaataattatattaagaaatttgcagacacacacatgaacatgcaatctatatgcatgcactgatcaattctgtgtacatgttaagaattaataaatatacatgatatttatatatataaatattattatatatatatgaggctagggttaattttatctgatcatcacagaccatgtgatataaatttatttataatgtatgcatttgaccattaatttggcataaatattggtggcagcacagcatgctatagggactgtcatttgttgtatatatgcatatatatattatatttataaatatatatggtaagactatatttttgaaacatatatattgtgacagttagtagtttcgtaattcataaaaagaaatattgagtaaattgtataatttcatactatctgaagaaggtctagtgtgatgattgtatatgtatgagactatacagttaaagagtacttaaagggattgatagtcatagtactacctatatcaacaaggtacatcttgttttcttatagcctatcacgaaaaaattctacaattaaacgtgtttgacttggagtaatttcaggatggttgatttccttgaaagtttttgcaaaaagtgtgcgaatgaggacaaatactttgaaaacactcgtattaatttgtaggactaatcgttagtccaaatgtaacgtccccacttcaagcctccattgggtccttacacccacggaatgactggctcttatacacgag

SEQ ID NO: 394547 - DNA, 1125 bp, Cannabis indica
taaagtcatcggaacagcctactcaatagccacgatgcgagtcttggcttgtctttatgagaaagatctagatttccaatttgttcccgttgacttgagtactggtcaacataaaatggaacccttcctttctctcaatgttagtatcaacactttgattttattaattattcttattattattcttttacttatagctaattctccaagtaatcaatttatactacacagccttttggtcaagttccagcttttgaggacggagatctaaagttatacggttatgttttgaaatttcactcacaattttcccaatcttttttcccagattattgattcacatatttatgtattgttttttttaatgcagaatcgagagctatcacgagatacattgctgaagagtacatgaacaaggggacagatttggtgttcaaggaaccaaagaagcaggccgttgagtctgtttgggctgagattgaggcccatcattttgacccagcaggtactattctgaactgggagctgtccgtgaagcccagattactgggcctagaagtggaccgggccgtagtcgacgaaaacgaggctaagctggtaaaagtgctagatgtgtacgagaagagattgtgtgaatccaaatacttggggggcgatcggtttacgttggctgatcttcaccacctacctacggcggattatttgaccgacacgagtattaagatgttattcgagtctaggccacgtgtcagtgattggttggctgatatcactgccagaccagcttggaggaaggccgtggaattgagaaaccaagccttgaagaaacgggttgatacttcaatgcagggatcacaaaccaaataggagataggatgtgtgtcattgtgtgtatgttgttttctaataggaaaaagatatctgtcgtttatatgtttgttattttagcttttgtggtctgcattttttcttttgtttggcttatttgtaatctatgttcttcaactaggatttttatggattggtttgttttgaatttttgatttttttttttttttctaattaaattacagtattataatttttaaaaaattttaaaaaatttaaaacttaagacaacttaaa

SEQ ID NO: 394548 - DNA, 884 bp, Cannabis indica
ttctcatgtcatgttaagactttaatgtaagatgcaatatggatgagattctcaatatgaaactctctaatatattatcaatatgagactctctaataaattctcttagaattttatccaaagatttctaagtttaaattaattaaaaataaacatgtattcatctaagttatatagactgcttaattttacaatttttcttaatttttacttctttttattaggttaattatatatacataaatataattatactaagattgagaagagaaatgattaggcgattttaaattatttacacataagcaaaaagtaatgttatatgacttgctaactctcaaattaaacatctctccactttttctttcattataattaagtcatatatagtctcatgtaaatgaaaatagcaaaaaccaaaattggtaatagaggggaccaataatataccacaaatattacattttcagagtatttcttatatataaagctattatatatattactatttttgcatgcagatgcagagcccttgtcagtattagctaccctagttagctttttgtttttttaaaaaaaaaaattaaaaagaatttttgtcagctgaattataatttttgtagaattttgttccttaacttattttttgttgtaaaatatttcttctgaattatataaatcgtatatatataaaatataatagtttaaactgttagggtttataaaacacttaaagaaatatataaatcacagatctaaacatattcctaaagtgctttaatatagaaaaccctaaaccatataaatctataaagcctttgctaaattaaagaagaagatgatgataaaagatcagcggaagcactaacctgaagccattgttg

SEQ ID NO: 394549 - DNA, 932 bp, Cannabis indica
gtaattgttttttttttaacatttttttactaagtttttttaaaaataacaacaaaaataacgtaaaaatcaaacaaagaaaaataacattaaaaagttataatgaaaaatacatacaaaaataacaaacaaaataaaaacaaaaaaaacaacaaaaaataacatacatataaaaaaaaattaataaacaaataaataaaatttcaaacataaaaagactgtatttttatgtaaaataaaaacaaaaaaatcgtaaaaatattttaaaattctgtaaaatcgttatttttgttatttttgtgcaaattaatcccaattttttaattaattgaatcaacctccacattcaaatacattcatttgtgggccgaaactcaaattaatgggctgagattcacaggcccaaagcccataccttgggtggcgtgggagccagagccaactgtttcggagtctgtgttttgactgttgccaactgctttgtgtcggtgaaatcaatccacccagatttacaaaaattacacgcgcgtcccaaaactaacactttctctcaaataatcacgcgctagttcgtgcccgagtcatgatttctcgctcgtccgagtttgttaagagtacgcacccgagtgggtcctggttcggctcaacaaactcggagagtgtagaacacagcccgaactcagcgcgtatgaggatgcagaatctcttacaaacgtccaccatggaggggtttccgccacgatgtcactatcaaccaacctcaaaattaaaaaacctcaacattaacaaaaataaaaaagaaatattaaaaatctaaccaaaacgatgtcgtttcaccttgactcaggacaatcattggcctttagcaaataaattttgttctctaaaataattaaataaaactaaaaattctcctttcatgtcagtttcac

SEQ ID NO: 394550 - DNA, 1173 bp, Cannabis indica
tgatcaataacttgatctaacccactctaggtcttaaattcataactcgaagttcccctatcgataactagcacgacaatatcctgaatattgagaaaatataaaaaataatattcttgagcatcacccaaaatggtagaccatttgaaatgactaggcttaccttgatctttccatccaattcaacttaaacctagccgcaattcttggttaaaatggtgagaaatagctctaaaattgttttgtgttgatgaggtcttgcttgggggtgttttagccgatagaaaagaagaagaggatgaaggtggtggtatttctaattgtataatacttatattaaattatataatttaacttaataaaataataaaaggttcatctctatcttattttagcaaaatcccactaaataatgatttaattaaaacttcggtataaaaccaaaaagcctttagcttaacacttaagtagtctttaatttaagggtaatttgttcataaccaattactccaaaatatactgataagactatactagccaaacttatcaaaactacaaaaaccacaaattaataatgttgtgacatttctggtcaccgatcgagtttcaacggttgttggacccaaaaatatttttatttagtatatacaatacccacagattcttatgaaatcttcgtaattaataaattacgcttatttactcattttcactaaaatccctaatcatcacatataattagattactaagatcataatcttacccatttatagtcttaacacacctattactcttaaaatccctaattatcacataattagattagtaagatcataatcttacctatttatacatttaacacacacctattactccatattttatgaaatgtgctttaattattcataattaaattttttgagatattacaactatcccttttttatagaaattttatccttaaaatttacttgaactattcaagatacagttcctgcatctgcaactctaactcacaagtcacctttcttaaccttactattacatcacatcaatttcaacaatagaagcatcttgttctgtatatctacttcttcctatctaatatctagataggtgattcctcttgttatcctaatttttgcagtacaactcaccaacaaggaggtcaa

SEQ ID NO: 394551 - DNA, 1103 bp, Cannabis indica
tcatgctaccaatattattcatgagtacaataacaaaatttcatacctatctcggagggctaggaccttcgagattgctcacctatctcggagggctaggcccttcgagatttctcacctatcttgaagggctaggcccgctaacattactcaatctcagtgctcttatttacggcagacaatgaccgccgagatagagcagtccaggggttgggcccaccgagacgggcccaattttttgtagtgagtgttactggaacctgaggctaacaattacgtttcttctggcatgcttagatatgtcgaagatcttgagttctttttacgtatttcttgtggaaagtaatcatttgccaaacttatatccacccttcaaaaggtcatgttgaaacagaaggcgagctatgacaagaagctgagtttggatgttaaggactagtgcaaatacacaacgtatggctttgtacttgtagtacaatatttgacgtacgagaccattttagttgttaggaagaggtattgtacgaatcaggggattcagttttccaagatgcttagctggactagcaagggtgagattgggaagaaggagctcgatgcattattttttgaaataggtatgattttttcttttatgtttagagcaattattcaagcaaaatgtttggaataaatattgagaatttgccaacttaggccacaaaaagttaagtttttcatgaattccttcaagaatcatctctgctttaaaaaatattgagattcaactatttctagggaccaaatgaaatttctaaaaggccaaaagggggacctagcacccagaatgacatctggggctaggcccaacgcctaggttgacattttgtcaacctgggttgtttccaatttagttcagcaaaaagtgctccaggaattatacttgtcataaaaaataacaaagattcaagtaaactcagggaggaaaccacaaatttgagtcctggaaatagggccagcgcccaggttaacctggtgctcagcctagtgcccaggtttacaatcaacttgggatcctgcttttaattgctcaaatgtcaaatttgatgcaaccattgaatcca

SEQ ID NO: 394552 - DNA, 1099 bp, Cannabis indica
caaggtcccacccaaacatggtaatcttataattaaatacaatgcaaagcccttatacagggatccaaacgatcccataaagtttaataaaatctccagaattcagaaattataactctaatgcccatttttagaaaataaagcccacaacataaatattcacatataatcataagaacaggtaagtaatgctaatttccctactaatccatattttaatcatgcggtcattataattgccatatatactacaatgtcttttctctaaaatcttaattacaatttttaaccagattttctgtacacctgcctcaaagttcaattttaaagttcaaagggaaataaataatatgacttacaaatgaccccaatacttagactctacaaaatatgctcaacttaatccaaacaaattcataaaccaattttttaatatgcttgtatcatttaaacttctctactaatctcaacaacaaatgctttggaatcaaaaggactttaaaaggttataacattaggcttaggtaaaggtagatgaaaatatcatttaggctcaactataccataagatttttacattctaagcacctaacttttactacagaactatcttattctcctaacttttttcttttttttaagaaaaggattgcaatatattaaaaacaatctctctcaataattttaagctttctcaaaacacggtaccctaattataattttcccccaaacttatttcaaagctcatgatatagttaggacaaaggaaaataataaataggtcaaaatatgttggcttgaatggcacaaacgttccaaagaaatttcctaaattatttttcaaaacataagtcatcaaggatttcacctcaaaggccaaacaatgcaagttctatcgaattcaaactatcatgcctctattgtatttgtgaagcatattaaaaatttctcatcagaattttttaaattaaactcgaaaataattgcaacaagcacacagttattagcaattttcattttacaagaaaaaataatgcaatatagacaaaaacaatggcttaacaaacaaacactaataaaattagaaataactaaaaaa

SEQ ID NO: 394553 - DNA, 1034 bp, Cannabis indica
ttattgtaattattgaatttaaaattttccatttattttattaacaaatgcctgtatggaaaaagttaaggacatatgatttgctaccactactacaaaattagttttttctaataatttataactgtcatttatactaagatggtagttatgtgagtgtcatagataatcattatgttagtaaaattgaacgaaatattagacaaaagtttttgatctaataatcttaatagtttgaaagaaatttttaatgacttaaaaaatttgagaaacacaatttgatacatattaaaatttatgggtaaaaactataatatttaaaattagcctaaaatatataaataatattttatatattaagtaattatttagagagagagagagcatgtatatagatatagtatttgctttgaccaaaataatcaaaacatcgatatatggtggtgttatatgatataatataaattaattatataatatacttaattaattaattattattattattaattagtgtcttcaagaatgcacgagtgtgtgtagttgagtttttttagttcccaatgcatctctgtctatgactcatgttgtttcaaagttttccaaaacaattattataaatataaaatattataataatatataaaccaaattcaaaatttaaattaattactatactctttttgtttctttccaaaacatattttgttctttttgtacccttatcatcaattgatgtgattagaagaaaaaatacataatatttaaatggtaatttgtgtcaaattctttatacttttatatttgttatagtttaactttcttactcgaaaatttatagttaaattttttgaactcgacaatcattttgttgtgtaatttttccgttcattttggtctattaattaagtattaaagtggactgtcacagtgtatacatgtacacgtggcaaaattttattagtccaactaatattaataatataaatattaaaaaaaataatttaaaatataaaaaattaaaatcagaaaaa

SEQ ID NO: 394554 - DNA, 823 bp, Cannabis indica
gtgtaataattataaatattaaagaaatttttccgtaaatattccttttttttttttttgtgttttattcttgtttagagttcattcttttcattccttacgttatgaatataattaatatgcaagtaaggaatttctattaattgaaaggcaaaagaagagaaatatatgtacttttctctcaaaagagaaaaacccaagtatgtatatgtaatactttaaattaaactttaaatgtaagagggcagaaataaactatcttattattattttgaaatttaaagtagaaacgtattggttataatgaaacacaaaatcaaagcaactgataaaaacttagcgtccttttaatcctaacgtaaaatttctcttataaaatataaggtaaagtctacagtatactacttaaactagtattttggtacacaccctatctgcattcagtgacagactcaggatttttactttgtatgggcttatttatcataaaaatattagaaaaatatgagatattaatagaagaataacaataagatgaataaagagaccaagaaaattacaactctatgcaacaaaattacaaggactatagattaaataaaagttacaatcccaaagcacaaaatacaaataaagagaaagaaaagatgaggacaaatatacagctcaaagcaaatatatacacataaatgtaaaatatatatatataataaagagaagaagaggcagaagacaaataggaaaaagaagatgaagaataacacaagtaagtaaagggagatcactaaaggcttgaacaaggtttaaacacctttgtccaaaa

SEQ ID NO: 394555 - DNA, 791 bp, Cannabis indica
gccattataagtaccattgttcatcatgaactgtcctgatcttagtactgttccattcatgtcttcttcttcttcatgcagctcttcaagctaaagaaaaaaaccataaacataaatttaattatatataagaagaaatatatacattacttatatgtataatatttttttaattaatccatctatttttatatagtttttcttttttaaaaaatatcatattgtatataatattacaacatatataatacgcttaaatttgaggtagtgataacagaccaaatactacaatttttttacttttatttataataaaatttataattaaaattaaaaaaaaattatgactaaaaatattagtcataaaatttaatatttattatgactaagtttatttttagtcgcaatattttttcttgtaattaaaattaaattagtaacaacttatatctaaatattatattttaaatattttagttacaagtaattttttgttgtaactaaaaattatatttaaccaaaaaagttatattagaacttaaagattatcgttaaaaatagtaactttttgtactgaaaatattaattttttttatttatctagatttaattgtgaatttaagtggtataaatataatagagattttttcctttttatatttcaagactattttttttttttttatatagaattttacataaaaatctttattacaaactaaaccataaatttaaaaaaaaaaaaattaaaaaataatatataaaacaattttcctatattacaaataata

SEQ ID NO: 394556 - DNA, 710 bp, Cannabis indica
cgtgtttatttggactccattcttgggtgattatatatatagatggggccaaagaggaatagggttgaagagagtgatagtttattaatccaataatttttaaagagcaataaatctcatccacacatatatatatatatatcaaattatataaaatacatacatgcatctatacatctatacatacgaattgatatataataatatatatatatatatatatatatatgatcatgcaaaatatgatatttgccattatttcaagctaatgctttaatacaagaattgtcacatcaatttaatccaaggttttggaaaaggaccatacgggtaggaattttcaatcaccaatatatatacatatatattaatatacttccctctaattaattaagaatttaaatctcccatgatttaaggaaaaaaattaaaactggcctttattctattttggctgattagagaccacaaataatataattgttggtgattacttttcatgttttaataaggtataatataactcatcaccaaaccaaatttggatagatattataataacattttattatttctaatatattatacatttcatttttgtgtttcattattattttttacatttgtatatgtatacaaactaccaaggaagcagatatgaataaacgattaaagagaaagggtattaattggtctcaatcaaataatat

SEQ ID NO: 394557 - DNA, 1012 bp, Cannabis indica
gattagtaattatttatctttcaattacccctttcttcacaccaaactaatataaaaatgttattacctctcccctccctctcttatattctccatccattcattttcccttctttctggacgttatcttttggttttaatcttaacaatttgaaatgatttagctaaaatacaaaagataaaagtaaggaatttgtgcatcaaatataaaagaaaaatttacagcaaaagtccttataaaatttattttgatgcagattagtttctgacatcgagaaatagtgacaataatccctaaagtcacgtttcttgtaagtctattagtccttattttaacgaatgtgtttacttattcaaaaatatcacatgtcgaaacattattggtccaaattataattttaatttattaaaatattaaaaataaataaatacattatttaaaaatcataatcttttttctctggggttttttaaatttttttcttcgtttttttcatcttccaacaagtcgatccaacaactacaaaaaacccaccacctactctcttgatatatcctttctcatcctctcaatctctcattaaatctcaatcactctctctccccttctctctttcatcttgctgaacccaatcttcagactcctctttcactgtcaaagtccagatgtggcgagccctctccaccatcaaggtccaatcgcagccaacctctccaccatctggtcagttcaacaatcacaaatacaaactataatttagcaaagctgttcaaatctcgtcgatggcgaacaaaggtggttcgtattgtttgggcagtgatgagcttgtctagtaaaatctcatcgatgacagaagaacttaagaacattctagctctgccacattcgaggagaaggagaacgagagagtgctttagggttctcgggcattgggaaagttgagtagtggggcgagggtggctggagtacaactgtaacaccctaactaaattaggcgtattacgtgatttt

SEQ ID NO: 394558 - DNA, 737 bp, Cannabis indica
ttcttgttctctgtcccttgaaaatcttgatgaacaaacactccttgggcttggacttgggcttgattttgggctttgtaacatggcccaaacaagagaccttgggagaagaaggctcctttgtatcaaagctagtaccataattgggcctaagtctagcctcagcagggacaagagagactagtagttttcttgggcttggaggaggacttgtgaaagtcactgcttgaggaaaaagctttgctatcttcttctttagtttctccattttgtgtttctaagtacaaataataataccaccttaaatattatctctctctctatttatatgtgtgtttttgtaggaagaagtaaatgtgatataatattattgactttttcattggaagagctcaataatgccggcccaaaattaaaaaaatatagggaaattatgttatatctattctatataaagtgtatctatataactgaaattcttggtttttgagaaatttaggggtgacttttaatttttatttaataaaataataaaatattatttatatataataaaataataataaaacaaatctcattaatatttgaactgatatttgggtgacttttaatttttatttaataaaataataaaatattatttatatataataaaataataataaaacaaattctattaatatttgaactgatatttgatgctaaatattcgagaatcacaacacatttaaaaaaaa

SEQ ID NO: 394559 - DNA, 555 bp, Cannabis indica
tcaattttattttactataaacaacttgaagttagtttttagtataaacaaatctaagaaagtataatgtcataatatttatacgtcgggttattattaagttttaacttggtgaaaattgagtttatattaatgttgcctaagatttttcctaaaatggccgcgtgtgagggtgacacgtggacctaaaagaattcccacttacgaagatcaattaagtcttgggcagtgatgtatatctcagggagcgagcctcccagaggagagcacaaaacacgcatttactctctgggaagctagaattacaataaggtatctccgggaagaaaagagatctttcgaacagtcacttcgtatttaatgccgcatgaggaaaaacgtattggaacctctataaaagatatgacagatgtcgtaagcccttttacggcgattacacaacaatcgacgagtctagtgacgactacattatgaggaatcacatcagtcaatagaggataaaagattatatccacctaacctctaaaaaaaaacctacggtatagatcatgtatt

SEQ ID NO: 394560 - DNA, 827 bp, Cannabis indica
cagaatatcctatttatgttaataaataaattgatttttctataagaatataatatcttgatatttatattcaggaaaaattttatttatttagtttgaaatttttggtctaatttattgtctaaaaaccgtgtatgtcatgcaaagtaaatgagaatttcgtttctttatttatttaaggaaaattagtcctgatttgattctgttccaacaaagttataggttttttgaacaaatttcaacttttcttttcagaattatttttcattattgtctgattgttttttgtttttgaagcacgatggtgtattattcaagtatatatttgtactcagatcatgattttatatggaaagaataaatgattttttttaataaatcagtttcagtttagtacattcaactaacatatcatatacaatctatcagcaccttaaaatgaccttaagtcattctatacatctaactaaaaaattacaattgctcaaaccatctaacatctatttccttcaacttttttggagtaaagggttaggatcaatcagattcaaaatgtggtcctagggaacaatacttatgagattaaagggttaggatcaatgtataatgggatataagaaccctaacagcagtgaggtatgtgcctaatctctctagaaacctaatttctattagtgtgcttggtgatttgggtgttgtaagctagaggcaggtcatataaagcttagtagaggagcactaacaatcatgaaagacaccaaaaatggtagactttactacctacaaggctctcctatttcaagttgtaacatcacaactcacaacga

SEQ ID NO: 394561 - DNA, 851 bp, Cannabis indica
tctctctctcaaaaaatgctttgggtttatcgaaacttcaaaatcacggaaatagacagcatctctgtttccctctctacagtcttgtaaattgctaccacttcctatttttgtatatgtatttatttattattattattattattattgtccttgtcaaccttttctactacatttacaacaaaattgtgcatgttgggttgagagttgagatgggactacattttttttatttaaattgtattcttatatttgtttcttttttttttctctttcaaaaaactaaataaaaaaaatcccagtatgattaattaatatatatattaattgtttttgttcgaaagaaaaatgtatattaattgtttccaaaaaattaacttacattaatttatacatgggcaggttaaattttattttattagtgattaattagaaagaatgtaggagaaatggttttttgtttttgtttttaagcactcacaagtcacaacaaatgaataattataatagttaaaagctaacatcacatttggtcttgagtatggttactcatacatttggtcttttttttaatctatttttgtttggctctactacgcaccctcacatcacattagtgccagctagcatttatataaatcagcttataattgtgtcattatgatttctaggcggatttgtagttatttgcgatatttgtttagtcattccttccatgggatcgtgtttctttgtggccttatcatatcccatactgaggattcgagggattttatttgttttaatattttaattaattattgaaaataataattatgttctttcaaaatattttttgtttttttttaaaa

SEQ ID NO: 394562 - DNA, 469 bp, Cannabis indica
agaataaaaaaatgtagggaatgtcacttgaattttttggtgctttcctttatatatagatattgatattgatattgatattgattgtttactttataatttttgctgttttaaaactttataaaaattgatgtgtagtcataaattggtacaatatatacgattacaaaaaatagactaatttttttaaaaaaaaaatactaaaacaaatagagaatataaatgggtctactacaaaaccttcatagtaacactcactgttatggtaaatggacaataattggagaaagttcaattcttataattcatattattatgtagtgtccgcagctagtacagtgtgggagggagtcgtgtgccatatatatatatatatctattctatataaagtgtgcctatataactgaattcttggtttatgagaaatttatgggtaactttttatttatatttaataaaataataaaa

SEQ ID NO: 394563 - DNA, 813 bp, Cannabis indica
aaaaataaataataaaaaagttatgaagatatatatgattgtatagaattttaaataacttttatgattttaattaaataaaatatgtatttttatgttatattatagttaatttattgttacctaatttttttttattatttttataaaataccgtaaaaatataaaaaaaataatctcaaaaatataaaagaaaattaaaaaaattaaaaaaagatagtactttatttaattattcttaaattaaattaaatatatttaaaattataatttcagaatatgtaaattaaattaaatatatttattaattttatatatttttttctttttcagaatattggcaaatagacaatctgcacaaaggtccagagttagaaagctacaatacatttcagagcttgaacgaagtgtcacaaccttacaggtaattaattaattgttattaattaattaattaataaatgaggattatgtgttaattaaatattaattattgtatagtcagaggtatcagcattatctccaagagttgcatttttggatcaccagagattaattcttaatgttgataatactgctcttaagcaacgaattgctgctttggctcaagataacattttcaaagatggtatgtaatttaattttattaattatattaattactagggaatagatccgcgcttcgcgcggttttaataattttttttaaaattttacgttaaagaaattaatttttagttacgaataaaatctcaactcagtctaatatactattttatatatattttttatgaataatataaaggggaatta

SEQ ID NO: 394564 - DNA, 695 bp, Cannabis indica
agaattaaactctattaagaaagtttgtgtctttatttgaggagcttatcaggtatatgatcaacaaagaaattattcaaattttgatgaacttacttcactcattcagaataaaaagttgagtcatttcaaggatgattcctttgtatttttatagggtatgactaattattctaagttcttatcagataaaggacaatgggttttgagtatggtatggtacatattatttgatagaatagatgaagacataaatctttctaaagataccattttaatatatccaatgaaaggacaaaacatgtagactcaaatgagcaaattctgtacataaatgtaactttcacaagtaattaaacaatttcctttttatggtcaaagtatatgatttacaaaattgtttccgtactaaattatgttagttcttctatgatttaaaatcaattcaaccacgaagtgagatcaataaagatgtcttctgtgcaaggaattgtgagtcctcccatcgaatgttgatgtccccgaattcttattcagccatgcttagcaattcttgaaatgcaagctcacttaggtactgttagagaattagctgtatattaggtgtaaaagaattagggtaacttgtatttagtagtttcctattttgttggtagtttcctatttcctagtctcatagctttgtatataaatat

SEQ ID NO: 394565 - DNA, 639 bp, Cannabis indica
aaaccggtcgtacaatttttggcggtttttgatagtttttgacgattttggtagttttttagtttaaccagttatttttttttcaaaaaccataatcgaccagggtggacccaagcgtgggcagcttggccattgcacaaggctcctatttttctaatgcccgtttttttttttttgaaagaaaaggcctatctattttttttttcctattatacatacataaataaaaaatttataactgaaaatttaagaatgaatcttaaaaaaaatactggtaatgaattgttatatgatttttttttttaaaaggctcaattttaaaattttacaaaaggctctcaaaatgcttggaccaattctaaacggaccaccatatcaaaaaaatgtaattgaaactaattgccaaattcgatgatgatgtggaattgcaaaattcaattgttgtttggtcggtttccatttttgatttttatgaacacccctatttcaattcatatttaccaatagctatacaattacacatttaggccttcacactatttgcaaattactatatattaagccattacactattttcatagtgtgtaacaaatcccctccccattattgattgtcttctttattttgttgaaaaaatg

SEQ ID NO: 394566 - DNA, 429 bp, Cannabis indica
atattatctacaaaatactattaaaaaaattcactattctaaaatgattaatataaatatattttttttttaaatttataacacgtttataaattacatttctccatataatcaacgtcaaaaaatccttaaaaaaaagagtaaatattttttggtaaataaaaaaaaataagtattttaagcaaaagaaaacacctttaaaaaatattgttttaagaagttatagtaaataaatcagtaaacaaataatatgtaattactctaaaaaaaagttcataaatatgtaaacatgataatgacaagttggtaggttaatgatgaaccccacttaatcaataactttactaataatgataaaaatagaaaaaatccaaaaataatagtctatatactatatggtgctcttctctttttttcttttttcttttt

SEQ ID NO: 394567 - DNA, 1280 bp, Cannabis indica
gcattcaatccaatccaattgtaattggatatctaattttttgtaattaaattagattagattggatcatttccgttctattagattagattgaatgttatctaccctactctctatggttacttgagctaacctcatatgattaaaaattaaatacctaacaaacattaaattaattggcttagcgaaatactagcatgtagactaagattgtatcattaaatacatacctaacaaaatttattaatttttatagcattatggcatacatagaggtgtcgttacatttccaaaatagcatattattttttgtttgtagaaattaccccatttactatttttttaatttttgtttatatttacggtttgggtttctaaagtggttgcagcgctagttgcaataggggtttctataagattttttattgcaatttaggttgcagcgctagttgcaataggggtttctatgtagaattccgtaaaaatgacaaaaaaaaaaaaaaaaaaaactagatttgaagtgtacaaatgaaaaagcccttattttttatataaaataatatatattagaaaattttatggtacactttgtgtttcggtattcagaattattttttagttttatttttttttttttatgttcatgtacgtttacagttatttaagacatccaaaagtaagatttaaataacttactatactcgtgactaatttattttatacgcgtgtgaaataacatatttgaacattgctttgtatattgtaaattatttcaattttgttaaaatttttagagagtgtcttaaataactataacttacatgatcatagaaaaagtaaaaccaaaatttgttgttgatgccaaaatgcatcgatacacgaccatatataaaactcatttttacttctcaaaggaggggtttttttttttttgtatttttacgaaaattcacttaataattaatggagcaacctaaattacaactaaaatttatataacaactcatatagaaactatcgaagcaacccaaatcgtaattttaaaaagagaaatgcaagtaaatagccctattttttaatttagtaatagttaatgtcctttttttaaaaaaataataaaataaatgttttttactttttaatacctaaaatatccttcattatataaaatgtattataaaaataccttagagtaatatgaatataacataccttagagtaataagagtattatgtctttttttatttttttactgatagatattcttttaattttattt

SEQ ID NO: 394568 - DNA, 566 bp, Cannabis indica
aagagaatcaacacaagttacatccagggttgtggtatatatatggcaatttgtctgtggtatcactcaacttacaagttattttttattttaacaactcagctcatgggctgatccacataaaggcgaagggagtccctcagtagcatttttaatcctttacaatatattagtaattaaatttaattttattattcgtcaaaaaaattaatatttattagcaaaatgctagagctcctttaattgagtgtttgttaagggaaaatgttagaattagaataggtgggaatatgagttcttcttctagtgtgagtcccacaaaatttttgtggataatataaacttttttgtacactatagtttcacattaccctcctttcagctacacctactatgtcttgccatttattaatgatattttataaaaaaatttacattaaattatatggaatatcgatatttaattgtattaataaaagatgttaaacactactagtattttttatttttttagtctatttatctaagggctcgtttggtaacaccgtattaggtcgtattgtatt

SEQ ID NO: 394569 - DNA, 816 bp, Cannabis indica
aagtatgaactttggagattggaactcagaactcaaaactctctctttgagaatagaggaattggtgggatcccctttaagttggtattaaagccaactgttataactaataacagtattctctagattcatctaatgagcatatagatagacctactgagattaagtgagtttaatcccaacatataaaaagtatttaaaatacttaaaacttggatatgcaaaatatttaattttttttgaagaaagagctattgaatcaaaatgtaatttagaattttttacgtccatgaactattacaactattaatgtcattgttatatcagaactaatgtgtaattaaaatttaaaaaaattactttattattgactattaataaatacaaacaaactaattttaaattttccaaaaacaatttttttaaattttaaattaatttttatttaaattacacacatatgatgcttatgtgccaataacatatcacctatatcagctacatatgaaaaaactcaataaaagtcttacatatttagcattgtaaattgtttggaagaatttttagtagacaaacaaatttagagcgcacaattttattgtggtaaacttagttcaagacaaattctaaataaatacagaatggaaaagtcggtggaccactctcaaatggtcataaagagagtattgaggtgcgtatacggggttatggaatcttagttgtgtaattataaaaatatatctttatatattaaaagtgtctatctaacggtaattcttggtttaacagaatatacttaaaaataaaagaatattc

SEQ ID NO: 394570 - DNA, 888 bp, Cannabis indica
actgggtcatgcaacttcagctgcctatatcaatagtggagacggatgcacttatggtctcaaatgctttgaatacaaatatgccggctgtttcctcttttaatgatttaattttagacattactagtctcttatcctttttccctaacatagttgttaatcatgttaagcgtactgcgaatgcagttgctgattgtttagcaaaatatgcactaggggtggatgagactatctcttggttggagaattttcctccttcgatctactctgttattgtaaatgattacccacaataatttataataacatagttatcttttacaaaaaaaaaaaaaaacttcatacattcatgtatttgtgaaaggtttagattaatatcttgtactagtgtctttttttttttcttttcaaaacttttttcagttatagcccaataccacctgaagaattacacatatacagtgatacgggtttttcaattttatatgacccattatttttattacaaaaatacgacttctttatgaagtctagctttcatgtttagtagatcacatacgacttacgagaaacagacccaaacgccgagaaccaccattattaatactgacaattgagtaacaagaagaacacatctagatcaaaaactacaaattaaaaccaatcattaggttaattaaatcaaaacaaaaacaacaaaaaacggaaaattatttcatgaaactatttgaaacttcttagaaatctagataataattgggtattctacccataaaattatttgaaacttttattgtccatcccattaactagatcatgggaaacttacaaaaatactgaaatttaagttaacttttacaaaaatactgtcacacggaaattttttca

SEQ ID NO: 394571 - DNA, 1028 bp, Cannabis indica
gagtactttctcctcttcgagtttattgactatgggttctagaccgcctcgaagtcacacttgcttcttcacactttgttctttcctcccgagagcagtttgtcgtatttcccccattagggtctatacgtgtcctcactatatgggtttgggaaggactctggtgatttttagcaactgaccttcattctccaggttgagtcccaagatcctccttattctcacgagggatttcgtgttcatcagtttccatttatctcccatctggctgttggttttgattttcagggggtgtctcattttccctgggttgttattccgggcattttcctgtctcctggttcatgagccataaggtcttcctcgtagtcttctcactccaagttcaggttgattttgagcattcgtcccctgtgccatcctggccgaggctgcatcacgctctaactcaacgttttgacgatgcgcttattctagacggcgtctcaagcgacagttttctgtttcataagtatcttctcccataggctagacacctccacgattgaactcttcatccctcgtcctaggattctgaccaatccaccgttgagttctcctcgagcgtgttgtccgcgtactaggaccatcgtcaggttgggttcatcgggaacgtgtggtccgtacactggggccaccctcaggttcagtcctcctagaacgggtggcccttctagactgcaggctggtggacctcctggagcccatgggctctttcctagaaggatgattactttcctcatgtggggtgttagcattttatggattttcagccatgaaggaggtcgtttttcttcaaaagaagggagggttttttttctgagcttttttacaaaggctctcaatgaaagcaccaaactgttaacgcagattttcattaaccaaatttgagcctcacggtagtgatttcacacagaaaaaatagaagctatagaaataaaaataggaacacagggttttctacgtggttttgtagttaaaattctgca

SEQ ID NO: 394572 - DNA, 1073 bp, Cannabis indica
aattgatcaatgtattttaatgaaatttttaataatagttaatgaatattaaattatcttgtactgaataaacataagataattgtttttctggagtaagtaacttgttacttaattagtttacttattatagttgaggttgtttaactagattttttttttgcgtgttcttttttttttctttctttgtgtaatttattttattggtgttatgcttgtgcttttgtttatttatggtgttttaaaataaaaaaaaaaatccctactatatttcctattcagtttcaatggataactagttactttattatgttcaagctgagtaattggttactctataatttattagggatgttgataccattctccgtaaaacgtaaggctacaagaataagaactaaattatgtggaaactgtaggcataatacaaatgaaatggtttttttttttggcttagaagcatgaaggtaactaaaaaaatggttttttttagagagaaatggaaatgaaaatttctcttaataagcaaatgagacaataatctattacatgatgacatttcactcaaagaggagaataaaaaatggaataaaaaccctaatagtacattcaacaaaaattcaaataaaccattaatattgaagtatcaaagaagcaccaaaaatggtagatattcaatttaaatgaacatgtgacaaatcacatctattaatgactatcagccaaatatcttctactaaaattttggtcataagaacccttttattcaatctatctatatatataaataaaggaaagcataagagcattgatgtggcatcttttccttccatttctctattttctctattttgttatgttttctaatttttttctattgaataatagaaaaaataatgtaacctcccaaaataatgtaacctccccattattaattttttataatctattagtattcttttaaactattagtattctcatctatatatatagatattttatttacacccctaaaaaatatgatatatgtatagtaattttgtaaacttatataattgattaatctttaacaa

SEQ ID NO: 394573 - DNA, 579 bp, Cannabis indica
tattcttgataccacgtaaaaatttgcgtttgtaattatttattttatgttcattttatattctatgtgttaatttgtttattaatcttaaagagtttctgttctaatattttctgtttttatttgaatcattcataatactactggttaattatttaatttaaataattaaaacttgaccataataaataacagaatttcagttttaaattgcatttagtattgattagaaaaagtaacatctgagttgatgtactatcttttgtataattgagtttttttttttttaaacagacctgttctcaaaaaaaaaaaaaacttactgtttttttaaatttgaaaatatatacctatgtatacatatgtctgtcttttttgacatatttaattattttgttattatctaagcatttgaaagaaaaaaagttatgaaacatgagaacactaccaaaaaaaaaacttaattttaagttcacaataaaatttagtgactaaaaataaaatagttaattataattattattattattattgtattgtgtaaatttgaaacctaaattttaaaagaaaaatttattt

SEQ ID NO: 394574 - DNA, 1171 bp, Cannabis indica
tatatatatacatagatatatatcttctcatagggtttctaatactacaacttatgaattgctaagaagaaatgaatcgaatgtctttgtgcatcaaggaagcaaatgattcttaacatcttcctctaacctcaatttagagttgacaacagcaagctagaaggttgaatcacagagacagcccagcaaagagcaactccaactccatttcttctgatgaagatctctggcacataaggaaacaatcatatgagtacaatgataccaaccaacaagtattcacttgtttttgaagctacccttttctttcgtatgcaatggcaagtatcaacactttaaattacagatcacaaagacatctataatcaagcagcattacagatgaaaataaaaaagagtacaataagggaacactaagttctgtgtacctggacagacaaaagctgcagaattttattgagaacccgcagtcgatgagaagcataggtgcttgttgccggaagtttattaactctcttcagctcttcctgcacagcagccctctttgcctcagacacaattggtgggtgtccacattcaggttgagcaatagctctatcttccattttaacctcaagcgaattgctgccttgaaaactctcagagcatccatatttcaagtgaacctactcacatatattaaaaaaaaatttatcacaaaatcagtctttttattttgaattagggaccttagataagttcaaataaattaaagagataatactgcacaagaaacaaaaaaaaaaaaaacaaaaaaaaaaaaaaacaaaaaaaaaactaacaaaaggaaaaacaacaataaataaaataaaaaaaaaattagaaaaataacaaacacaaaaaaattaataaaataacaaaatgaaaaattaaaatgtatacctaatcaaaaaaattaccgaaaacaaaattgaaaaactaaaaattaaaaattaaaaatgaacgcgtagataaaaaaaatcaattagatcaaatacggtatcaaaaaacagtaaacttaacaaaaaataaaaagttacgtaaaaaaataaattagattaaaaaaaggctccaaatgtaaatatgctaaaaaactcttattattattttgtgtttgtcaagtcaatccacgtttaacttttaaaactaaccc

SEQ ID NO: 394575 - DNA, 1012 bp, Cannabis indica
caaataatctccattaaagccctcaagttggatcaggcaaggcatagattcccttcgattatcccagcgacttttaaataggatattgacttaactcccattgtccaccaaaacctgagacatcctttagttagcgatatgagcttcgatcaccagtgggttattatgggggagatgcacgtgtctggcatcctcttctgtgaaagtaattaacaaatttagcatttgtaacctttgagatggtgtttgtactagagcacatgtttccctttcctgcacaaactcattaaggtaccttttttgattcctagtgcttctaaaaatatgtgggcctctagaaatggttgcaacaaggatgtctagttactctaaatgtgggccactttgttgttgggccaaacgatatgtgattttggttagagcagctatttgatcttctagaccgtccaatattgtcatttgggagctcacgttcacggattttattgttgatattgtttcttaattctccttcgtaacacgttaggtcccagaagtcccaggaagatcccttccacctcttgatggttagtccgcgagttatagacatgaaacgaacattcgagataaagatgcaagctctcgatactctcaagtcccctgagcttgggggttaaatgttatccctgttcctaaacgatttctatgtgaaagttacagaagggtgccacatcggattaaatactgatatcataaaccttcccctaaacaagattacagaagatgctacagtactcgaaagaatgcttctccagcgaaggctgagatgattttggagattctcaccttatgcttccgatattggaagtggatgggagtcgcgtacactccaagatgatcgcagattggctaatctaggaagaccttagtcgaacctccttgaaacttcttaaggcctaatttggagctaagtttggcagttgcatatcttctgacaccaaatcaaatcctgtcccctacgtcagaccatggt

SEQ ID NO: 394576 - DNA, 502 bp, Cannabis indica
tggtcaatggaaatttgctcaaaattgtcattttaagccgctgcattttaactttgtttgtggtggcagcaatgattcggggactaaacctgttgagggaatgatcaagattaatgtggatgatgcaacgtttgaagctgaaaatgcatttgggactggtttcattgctcacgactcaaatggggttgtcatcttggcttctttggcctactcgattggttcttcaagtgctcccgtcgctgaaatgatgagcatttaaagaggctttgagttgggtaaatgcctctaatctgttgaacatcgttattgagactgattaccttattgctgttcaagctttgcataactcgatggatatgccttttatctttggtcttattgtgcaagagtgcaaatttttactatcttctttcaataatgttactatttatcatgttaaacgatcgactaacaagaccgtgggtcgaactcttctttggtgtcaaggtaatagctatgaata

SEQ ID NO: 394577 - DNA, 889 bp, Cannabis indica
taaaagttaaatttagtcaaaaaaaaattacattatgactaaaggattatcagtaatagtagctattttttgtggtgtaacattatttaattgtagaacaataattaattaatatatccatgtgaagtgaagattaaaagggaagcaagtaataatacttgattgataggtggaggcccagagaagaggtgtagacgatccacaaaggccatgtctgacataacagcaagggcgacaacaagagggaccaaatatgaccatttcttcaatttataattagcagagacaactggtaaattagcattctgttgggtcgtccctgatcttcttcggctaccaactatagccatctctattctcttctcaaatgtttaagaaaagaaatatcaaatataaaagcagaagaaggtagaagatgttgttgtgaagagaaattgaaaaatggagagtttatttatacaagtaattaataactaattacttgagaggtggagacgtagtgaaattaacaaaaatatgaatattattcaaataaagctagagttagtgtattgcaaccaccacgtcctctttccttaatttgtttcacacaaaaataataaataataataaaaacaaattaaaattggtttcttaatgagatatgaaagtgcatgatatacatacataatgatcgagattagagaattagagattttttttgtttgttatattattgtttttaaagatagagattagagagtgcttaagaaataaattagagatttttgtttgtttattattgtttttaatgatcgagatccagctacagttaatgctgtagtaaaaaaaatttgtgatagaatttctcattttaaaaagatgagagaaaaacacgtaaaaagagaat

SEQ ID NO: 394578 - DNA, 854 bp, Cannabis indica
tacacttttagattccaaagagcctcgtttctgcaataccaaatcagatataccattgcagcaagtgcaacaacatatacttgtcgtcgaaacttgctttctcttttggctagcctcttcattagaccattcaccgaaatattcttaactccccaatccagccagtactgtttgacttcttttaaacaaccatcactcacatggtcttggactattttgaatctaaatagtctttcttttaacctcaaccagtcaataatagtaagccacaaaatgtacctgtatttcaaaattgagagtctatcacagacacctccttgccatggctgaatttgaagaggagggcataaagcttcataaatgtctttgatccgatagctttgcttagaaatatcaatagtggatattaggggtgggcatccgatccaatccaacctttttttcctcatccgatccaatccaattagtaattggatttggaaaatcatcatccgatccaatccaattagacctcaaaatccaatccaatccaatccaattactaattggattggatcggttttttaattggatatccaattacacacctaaatttcaatattagcttaaaaatataaagaaaaatacgtaaaaaactaagtatcactttttatttaagtttaatacttcataaatatactattcttacaagtgtattgtagctaaaagttttaaataattaaaacaataacatttctaagtaataaaatagaacaaaacatcatgaaataaatacactaaacaatcaagtgttacaaattcaacatacaaaaaaatctaataaaaatataataaatatttataatatttttcaa

SEQ ID NO: 394579 - DNA, 528 bp, Cannabis indica
tgattatatctaggtgtctgcacgcttagatctatcaccattggatcgactagatcagtttgaattccctcacgagttacaaccatcctatatcctatcaaaaacttaagacaaacaatttggatatcttctctctcaatgaaagcaccaaaatattaatattgcttctagccagcgacaatgagtcttaattaaagcgattagataaaataaacaataaaaagtaaagagtgataagtaaaagtaaacaccaggatttatagaggttcgatcccgtgatagtagtaatagcctactccccttttagtgatattaacttctgagacaaagaatgaaatattccttcttgaaagctcttacaaaaggatcattaagtaattcactcttagatcgtaatttctctctttgctgttctctctaattaattttctatccctaaatagtgaaatgagaccactatttataagagctcgttacgtaggaatagtttcccttaatctataagaaataaaataggaaattaacatg

SEQ ID NO: 394580 - DNA, 873 bp, Cannabis indica
aaaaaaatgtgtattggtgcactatgagatgccataaatttacccttaattaaattaatttaattaatatataaaaagtgaactaagtcatacctacctagtttactattagtactattaaaaaaatgaaaattaattataaacaataaacggccactaacggtatcaccccggaatttattcaatatatttttttttatttatatatgataattggtataaacaaatgaataactgagagtccttacaaacaaaaaaaaaattgaataaatgagagagatcagattcccctattctaataattaaatattatatcagttttcctattattttttttattacctatatattatttccaattaaatattatagaaatgtatggacatcttaagattctaagcataagtatacaaaaagtgacatattattattagtgtaatttattaatattatattttatatattttaattttttttaaaaaaaagctaaaagatatgggtagtgtttagtactttcatgtgtgtcatatcgttattagtaaaattaaatatcaaattgattcaatatcgcttagagcatatgccgtggttaaattttagaggatgattacttatgtagaacgcttattagcaaaacacaaaaatattataccattagagataaattggtgctgccactatatagtattgatgttatctctttattaaaaaaaataaagatatataaataatgtgataatatttatataattaaaataaataatatattaaaatataatgtgtgagataaaaattatagcagtatttttagaagtaagagtattaaaaataatggaaaaaagagataaaataaaatattatatttttgaatga

SEQ ID NO: 394581 - DNA, 957 bp, Cannabis indica
atgcttagagagagtagaggatctgtagaactggctgttgattgatagtcggattgactaaagggaaaattaaagttaaagggtaagactaaaatgtacttggggggttttgaaagggtaataagcatttaattgggttgaaaaaacatctgagctgagatttggagtataatctttgtcaaagcaataaatgccccaattaatgcaagaaagagaaggttgacaaaggaagaagagggatcgatgcccagcgccaccacataacccgtatgggtggactagaaacccatttcgggtaccaatcgaagacgggagaacatacctcctgaagagtctagagagaaccattcaacataaattagtatgttgtaaaaactaagtttacaagattaaaatatgtaattgcctttattatacgtaagagtacaggtcacacaataatataattaaatttcacgttaaactcaaatttgaaaagtttaacgcgattaagtagtgtatattaataaacaaacataaatatatgaacatgaaattatatattactcttaataaatgataaaatgacaaatttaaccttgtttaatttatttttttatttatgtggccaaatagatattaaagaaatcaaaaatgtgatttagaaaaaaaaaaataaaaaaatgttaatggatcatgtataactaaaataacattatgacatgtttaaataattatgttgtgtcacaaatttacctatttataactgtttcatgatcgtgtttacattttataaaatgctatttaattgtgtcatgctaaaattatgttgacccaaactacaaatcatcaatatcaatcaatatcaatatcaatatcattatcaaaatatatatatatatatatataaatataaaggaaggtttttaagagttgaggtggcttcatctccttctattttcctactttctctaattt

SEQ ID NO: 394582 - DNA, 810 bp, Cannabis indica
cgacgtgaataactctattagctctctctctctctctctctctctctctcaatcgctcttccaagctttctctgctgccaccatcggccgtctccaggtccgccgccattatctctttcatatcttcgccctatttatgtacgtaatgtattattttctcttctttttttggcttaattttttattttgatatccttggctttagttttagttttagttcctaaatccgattattgacaatggagcttaaaagcgaagaagaattatctaactaattgtaggtgtttttgagttgatgttgaagagtgttatttgttgattataaataaccaagattggtttttggaaaaatggaggagaattaaaattatatttctattatatcttatttatttttctaagaaattgtgcaaatgaattttactcttttcccatcagagattttgggttggaatcttagatagtgaagttcatttcccttttgagtgtttttgtaaaaatagtcattaaatttaagctaccaaaaattacactatgcgaccttaaaaagactattatggtcgttttgtgatcataaatatacactatttcaccataatcacagtgtaaactcaatgtagttcttttgctaatttaacattttcaggttgttagtttggaaaattacccatttggctctcgttatgcatttgggcgtgttcgtttgcagcttatatgttcatatttgttggtttagcttaataccttagattgtctggtggatgttgatgagggttgtttatgattttcaggatttttttcggaatttct

SEQ ID NO: 394583 - DNA, 812 bp, Cannabis indica
tatataaatatatataactaaatactaaataactaaaatattgagttagctagagtgaaattactgagttatattagaacatgtaaattacaagtattaaacaatatacactaatcactaaacattatatatgtcacaaaatgaataaataaataaatgtaggtgaaccctgatcatagataatatcattgattaagctatctcaaatcgacacaatggacaatatttactaattcttaaccatttaatgatacaatgatgattggaacatgtgtgtacatagtaacctagtagcttgggaatccacgaaatcattatctaaacaaatggagcataaaagtcgatgactatctttaatccacactttctccaaagtgttaatcgttctttcactcgttccaacaaaaccactattatctgcagcttgaagtggtagtacttcttcatcaacagtaacattaatatccacttctatacttaaatcgtcgccatgttcatctctccacttctcttttccgtaacttataattttatttgtcacagatgaaaaagaatcgttattgataacttcgaactgtgaaaataaatcagttattagaaatctagcctcactttcatcgtccatcatcaatgtctggtatatatggtagtgatacacaagtccaataattgacataattttgtagaaacaataggtatgaatatgtgagctagtaattagtgatgagtgatgtggcaatattctgattttttaattttttttaaatatttataattattttttaaaactaatattatgtggactactaaaa

SEQ ID NO: 394584 - DNA, 976 bp, Cannabis indica
cactacaaaaactgctacttttagtgacaattgtttagtcacaacataaattttttgtgactaaatgtgatttttagtcacaacaaaatattacttgtgactaaaacatagtatttagttacaagttgtcactaatttattttagtcacaacaagtattgtgactaaaaatatgtttagtcacaacaaattgtaatttttgtaactaatgtatatttaaaaaaattatattttaactaaaaattatcactaaaaaaattattttttttagtgattaattttattttacgcattattagtaataaacatttgtgaattaataaacatattatttacacattagtaataataaacacgccaaaatctatgatatatatagacatatatatcaagtcaattattattaatattaatgtgtgtttcgtctgtctcccattatgtataaatatctcatgactatatatacacatatatatttatatactataattaatccaaaattaattataattgaaatcccaggtgtcttagcagggtaaaaagaagaagttcgatcatggcaaacaaaaattgggtcaaatttgtcggagatcaattcatgatcgaatatatataatatgtattaatattaattagtaaattaattaattaattatatatatatcatatacatggattgtactatatatatataaataaataaatagattaaaaaaataaaacaataataccaatatgaatgacgtaataatatagttagtctgacatctgaaatacatggtgcttcttggtaaaaaattgtgactacttcactcttcacataataagtatatatacttatttagaaagaaaaaaaaaatatttgtatttcttaggtgctgcagcctacattcactacaagaaaaatgagcattactgaggacaaattttattggtaaaaacccctgttttcgtcagtattgcgcatcaatgaggac

SEQ ID NO: 394585 - DNA, 1869 bp, Cannabis indica
ttttgggcaaaaccatgataatttggcttttgattctccatttcaagttctcaagtaatctgttacaactccgccgctctccctgccatatgaacttattccgagcctcccaaatgcagtatactaaacctgcaataacagcagccagcacattcttcttgaatctactgacctttgatcttcctatccacctaatgagcagaggcagatctgaagctgaagctctccaacttagccaacacttggctgcttgaagacattgtacagcaaaaggacattgaaaaaataagtgttgtgtgctctccttttgtgtgttacataatatacaatattcctccacttgtagtttaaacttcaaaagcctatcctttctctttagcctattcaacattgccaaccatagtataatactatgctttggaacatttaatcttgcccaaacctcatggctccaagacacatggtttgtacttggtttaaacaaagtgtaacctgctgagatatagtatttttgtacctgaaatatagcaggatcttgcattgctttgaggttgtccttgagagctacaagcttcttccaataccaactagagtgaatggaagccaagtagccccaccagtcctccctcttgatgtacacactttgaacccatcttagccataggctttctttgttgtttgcaatagcccatatgtatttgcatatagcagccttattccattcctctactcttttaattcctaatcctccatcttttttctgttggcaaacatctccccaagccacagcccctgccccatagaaggtagcttgacctttccacaaaaaggctctacaaatagcctctatgctcttcaagatcttcttaggcataataaccatttggctccaataagcttgaatggctaaaagtaccgagtttatgagacttattctacatgcaaaggacaaatttctcgagctctaactcttgattctagcagtcatcttttcagccaatagttcacagtccttcctagatatttttttagaggaaataggaattccaagataggtaaaagggagtacctgttgttggaaacctgatttttccagcagccatgcattggacttctctcctagacatgttgctgtaatagcaagctattttgctaggattcagattcaagctagaagtacttgaaaacaatttcagtgcttgtaacatgtattcaatacacattaaattaaaatatctcatttttgatcttgaaatataaatatattctcagaagataccagcgaggttcgagaggctatacggtgacacaatgcactcatcacatttgtttattcaggtttattggggacttgacataacaacaaggcttacgactttaaatgagactctcggcaagacgaagtacgagctaagatggaagtttggtggagttcacttacaggggattctctgaatttattgcttcaatatgtgattttagcaaaatggctgaagatgagtaccctccccctcctactaggatagtacttgctagcactcaggtgaatattatggtaccaataatttggttttttataattatgattgtggtttatgttaatccttacacgtatttgcatttctaaaatcagcaaccatcatattcctatgtccaagacatgaagaatgaatttagcgttggagatgttgtggaaatcagtagcgaggaagaaggttttcagggttcatggttttctgcgactattatcaactacctcgggagtggcaaatactactatcagtacaatactgtttgatcaaatgatggtggtgttggaaatattttaccgggatctagatttactaccatgtatgtttcattaacatc

SEQ ID NO: 394586 - DNA, 1357 bp, Cannabis indica
aaaagtctttacaaataataatcataaaagtattttatagtacaaaatgatgggggtgcattacatgctaaatatgtgtttatttcatgatttcattttagtactagactaataaagaaaattaagtttacttaatcaaactttttttttttaaaaaaaaaacatattgaagcgtgtctttatcaaattgaaattttaatgtatgttttattattgaaaatttttaaataacaataattaatatgttaaattgctccattaattttaaaattttagtattttcttaaaagttgaccaaaaaaatcatgccctcctaaattagtaattttgctttccaaaatggtctagttttagataatatttttaatctttgtaataggctccaaaatattaattttctacattgtagcagatcttgtaatggtgttgttcattctttggccaaacttactttgacaaaagaaaaagtataatttggtggtcagggaatcctatttgtattaaaaacataataataacggatgctataattaaataaattttcactcccaccttaatagattacttgttgctcttggttgtttggtgtgtgagacattttcttaaaaagaaagaaaaattgctccccaaaattatgattactatcatattttgctctcaatttttattactgccaaactacaacccttaaataaaagaaagcatgtcagtggtaaaagtttaggagataaaatatgatagtaatcatatttctttcaaggataaaattactaattacttatcaaaaatcttatgaagtctaacatgggcttcatagaatcatattttattaatgttgaaagttttgaaaaatatttaactgctaataatgtaggggcgtgattttattagacacagtgtttagtgaaaaatacttatttattattattttttatttccttaattatttaaaatattttttttcttgttcttttaagatttgaattagattttcttaaaatttattatagatacaaatatttttttttgaagtttttaaaaaagagtacaatttggtggtaattagtacggtaaaaacactaatttataataccatattagtccttaaaaaaaccaataccatatccttttttaaaatatagggaaatttaacataatgattatatttctgtaaataaaaagttgggctatttacaaaaatatgggaaaataaagataagttttgatatatatggcataaaaacttaattacactaaatatgacattttttttaaaaaacttacaaatatgggaaaaagtcttgaggaatgccataaaaaactttaaatttgtgtttctttttatttattttttctt

SEQ ID NO: 394587 - DNA, 885 bp, Cannabis indica
aaatgtatttttttttgttttatggtatatcttttttaaagatgatatttagtccatatgttataacataatttggttgacgtgacatataatattattagatgttaaatatatttttatttttaatttttgttgtttatatacatgcttttattgtatgatgtatgtttttccttttatagtataaattatattgtataatatataatttattttagattatgtttagtttctactttattatatataaaggtggtatctaattttgtagacatggtataattattttaatggtggtatataagtttattagtatggtatatatatatttttaataatattattttttattatatttttaattgtagtggccatatatttttttattgtttgatatatatttttaatagtatatagtatactatttatttaagatgatatttaatttttattttattatatataatgattatatataaaacttttgacataatatacacatttgagtggtactggtataattttattagcttaatatactttttgagtataaatatactaattttatttgttgcccttgatttctcctaaaatatgtggacacggataaggctgacacgtggatctgtaagaaccaacgcttatggaaatcgactaagtcttagacgaaagaggagtatcctaaggaaggtgtcttccggagaagagcataagaagtatctttattcttcgggaggccagaggcatgctaaggcagttccgggaggtgtagagatctcttgaacagtcacctcgcatttaatgccgcatgggggaagacgtattgaaatctccataaacgatatgacagatggcgttaccccccttttttcggctattacacta

SEQ ID NO: 394588 - DNA, 643 bp, Cannabis indica
attagaaactggcgtgatccctcgatataagaggtaataatcacccaaattctctgagttcttctactgacggcgcgctgagcagagagaaagaaggaagcaaatgagatttaaaaaggcctgcaagagtattaaataaaaatagatcttttgagattcactgaagtgcattaaatgcctaaatttaattagaaatgatgagaaaataacataattagaggggaaaactaatcgacggttacacatcatcacaaggaagaagagctagaatagtctagaagaaaatggaaaaaccctaagaaagcattccagagcctttataaatatacatgttgtttactactttagtagcagttcaccaaaaatcaggtttctaaattattctagttttaatttttatgtattatgttttttcatttgggcattcatttaggtgtaaattaaatattttgattaactcagtcctctcattactcacttagaaattattagcattaattgtttttacaatttaaatttttgagattatttatattttcttcaaattatttattttgttttgatacttttattaatattttattagttttgttttcgcactattttttgataggtttggatgccttttatagtttttgtgcca

SEQ ID NO: 394589 - DNA, 1034 bp, Cannabis indica
taaaattaaaaaaaaaaaccctataattatttcttattaatatttcttttatcagtgaaatttattattccaaaaaaatcaatttacatcctattagcatcttcatcctattagcatcttcatcgaagatctgttttccttctatctatacaatccttgaataataatgtataactatgcaacaattaatcaaatgttttgagttacaagtttgaaaaccaataagtatcaattagtttgacatttttgggcgagttataaattgctcttcttttcacatttcttattaatattatatgatgattaggttgttcaggttttgtttaggtttttttttcttttttcttttaatagaagtgacttatatttttatatattttttttgagttacacaccagtgattcgatctcatgactttcttatacttttttttttgagctagcctcaagtggttagattttgtttagggtttatagtaggaaattaatggccaaaatttttgaaaaatattacattttttaaataaactaaatattacagaaatattattgtatatctaataggcaaaagtattgctatttttttttatggaaagggtattgctatttacaagctttcaaaccatgctatattttcttaattttcaaggccttatatcttggatcctacgtttaatatcagtcttaattttctttataattaaaaaaatttataaaataaatcaaaaatttgaaaaagttcacaaaaatagtttaacaagattttttttttatttttactctttaaacttttttatttacgaaaatacttcttcagtaaaaacaatataatctcttttttttttttcaatatagcttacttatagttgttgtgatgttatttttttcattgttttatagtttatttatggttgatttatagctgtcgtagggttaatttctagttgttttcttaatttttattgagtaaagtgtatttttgtaaataaaaactttaggtcgtaaaattataataaatataaaataatatttttt

SEQ ID NO: 394590 - DNA, 1393 bp, Cannabis indica
ttttgctaagacacactatttagcgtcggttagaataggtttttgcgtcaattatgcatcgatgcaaattttacgtcagtagtaaaactaacggtaatttacttcgggcttttaagccattttaaaaaaaaccccaccctatatattatctccaccgcactcaaaccccgttacactcaacgcctctctctctttctcttagctcgttctcatcttcttcggcgtagaccaatagcccaactccaccaagcagttgctgttacttgaagccctgagtccactagctgctgccgccgtcgcacgaaatggaagccccactttaagtccttagtctttctcgttctccttcaatatgtctctcattcttgtttgggttctccatctctctctttatctttgatttttttttttttgcaggcgatggtggtggtctgatggcttgtcatggtaacgatatcacaaaatacttatttaaaaataatgaattaactcctctatcgataaaaaaatattagtaacaaaatcaggatcactcatcgatataaaagaacaataatatccccacaattatgtggtcaccgaatagatagatttaataagttaataaaatactaaaataatatctagcatccatcatttctcatttttaactagtacatagctaatttaagtcatccagaccatctattcaagcttaaatataaaattagtttcattagaaagtttgataagtagaataagactaaactaataacaactttctttctcaacgataccatcctcatccactagcatcaaactaagttcctacaatggaaaaaatatataggggtgagtctataaagcccagtaaaaaaacaactaatatcaaaggattcttggttgatcagggcttttgctgtatagtcgctgggcgataaaacttctgtatatgaatagcaaatttttgtaaacgggatcccgagattttataaatgtattactttatgtttctaattaaataagcaaaattttaattaatcacatttttcattaatttcgttgattagcaacaagctgcacagtgcgtttaaaatcacactgacatgcctaattagttagggcgttacaagagaccttgtggaactgagaaaatatttatttcctgtgtaatcaaaacattttcccagaaagattcaaaaataagaatgatttgtaaaatatttaaatttaactacaaaactacgttaattcttttgtattcaatatatttatatttatcaagtattaatatttaatttttattttttaagaatttatttatcgttaataaaaatctgagttaacattgaaaaaaaaaaaccaaaaatagatgaagaaagtaaaaaaataggatatatcatcaatatagtta

SEQ ID NO: 394591 - DNA, 1071 bp, Cannabis indica
tagtattttcctttttttatttatactattatccattggcgtcgcttttgagctaatacattcgtttattgtgtcacttctaataatgaacgtgtatatattatactattgcaacacgaaaattgggaagtgtttgctttgcatcatttaaaaatcacgacaaatacatcgtctgttataaaccatacgcaaaaactctatattaatcaattgcatcggttaataggaaaaaaagtcatttttgtggtagtgttagtaaaaagaaaaaaaaagaattatgtaatgcatgtatgacaattaattcatattaattagataattttggagtttatatatagaacaagtgggactaaagtactaaaaattgggacagcccatgccctttaggtgtaagaagatatggacaccaccctattaaatcattgtcacccttttattatcttcttaatttatttcaattttcttttctttaattaatagatgacaaaagggacaagccaattcaatagctaagggggtcggagccatgcggccttgccccctcctccatggcccaacccggcccgcagtggagcccactcataaaccggtccctgcgcccccgtcctgcaccgccctaacaccactgcaaaccccctactggtccccgcaccctggccttggctctttgctaaagtctctccaaaactatactatataatatttaatcattgaatacatctataacatatgtatattattattattattataggtcctttgttgcctcatgtacgtctttatttaatttaatgggccaaagtaaaatatacatatataaccaaaaaattgtaagtaaataagatttggaattgagagatatatattagtgatatatattgttatatttgttgttttctaagtgaacaaaggcagtcggaaacatcacctcagtttgtgttttctgtcgtcttttagatgttttccgagaaatatatatatatatatatactaggtaggagtgtaaagattagttttaggtaaagtttagttaattttttttattttttcttatttagattgtatgtaaag

SEQ ID NO: 394592 - DNA, 1031 bp, Cannabis indica
catttatctctaatttggacttgagtgaaattttgggtttatacgggatgacaagttcattggggcactttgtttctaaaacttttggaggataaacttttgaaccagattgggacattgttacaaaaaagtgagtaatcccaatttctagatgaaatttatcaaactagaagcttataaatttgagaaacccaaaacgctctgcctaaaccctaaaagttactcaaaaaaattcaacctaaaattgctaaaaccaaataagatgacaaaggtgaaaattataaaagtagtgatcaaacccaggaatgtaaaataaaagagcagatatgaaaacagagaggggtgaatcacttactgtttgaagttgagttttggcgtgatgaatggttctacaataaaaaatgcagcgaacggcttggtaatctctttgaatgcttgaggtcgaaaaataaatctaataaaattcgcaagaagtatgtcaaagacaaagatggcatccaaagcttcgtaaaatctaagtggagttttttcacagaaaatctcaagaaatctttgaaatggcaaagatggtgaaaatgtggtttcttttttcgttttataccattgggttgatctccgccagattaagaaataaacgatccaatgggtagaatcgagagggaagtggaaaagatggttatttaatgctcatgatgtgcttcgaaatcacaaaactaccaaaatcgaaggcatgcatttttttaaaatggattgtgacaaatataccctttgtaatcatttaaaaagtacttttcactgaaaaagactttttaaggggcaattattatacccaaaatttggctggcacttcagagaatgacacgtgtcaaccttggggaatacgaataagcgaatataatgccaattatattacaaaaaatattaaatagaataactcattaaattcaaagtcaatagggtatatttataactcgcagactgcatagtctctagcgagacaagattgtgcgaactattgattcacgtattaa

SEQ ID NO: 394593 - DNA, 756 bp, Cannabis indica
ggatcctacctacaagatgagattgtaatggctgatgcataaactgacatactttatttacactaaaatctatgttaggtctcgttatggttgcatattgcaatgcacacacaatggacctatatgctgtagcatcttccactagatcactcccatattgagacaatcttaacctactattcataggagagctttgagttttcatttcttgtatttcagctttacttagtatatcttgaatatactttggttgagagaggacaacaccatctgatgtatatatagcatgaatgtcaaggaagaagttcattacaccatggtcttttaaggaaaacttggagcttagtgcaacaatcaaggaggagactttttaaggatgactacctgtgatgaggatgtcatcaacatagatgagaatgtaaatggtgatggttgctgtcatgaaagtaaagagtgagtgatatattttggctagtgtaaagccaaattggatgagaacaatggaaagcttctcaaaccaggccctaggggcctatttgagaccgtagatggccttgtttaatttgcatactttaatgggatgtttaggatcaacaaaccctaaggattgaaccatgtaaatgtcttcatttagatccccattaaggaagatattattaacatctattgccttacagtccaccttttatatagagcagggccggccctgaaatgtagtgggttatagggtaaaaattattttttgggcccttattt

SEQ ID NO: 394594 - DNA, 545 bp, Cannabis indica
ttagcacaatacgaactaaaaacacaatctaaaagtaaatatataaataaatgagaacaaataatgagacattcacctcaaatgcaattgataaccataattaaccaacacgcccaaaatgagaagagacgtcactgatgactgctgaccaaagctttgattaacgtcaatgaatagagaagaaaaagaaggtagccacgaataagcaatcggcgagcacagtaaaaaagaagaaggaaaaaaataagaacaacaaaaagaaagataatctgaaaatattagggtagatggaaaagatagagaaatagaaaatgagaacttacaaaattaaaatattgtaaaatgggcgaaaatttacaaaaatattgtgacacaaagttttttagatttttattataccaactgttatcctattttttgcactgtgacgtggcagcacatgctggtgacacgttgacttgattccctatatccgctcgagatggatgctccgagcagggcaccgtatacacttgcacggacgatgtcttcccagccgagcagtg

SEQ ID NO: 394595 - DNA, 822 bp, Cannabis indica
aggtatgtacatgtaaattatccctatataattggggcttcagtccttggcattggcccagatacataggattgggcttttgggccaatagagatcttctgggcctttcttattccaaattataacaacaaaatagaatagaagaagatggaacagtgtgagagaaatggaggaagccatggacgtggagaagcttcgatgcgccgaaggcaattgtatggcccaacattcttctttgttcttgtttggttagttactgtgtttgcttattccatatggtttgttgagagagagagagagagagagattaaattatactcaacatgatttataagctgaaaaataacaaactaaagcagctgatttttattctatcaagtgtaataaaattatttttatatcgatatgtgatttgttgggggtaatgtgaggaaagttaggctcttcaacatatgtgtgtaagtagttgttgagtggttcgaccatcattttttgcttttcaattctttaggagattcttaaatagtttagaagtagcagagtattttagcttcttgcctttctctgccattgatctactatttctgtggctttgccaaactaattaagataattaacaacccctcaaactcgttttaaagagatttagtttgtctctaagaattggtaatttaaagagtaatttgcggcaaaaccccctcaactatcaatttacttgcaaaaaaccatccaacctcatattttggtgggaaaaccatccaaagtactgttctgtttacatttttaaggtgtcgtctgtccagcctcgttaagtcctaattt

SEQ ID NO: 394596 - DNA, 1212 bp, Cannabis indica
taaaaaggttattccaagaggtacataatcaactattcctattgtaatcttttaaagtaaaattatttaactctactcattttgataatctggttatgaatttgattatgaaattgtgattcatgttaatgaaaactatagtaatatatatgatttaagtttctttgttgttttattgaaaatgagaacctggaaaaaaaatatattgagaaaaactctccaaatttgtaattttggcttccaaagtgtgacttatttttcatttattaccaaactcaaaaagaataatctcttataattattttgctatgtgaaaagttggtgaattcgttaatgtttcatatgacagtgcctttataactttcaataaacctaaaaatattgtcttcttaaggattaaacaagagttaagggccttagtatgctatcctgaaataattgtaaactcagttagagtattatgtcatggtattgtgttttagtgtaattgttaatttattattttgtaaagtggtgtcctctcttgggaataattctataacatttacatatagtaatttgagatgctagaaaataataattaatactttttttttaattttgcagatgtgacaagcgaaatagaaaagagcatcttattttgaaggcattgtgttggcaaactatagtatggaagaatattttatgctgatagttagagtactttcaatattttgaatatgttgaatatttaagaaaatttacatgactattttgagaatattttgttgttaatcaacaatgttgaatgcttttaaactatggtggattgttaattcactattgaatgctttccatttctactgtttgcaaattaagtttaattgagaagactaagtgcatattagaaagcagattttgaattatatgaatagaaaataaaaataaataaaagagaaatcacaatagaataaattagtgtagtataaattaatatataataaatatttaaccttatctaaagattaatataatacaaaaaaaagtgttataatacctattacataacatttttcataagtaaataattcgttatgcaatccttttacataatgcaagaaaagtattatagtaaagtatattataacacaagtatataagtaacaaaatgtgttatataatgaactataaataagataacaaaacagtaatctatttattaaaataacataa

SEQ ID NO: 394597 - DNA, 745 bp, Cannabis indica
tcagcttaacatatttgttttttacaatggaagtgtctcaaatactttattgccttgatttctaaaaaaaaaaaaaaaaaaaaatttaattgcctcaagttcatttttacttatggtaacttctctatctcaagtaaattcattttgcttattacgttaagtatttattttatatattttttttacaaggcgtctattgtaattttacatattgataatgtactgcgacttcatgttatggatgctttgattgaactaattattttaatagtacaactacgtacatgtgattcttcttatatatgctggtaacaagaatgcaaacaaaacttaggtggcatttgttggaggtaataaaatagaatagaaagaatatttttatttttcatttatttagttgtattttaaagtatcgaaatgtcattttaatggaatgacttttctattattttagtggaattactattctattttgaaataaaatgaaagaccattccaatgcaagatgtatatatattttaaatttaatttcatttctatttatattcttatttttattttctcaaaccaaaccacatattagagtaaagtttattctctattatacaatatccaaacatatttttgctaagcatgagtaccctttaacaagtttttgtataccctttaacaagtttaatcggattactataaagatttagccactaaaaatattacaattattgtaaaagaccgcgcaaagcgc

SEQ ID NO: 394598 - DNA, 596 bp, Cannabis indica
tcataaattagctacaatagttttcttatcgatcaaatatgagataacataaatgtggtctactaacaagagttagtcaaatctagctagctatatatgtatattggaaaatgggatctctccaaatatatacagagcttaatcaatggaaacacataaccctagagtctcactatttattatgacctaccactagttaaatttttcctagaaaggagaacaataataattgattttccttctttaatatatcttccagcattgatacaaagcaatatatagaacaccaataatatttaacacctctaaatatgttatttacaatttgttaaaatattttttaaaagttattatattaaactatacgagaaatatttaattaaactaataacgatattgatacataaaaaggcattaaacttcactgataccttttagtattttcttattctttaaagtgttaaatatctccacattatttaaaaatataggtatcgtttggtaacacttttgttttctaattttttaatcacaaaataaaagtaaaatttttatttttaaaaattttgcttttgaaaaacaaaaatgcgttctgt

SEQ ID NO: 394599 - DNA, 643 bp, Cannabis indica
gctctgccgtgcgtggtggctgacgttagtctatgaccactgatttggaatcaggccaatggataaaaaagctctcagcacgagaaaaccaaaatgagggttcgtttggctcgttgaaacctgaagatagtcaaatggaagtcgagaagcctcatctccagcgagttctcccataacgacgaaggacaatgggagctttgaggacctcaggccttggggtttcgaggctcgtggaggttagccatggccttcatcttggttatggacgaccgacgatagcccatcagacttgggtcgtgatggcacaaggcgggaaagaaggagagaccgagagagagtgaaagggtacctgagagagagagagataaggtgagaaagagagaaagagggggtcggactttctggtttaaagattgttaatggctggaacacaatcggtggtcattggcggtgtaagaaatttttggctgagaggtatattagatatggcttcatcgataaagatgaagtagcaaggcaaaagaaagaaaaaataaaaaataaaaaagaaaagaaaaaaatatttatttaattattattttattttatatttttcaattatttttttataatatttaaaattaaaattatgtggaccattaaa

SEQ ID NO: 394600 - DNA, 619 bp, Cannabis indica
cttttttaagaaaacaaaaattactctttaaggtcccaaaatttatttttgctaaataaaaaacccaattttttctcaaattttgccgcctcataaaagctaaagatgactatgcgagtgattagcaatttgttacattatttattaaatcaaaatgactgataaattctatcaataacagtataattctatcaagaacagtatgtcaatatttttttaataatgatactatattttttataatgatactgcttgtagctttttgctacatttcctttgtttaccgtaaataattttgattataattttttttattattattaattatttgattaaagatacgtacggccatgtgtacattacatataacacatatatataatatgtatatacttattgataatataattattaattacaaattaaaaaagcactgtatatagatattcatccaagaaagaacaacaaattaaatgagaggatatatataatatcaagtttttttttcaactccacgtacactacgtaaagtgacaaaactaaccaaaaaaaaaaagaaaaagaataaccagaacaaacaatcatctctcattacaaaacgtacaagttattaatattc

SEQ ID NO: 394601 - DNA, 1504 bp, Cannabis indica
agaacacctttctctctcaaatccttcgaggaatttctaaaaagtgccgattagcgtcatccgagaaatctcaaagcttcgcacagtgagtaagtttctcatctttttcttctttaacgtttgaatctctaatttttggggtttccattgtagaaaattcaatagtcttggacttgttctaagaaaagtgtagagaatctggtttaaaaatgtaaaactttgcttgtaattgaccatgtaatatgactgttgtggtattctcaccttattttcacgatattcggttctcacttttcccattcggggttaagtgaagattaacccttaatctgaggttttgaaattctgggttatgaacaatcatgcaaaattccccttttttaatcccttgattggacctggtcggtatactttgtttgttttttttttcgatacctcggccaaatactcatcttgtgtcttatcttttgtagatgaaccctggtgagttttggggaggagaacatcatatcgaccaggatcttctctaacttttttacgaggaccaacctcgtctttgcgctagttcttcctcatcaagtgataggctttctaattaaagttttgaggactgggaagtaagcattgaaggtacaccttcccctgaacccaaggtgcatcatcatttctatcctgaccaaatcacgggtgaagactacggacgcttcatttgggaactcaggaaggggtggagacactacttgccattcagttggacattcatcgtctggcaagacatagttgatactatccccgtgggccgtccaactatcggtgcctttgtcattcctatcgccacctttgtcgtaaccgttgctaggcatactaaccaaacaccgttcagggataggatgatgtcctgcacaaaacaaacaatgtagagaattgttgcaacttatccttacgtggcatggcttaccacgatgatgagcgttgaataggcccggtctgctgatgaggaggaggatagtgaaggggacgttgaagtccaagagatggaggatcagggcaaggtttgtctaaatagtccatctaaagtcgaggaagagggagctactcgaccattacgcttcggaggttacaatgaagtaggggaactagtgtctgaggtcggtgatgtcttggtagagggtgatgactacggtactaaggaatacactgaggcagttcctcaaagaaggcaggatgccttaggagctcggtgggtgtctcctccatatatggtaacccaagccaagtgaaggagtttggagaaggacgaatacctgagaggtgtcaagtgctttttcccttctccaaaccattgggatactagtccaagatagggatactgtgagtggtcgggtacccatagcaagtagggtgcaatgctgcccttgctttcgtacttcaagaggattcggactactataatctttgcccgacccaattcacaccaaagggcatcatatacttatctgccttg

SEQ ID NO: 394602 - DNA, 1339 bp, Cannabis indica
acattttttctaacataaagccccaattttttctttttcctgtggcccactttgtttcagggccgaccctgctctttacgcctgagtcttgtaaatgccaaagctgcaaatctgttgaaaatggatagttaatttggattgtgacatggaagtgctgaatgatctgtttaaaccaagggatatcgtgagtttaatccttcaaattccttcgttaactcaaaactgtcttttttggttcaaagagttgtctggattgtatactgttaagagtgcctactaactaatccaggagattaaaggagatgccaatttggaggagattttgttgaataaattttggaagaacttttggagccttaagtttttccctaaaatgaagaacctggtttggagagctgggagtggttgtctccccacgatgcttcagcttcgctcttaacatgttggggttgcatcactttgtccagttttctttgtagaggatgaatccattttgcacgcattggtaacatgtccagctgctaaattatgctgagatcgcgttggtattggagtcgaagtgcagcaagaggcaagctttttgtcctggtgtgttggaaaatttcaaatgctcgatcgggaaagaaaggagctgctggtggaaatttgttggtctgttaagaatgcgagaaatgacaggttttggcaaaataaaattgttgctatggatagcatagtttcgtcaacaaaagaattccttaaccaatggctaaatgctcaaaaagctggtttcaaggcttcattttctggttttccacctgaggacagctaagcattgggtggctccacaagacagtagtgttaaggttaatgttgacgcatcattgttcagtgaaacccgtcaagttgggatttctttggtgactcgtgacgcacagagtttgttgattgaaggctgcacgaagatgtttcatggacaattttctcctacaacagccgaagtcatggggattcgagaagcactaagttggatcaaggaacgaaaatggtcacatgttatacttgaaaccgattgtctcttggttgttcaaagccttacgtagttttattgttatgatttccatgtttggttaaatgggttaatgtatgtgagactatgcttaatgatttaaaaaatgttactatttattttgttagacgactagctaatagtggttcacaactttgttaaagcctctatattgtagcttcagtttagagtctattcctactgatttgttacttgtttggtaactgaaacaattatctaataaaattattatattctattcaaaaaataaaactttcatattcaaaaaat

SEQ ID NO: 394603 - DNA, 905 bp, Cannabis indica
aaaaaaaaatctaaaattctgttatagtaaaatagatatttcatatcatattgaaaaaaccatattttatataaatcaacttgttactattatttttttttaaaaggttagtttattcgttgccatacatttttttttacaaaaaaaaattaaattgtttgttgaaaactaattaggaaggcctgcttataataacatatagataattatggaggagtaataattaattttttttagaaaggttagtttatgtggattccttaccgatcttatatgtgttaacctttaatttattttattaaaaaacaaatgtggtaacaaattttgttgaaactaggatggcttacacatttaaattgtacacttatattaaggtatgcaatgcattaattgtagttgaataacttgtgttccaactcaaccaccacctccgagcccaaggacaagtatggatttaacagcacaaaggggaagggttttgtattgagctacacgaatgtacaaatgtgtatgatcgggtgagagagtgtgagagtgaaacacttgtgagaatctgtgatagagaatccttccttatctataatgtattcgatttgttgctgatcaataaagaaatctgaaccaatgttcatattgaatgaactttgatgtaaaacaggttaaacctgcttgttttgtctctccacttagtacagttatattcgttatttctgccgttgttttagtttcttgaattgtggtttgtcttgaatttttaaaccaatgttgagatatatgaccataaactaacaacaacaaagtagtaacaaagacaagaaatagatgggtttaacaagccaaagcattctcttgaaatcaataggattagtgcaggcaactaacaccttgatcagaacctggtcttc

SEQ ID NO: 394604 - DNA, 1191 bp, Cannabis indica
gcatctttcttaacttcgattgcgtcacccagtttctcttcacctacttcctgccttggtgaaccttcaacctccattttccacaactcgttaatgttgtatagtatatcctcgggttcttctcctacgtcttgctctatgtcttctccttccccttctgaatcctcatcctccgaactcatgtctaggaactcaacttcctttggatcctcatcatcttcctcgaattcaaaagaagaattttctgcattgtagtggctcacacaatcatgactaacagactttcttctgttatacaccatagtgattgcaggtctgatttcctcctcttgtaccatctccctctcaaagtgtagtactggttgtgtagctcttcttttctccagagcaaagtcttcccaaaattgtattatcgcctttgtgaaattctcacgagctttaggattgattgatcgtagtctgcctttaaagaattcatgcactatttgttctgggatcatctttctgagcaaagtttttccctctcttctggccccattaaaatcactgaacaccatactctccgtcctttgatttaagaaatttcgggagccaaagttttggtcccatctaatgttaaaaggacccttatgaaaataccataggtcccccaattgagtataaaaaatcggcccacaccaataagtaatattcctatctgaaacatggataggattattctttaaaggtccattaatgtaccgacccatctcatcattcaaaattggggccatagcaattcggcccatcacccccaagcccaactttggatgttcacttttgtcaacagtttgacaactgttatctaaattgatataatcatcaaagctgggatttctactaacacgtggcacccttagacttctccataggccgttaaatatagtagggagactcaccaccttcccctgctcacgaaggcacaattcagaggcttcgtaaggattgagacctaggatacagtcttatgattcggccgccgaaccatctccacaggtcaataatattttttttgggtgtagagccctaggctatgctacgtccttcaccatcccctaatttcccccatatcccgacttctccggctccgatagtgactattggaattattttaccaggatctagatttactaccaagtatgtttgattaac

SEQ ID NO: 394605 - DNA, 792 bp, Cannabis indica
tattcatttatttataataaaacgagggatgtttatattgcaatctttcctcaaatgtataataaataaatcttttgtgattttgctacctagtaatttgtttatataatttgtttgtctcaaaaataaaaataaagatagaaagtttaaagaaaccggaaaaagaaaacctttctaattttatttaagtctttactattttctgtgagatagttatacataaatattagaaaaaatatatatatttagttgaaaaaaattaagtttagactttattatacagcattttttttatattaacaattaagtttctctctatatgattgacaggttcattgcattatatatattatgtatgcttataatttctattagtatttttttttatttcgttagtgctcaataatgttatattaagcctcttctattcgtataaatagataataaatataaatatttacattaatgggtaataccttatatatacatatttacaataagaaatccttgtttatgtataatgttttaaatttttattcttttcacatataaatgtagatttacttacctcttttttctagacttaatattgaatgatgagatttttttaaaatttatgatcccacattgtttattaattttttttaaaatcttaatatctttacagatttattaattttaattttttattctctataacttttggtaatatttcttctatttgaatagagtattatatggtaagttctctacatatttcttaataagttaaccaaagacatgctttttatt

SEQ ID NO: 394606 - DNA, 733 bp, Cannabis indica
aatcacctattctatttcaatattgactagatttgcccaattcactcaaccatattgatagtcttatccattggcccagtggatttggacccttttgcaaattggcccaattttgtctctcctatttacaaaattagagaattaagccacagtttaggttttagttatgagtgcatgttgtttaggtttgattttttacttgataattctttttagcgagttttcttttttcaccattaatcatatttttttttcaaaaaaaatttattcttttttttttgggttttcttattgttcatgttgttgttcttgttagtttgattttgttgtaatagaaattgatgagtgatgaagttttgaattgtgtttgatgatggtccatgttcaagagagcggggaagatggggaagaacaagaaaagattaaagaaaatgattgatgatgatgttaacaaattgggtatggaattttttaggtttaggcaatagatgatgaagttcaatgaatattagtatgtttattaaattatgtttaatttaattttattatgttgcttaaatgacatgggccaattaaatattgggattagttgaaaaatacttcttttatttagggaaacttacaaaaatactggattttgacttactctttacaaaaatactgccacacggcaaaaataacttttatactgccttgagacttttttttttcttttatactgtaaacatcaaaa

SEQ ID NO: 394607 - DNA, 930 bp, Cannabis indica
acaaactaaaaaaataaaaaataaaaaatccatatcattatattcatatttatatatatgtatatgatagaagatgatgaagcaatattcaacaatagaaagtggagatgtaatataataataataataataataataataataatttgattatgatgaaagctctagtggtggatgataatgtgatcaaccaaacactacacaagaagctcttacaaatatgggcattcaaaacgaggtcgtttcaaatggtagagaagccattgatgttcactacttgggccacaaatttgacctcattcttatggaccttgatatgcctatcatgaatggcattgaggtaattttcattttcattattattattaattttattatataaaaattataccccatttcatcatttttttaattaattttttatttatttttaattatttttaggctacaaaaaaacttagagaaatgggtattgaaagcacaatagcaggagtttcatcacattctttagaggaaaatataagagagtttgtggaagctggtcttgatgattatcaacaaaagccattaactttcaacaagttactttcaattctccagaaagtcaaccatcatccttgacttttttatatatgtaatctcaatctcaactcaattttaacttctttttttttttttttgttttactttgaaaaaagaaaaacaaaatagtgtcattaattattatatgttaattatttcaaagcaaaaaatatatatattgagctttttcaattgttgaatgatttattataaaggctcgaatattattatatcatatgtaaaagttgatgaattttatatatatggacaagtaatttatgttttttttttaagaaaaaaaagtaaattgatttatgtgtattttatggcttatttattatttgttcg

SEQ ID NO: 394608 - DNA, 853 bp, Cannabis indica
acttctctctctctctctctctctctctctctctctctcttctctttttcttcttcttccacgagacctaaggaacggggtctaactgcttctttttcttcttcaaccacagtggattgctcgcgaaccccagacgacgaacaccgcaaagaaccaccctctctttctctctcagggggaaaatgaatatggtgtttgctatcgagtaacacatttcaagtatatgatttacaaatttaaatttcaatataggtttaagattagatttgaagatacatatgtatttttttaataaaaatttaccattatgttgaagtttgtcaaacagagaggggttagtgtgaagtttatcaaacagagaggggttgtgtgtggtgatggtcgaagcttcaattggtgtggttttggacagagctaggcgatgaaatgacaaaaataactttaatttggagattgagcttctttgtataaatatatataaataaaataaaagaaataaaatttatatatttaattatagttttattttttttaatttttaaattatctttttaataatatttttaataaataatattacatgggttactcaaaatttgttgggtgtacacctgaactaccataacacttaacaagagtttttggattgaatagtaaataacaaatcataatggggatttgaagagttttatcgaaaaaaaataggtttatataattaagtatgagaaatcataaagcttatgtaattttactgccaatatttctaatgaaaaaactgaagcattattgaaggcaagactccctagagtgatttccctacaagaaactcaattcaattatgtaaaaaaaaaaa

SEQ ID NO: 394609 - DNA, 1033 bp, Cannabis indica
agtggaaacttaatgttgctaattaaaaaaaaaaaagtttggagattaatttaccaaaatatgaagtttggggatttcaaaaaaaaataaatatgaagtttggggaccatttgccaaaacttatataatttggagactaatttaccaaaaaataaagtttagggaccaacttgccaaaacatgtatagtttaaggacatgctgtacaaataagcctaaattaaattatagagtttctactaatgatagctgcaaaagctggcataattttgtatatgataaaaagaggcaaatttattagaaactctttcatatttgtgtgtttttcaatatcgtgtgcataatttgaccaacataatatatattatgtctactttttaattataatcgatttttgagtaattgtatgctgtggaatagttcatctaaatgaaaaggtcttcgcaatcgttatttttggaaagttgttcactcactgttatcgatcccgaaaggagtcatgtggaatgatagtcgagtgcggaaggaagttccctgatgactatcatgtccactatgggaccagttctcaggatagttagctcttccctagaaaggagtttcagctggctagttacctctcttggaatgatagatccagatagtcgactacaatagtctttatcctatctggaagcgtcttcagctagtgtctttggttcgcgagcgcgtaagctagtatatgttctcgaaggccctggcgctcatgctgacgtggagacttcactaaatgaggagttggttaagttagttataaagttagttatttataactaacttaacaacctcctttcttgcagccaccgactttaggatcttgatcctaagcctataaataccgccttgactcgacatttgaagacggattgaggtacgagtttgagtactttgttcagatgagattgaaagttggagagagaaaagattaagaggtacagagggaggtacagagaaaagagagagattgggtttgggttttgtaagaagaatcttct

SEQ ID NO: 394610 - DNA, 698 bp, Cannabis indica
ttaggcgtttgatgttatcccattctgaaattgtgtggatttggtggatggatagtgatgcatttgtttactgtcgataggaatctaattgtagatatgataaacacataaggtatgagtcaaaaacgcaagagctgatactaggaggcgtgtaaagggtcagttcgtcaaggccactgaagcagctccagacggctaatacgttgttaaaagacttgtctgctgcgatgggcttctacttttttctctagttccgtggcttcttttctttcttcttcttctttttttttttttttgtttgtttgtttgtaaatggataaattatcttcttcctctcttctacggaaaaatgtataaaatattaggctttattctttttttttttagttgatctaattaaagaaataagcagtggaaaaatgctggttagatctacttatatatattgaacaaaaggagagaagaaaaaaattaaaccttactgctatctttggtatctttttttcttatgataaattcttgaaatcccaagatttttctcaatagtctcggcgaggatccggtttgtctcttcgatgatgttctagttgacggcgtcggcatcgataggaagaagaagaagaagaatggtagaagaagaggaaagagaaagaaaaagaaaaaagaagaaaaaagaaaaaagaaaaaaaagtaaaaaa

SEQ ID NO: 394611 - DNA, 716 bp, Cannabis indica
gtaccatctcccacatacatttggtcttgtccttcataatcatagcaaacaaccaagttttgagcttgaggagtgcaatgatttgttgctcccgaatctggataccaattaggatcagtggagctgctgtttgtggtcagatttgcttgtggtttctgagatgcagtaccctgattactggatccagattgtgttgatgagaaggacttgtcaaaacggtagaagcagtcatgagctgtgtgtcaaaaacgcaagcaaatttgacactgtaccctgttactcaagttcataccagaactagaaccagttctatttgcttggttgggagagaaattacttctaacaccagaaccagaagcatctccacgattgaagcttctaaacataggttgattgtactgacctgtgttgttattaaacgatgaatttcctctcccatactgctgtctaaatctcctccaagcaagatttgcctccattaaagagtccatttgttgatcttgatcgccagtaacaagattcgcactaaagtcgatttccttccctgacttttcaattctggattcagaagccagcagaagtgccttgatttctccgacagtgtattgttcagttttggtgtttgtggaaatgacgaaggtgtcgtattcgcttggaagtcccttgaagatcgctgccacatgatcacgatgttgggaattattttaccaggatct

SEQ ID NO: 394612 - DNA, 1001 bp, Cannabis indica
aaaaaaaaaaaaacaatattttacaacacttatttagtaatatttgtaaaataagtgttaccaattcattagttcttttatttaaaaacacttataaaataagtgttgtctaataaatgttgctatctctcatatcacattaaaattggcaacatttttttacaaatattaaatttatgtttagtctaagtcagttaggttagttattacagttaaattagttagtccatttctctacttatatatactactttccttctccctcaaaccaattgtaacaaacacttgatattcattcgtgtggaataaaaaattattatgttttcctattcactaatatagtatcagaagactcctccattttcaatcttcaagaattcaattgaagcttcctttctttttcaacaatggtgcgtacccgagctaccatcttagctacttccactgcacaaaatcctctagaggttgatgctgcaatcgctccaccactaccgaatgaatccattgccgatctacaaccagatacaaatcaaattcatgctactcaacccagtccagctgatcaatcatcacaagatcaacatcttgtacatcgatcaaacacagtcgatcgacaacaagaccagctccctgtctctcaatccaacaccatcgatcgacctccatatgaagacattcgttctccttattacctgagtaatgcagatcaccctggattggttcttgctactccaattctcaccgatcacaattttcaacgatggaaaagagatttcaagatttctataggtgcaagaaacaaaacttcattcttggaaggtacattacctcaacctcctattcatgactcactatgtaatcaattttcgaaatcctattgtcttcttcacaaacaaattcgagccttagtgattgagtgcatgcccacccatagcaagttagtccacaatcatagtgtgtaagactgtgaaaaatccaaacaattgaaggagtgtcgggct

SEQ ID NO: 394613 - DNA, 753 bp, Cannabis indica
aggcttgagtcaagcattcaaagttgtttcaccattaaagttaattgtgtcaaaaaagtgtaatagtataatattttaaaaaaattattaaataatagtatgtggatttatttcgataatttttagagttgattagtattggagcaaattaaaaagtaaaattagccaaataaaaaataaatgaaagaaaaaataaaatgttatattttaaaataatataggaatttttggattttttataaatggttgcttttatctgtacaacaattacgtagttacctgtcataatgtagaatgaatgcaatcatgcattgatgttatcgtggctctattattaatgttagctttaattataaatatatatatatatatatatatatatattataattgattaaaaaatatatacattttttgaacaagggagagatgtatccctaggacttaaaaattataatattattttttttttagacaataaaaattataatattattaagtgtaatttaatattaaattttatttattttatttttaataaaaattatagaaaattgttaataaattaagtataagatgtgatgctaactaggggtgttcacaaagtatccgatccaatccaatccgcacgatctaatcccaattcaatccataaaatacggatatccgcacttgtgcggattggattggattgaaaaatctaaaatccgcacttatgcggattggatgttgtttgacctcaaaaagtaaccga

SEQ ID NO: 394614 - DNA, 592 bp, Cannabis indica
agaaaaaaataaataataaagcaatgaggtaaactggtaaagaaggaaagacttgttccaaacaaaaaaaagtaataaagtaaagtgaatagaaatagaaaaagttatgtgtttgtactttgttattaatactttctttgataataaataaaagagaaatattaaaatatattaatggtgtttagcatttttctgttaatattgttattgatataattaagtatcaggtctcatataatttaatgtaataattttttagaatatatcactagtcaatcgcaaaacacacttctaaaaggtgtaaaatactactggtgtccaatagaaatactctaaataaaaccaaaatagaatatatctttgtgtatgttaataagtttggcatattatttggttttgttatagctttatttgtctaaatttattgtctcacgtcacaccacaagtggctcgagagtaggtagtgtatataaatcgatctaatccaataataactgaccgattcaattacatgtcggtcgccaaacattgaatatctaattgtgatcggatcagattggatattatttttgaaaatctaatcggatcggat

SEQ ID NO: 394615 - DNA, 690 bp, Cannabis indica
cacgtgtcaatatttaaaatgtaaacaaccttaaaatatttaaattttaaatttattgtaaacatcagtgaaatccacataccaaacaataaaataagaaattggaagtatataagcataaattaatcaaacttttgtgtctttttctttaaaaataaataaataaaaacgaacattccagttaatcctaatgatgccacgtcatgcatgcatgaccattttttttcctttaaaaaaaataatgctctcatactaatagtggaggaatatggaattgcactcccaaaatgatgtacttcctagtgtttaaaaaactctcatagtctagtcttcaaacgggtgatggaattgagtaatggtctgctccaattgaaaacagtatcaagatcaatattggtgctgcttttttcgaagggagaaacagctacggcattggactggtagcacgagaccatcacagtttttttattggaaggccgaactgaattcttcatgggcgttgtcgcgctgctacaccagaaattgctaaggtgattggggtccgtgaagccttgagttggactaaaaaacatcactggcagcgtgtgatcatcgaaacgattgcctgacagtagttcaagccctccgaagctcaattcaaatgatctctttgttttgacaaatcattgttgaatgtaaacaactcttttt

SEQ ID NO: 394616 - DNA, 867 bp, Cannabis indica
aaaagaagagaaacacatacaatgaaagagcaatcagaatgagccttaaaaaagtgccatttaagggttgaaaataaggagaaaaccccctttcgtacgacacatcaagctttgacattcagtggagcgccatcattatgacatcaaactttgacttcagagaaaacatagacacaaagagcttttaagggaggaattataatgtcacccaaagctaaaagccaacctagattaggggaatgactaaagccattgtgaaactgtggagaacaaaaaaaggataaccaaccctaaaaaatttggtacacccaccactagatagagtgacccttttaggagtgaggacagctacaacgggagccatatgacggtgaaacaaggctcatagacctcactgagaggctcaaatggagcaggcggttgtaaaatcgcagatgtatggagagagttatttagatgataattttacatcgaactttttattttttgaaagaaccacaaaaacaaaaatcggcaaaactactattatttaagagtggggagttcatgttgccaaaaaagtatagagtttaggaaccaatttgccaaaaaaataacattcaaaaactaacttgtcaaaacttatttatttggagactaatttgtaaaaaaaaaagtttaaagaccaacttattaaaagttatataatttcaaaacttgtagtacaaatgagttatgggatttttagaggtttcgaacaagacttataaaaagtaatagtgagtataattaaataaacttattaattttgggtgcataagactataatataaaaaataattaatgtatttttttttatgaatatggggaatacattgaaaaaaaaaa

SEQ ID NO: 394617 - DNA, 661 bp, Cannabis indica
tggaacactttgaaaaagaattgactaaaactgaaaaacatggtaatttacacaacagttattatttgaaatcacacagcctactctaagtctcaataattttagtattcttagagagacgggtgatgtttactattgtagcagtctatttaggtttttagtcattttactttttaaaagagcacttttatgggtaccaaagtgcctagcaccattataagataatgtcatataattggttagtaattttttataatttttattaaattaaaataaatgaaattcgatattaaattacacgaataacaatattacacctcacatgaatccaaaatactagacaccataaataccctttaatatttctctttattagaaagtagttctttcaattaatatttaaaatacatagggctttttggtttttcatatttaaggaacatctaagggtggttctaggttttcatagattccactattgacactaaaagaaaaaaatatagtctagatatagtagcgcttaatgattctaatcagattattgtaggttttgttaaaccatttactgacattgtttctcctgttgttgctgaagcgaagaccgtctttttggggtgaattggattcaaatgattaagttgtctgttaaagtggtcaagac

SEQ ID NO: 394618 - DNA, 592 bp, Cannabis indica
atatatatatatatataacactcttttagttatatattaggattttatgatgatgagtagtttgaagtgtgattagctatgggcttaaagccccttttatagtgaattaagattagttggaatgattaattaattaatgtttatatttatggtataatttcatggttagcacgacataattatgttacaaataaatacattacaaattttgatatagttggctagctcaatatagacgtgctatacaatctacaatcgtgcctgtgagatatatgtatatgtatatatttatacttgtctatataacattattatataattagtgtagttttgtgtttagaggctttataaacggaaatataacacacacatatattatagggtaaatactattttggaccttgtgttttgcaaaagttacagattggaccctgtgttttgttaaatgacaaaatggaccatatattttctaaaatggtaaaaataggactctgagcttaattttagataactttttttttaatacaaccaacttgaagataattcctaatacgaacagatacaaaaaaatgtaaacagttttgttatagca

SEQ ID NO: 394619 - DNA, 701 bp, Cannabis indica
tcagcagcaatccacatcacaaaaaacccgtctaccatgaaagaactaaacgtgtagaaattgactgtcacattgttagagaaaaagtcaccaatgacaccgtaaagataaactatgtttcttcagaaaccaactaagccgacatcttaacaaaactacttttcccaaaccatttcaatgacattgtatccaagatgggttgtcaaaattttttacattctatcttgaatgggcctattaaatttagttggttagttaagtttgttaggagctaagttagttagttggttagtccttacttctatttgtactagttcaactattgcctatatataaggcatcctttcattaacgtataaacacaattttacaaacaaataaagattacattctttgttctaataattaggtgattttttatttatacatatatgtaaaccataataaattaagaaactaacaaaaatgaatagtaattacaattatcaggatttgttggtatatcataaaaaaggaaagtgggttggagatgccgagaagccccatgacaaaaccttatataccaaatacatacataattttggacatatatatttaggatcgatctgtatttttttgtatttaagcgtttatatattacaacatgttttaccgtgggactcgaacccaggacctccaacactcacacacccacctatggc

SEQ ID NO: 394620 - DNA, 723 bp, Cannabis indica
ctctctctctctctctctctctctctctctctctctctctctctctctctctctctctctctctctctctctctccctttgttcttctatttttccctaataattaattgtttctctgattattttcttataagaaagaaagaataattaatagtctattttatttttaggcacactcattcaatcttcgaccaatttcttttattttctttgttacagatcaatggaggcaagtatacgtgaagaggtaatatttattttttatcaaaatattttaacttaatatttcttattcgtataattataatcgtctttctcattttatttgcgaattcctacctctctccttctctctttcttttttgctacaaattcttctttcttctcctctcattctttgatcgttttgctgcaaatggcttgagttgaggtattattaatttacttcttctttttttatttctctccattttcttaatttctctctgatatccctatctatgttttcctgtcattatatcttgaatgaatgtttgtattgacttagacctgttcatgagagcaatgtatgaatgccgattataaacactttatcacgaaatgaatgcaacttctatcattagtataatgattttgtattactgaatatttttttactgacgatcaattgtgacagatgtcagcagtgatttggatttcatcttatgagtaatgtgtgatcat

SEQ ID NO: 394621 - DNA, 2028 bp, Cannabis indica
ctggtactggtctcgccactggctccctcggaggtctcacctgtgagatgcacaagagggtaacatctaaactcactagctctcactgacctaacttggcatactcgcccaagttcgattccacaggtcctcagtatatcacctatgtaacctgagatagttcgcacctccgattctattaactcggcctcaaaggtgacgttaggatcctggggagtctttgatgttcgtggcttgggagacattatttcaaagtctaagtcacctggttcaaaagcaatcgtgactttaagtaaaagcaaaggcttagccaaaggaataaaggacacactgggagattctagggaagctgcatctcgcaagaaacaacgtttgccttcaatgaattcttgcaagaagtacctatggcgactagcatcatcttcctgatgggctctcactaaatgttccttaaccctagcatcgtttaactctaatttagatgtgggttttgaagggttgggttcataagggacagctgaatgtgtaggaaattcaagctctaaatctttcggacgataaatttctaaaccagattgagacattgcaacaagaagaaagcaatcccaatccatgcaaagaattttatcaaacttgaaggtggtgagttgaagtttctgaaaaaaaaaacctacgtatattgtctgaaccctaatgttgacccaaatacagttcagccctaaaaattactacaaccgaatgagatggcgtcgatacaaacagatgatgcaacaattaaagccagaaatgtaacgcaacaagcatgtaaggtatcaagaagaaaagctacttactgtttgaagttagggtttggggcgatagacagctcttcggcctgcgaatctttaaatgcagtgaggatctctttgagagtgtgaagttggaatttaagtcagaggaaaccgcaaagccgccaaaattagaggacatgtgttttttcaaaaggaattatgacaaattaatataccctttgtaatcattaaaaatcactttttattaaaaagaacttcttaaggggcaattgttatactcgaaattcggctaacacatcagaggaaaacacgtgtcaacctgggaagaatacgaaccaaggcacgcaattataattacatttgaggtggaataactcgttaaaagcataattgacagatcagtatatttataacttgactgactgaatagtcttatgcaagataaagatatacaaactgttaccttgtgcatcaacgagaaaccttgtaacttcaggtgtacaatacgaggcactaacctcgttacctggatgagatataatgactgtgaagacacttggcgtataatatataatatacaaactaagtataacagacaagtgaaccaaagcaagtcataacgaggcatccacctcgccataagaagacatactcgcggtatcctcacttttcaataagattcacagctctgaggagccagttctgtcagataaagattgacattcaaatgatattgacagttgaagatcacctcgtcaccaaaaactgtgattgttagatagggtgttatgttttcagagtaaaagcgacgagatttacattatcaaccttggaaagaaataggaaaatctccagctcactatcaaggttaccgctgctctattgcaacgtatttgatacacgtttattttgacccagtaaaagcgactaatcacagttgtgtgatattcaaataataactgcatttactttacgagatatgtaattagacccccacaatttcaggggataatcgttgtgaagatattagttaacttagtaattaactgcctactatgtaattataaatagaggcaagatagaataaaaaaggaacgaaaaattcataagaaaaaaggccctagaacaatatcagaaatctaataagattaactcgtggactatatagaattttaactgcaaaagcacgtaaaaatttttgtgttcatactttttctttactgtctttatttttttt

SEQ ID NO: 394622 - DNA, 1050 bp, Cannabis indica
aaaaaaaatattatatgaaataattaccgtataatttttatttatatatattgttgttttgggaaggtttgattctatatatgtcttccaaggttaggtatattcaatttttgtttggagagttctataagtagagatcttctctaaatatatattccttacaaatatggaaggtcaatgtatatatgatgatcatgatttatatatatatatatgataaacatattacgtacggtatataatcacttactcttatcatgaagaaagaagcttttatttaattattagatgaaaactaaaatagtaaataacgcacaaacacttaccttaatttcaagtcaccacacaaaccgtcctagctaattaatcagactatattatatatacttaattatatatataattttaattattataaattatatttgcttcattctaaagactgaatgattgagatactgtgcaaatctatataccaatattttatgtacacctttttcaaatagtgtagtaccgacccccttctaaataattataatttttttttatttttttttttttattttatataaatattctttaaagtatatcatatatatgtaaaatgattgtgtttttattattattattaattatgtagtgtgaccttaattattaaaataattatttcatttatatattcgatctgtttcgaatctaaaaacaaaacaaaccagatttcaaccatgttgcttttttttatttgttgatttcaattcatttatatatgaatttcgctaataatttttttttagtctcatacattcatagcctggagtcatagttcaagtctaacatgacaaattagctccataaatatatataataaatatttgaaaagtattaattatatatttagagaagaatgtacatatatatttaataattatagtgaatatattaatatttaataattaatgaataagaattgtgtattatagtgctagacagatcaatataactatatcaaaagagaaaaagaaaaagaaaaaaaaaactaaagtataacag

SEQ ID NO: 394623 - DNA, 1049 bp, Cannabis indica
ataaaattatataccactattatccataacaaaataaaaaaaatatcatctaagaataataatatactatacaacaaaataaaattatactgtataacaaaatttatataccaacaacccataacaactcataaaaaattaaaaaaatcgacataactttcaaataatttttttttttaacaaaactaagtaatttacttctaattctaaaaataaaatataaaaaaaattattgatatttttatgtagtaaaagatattataaataataaataatttaaaaaagtgattttactacaaattttaaaataaagacatttactaagggccatttactataattttccggtaagataattaacttctagctcggcaatttcatctacacagttgatgtgtagagtcactttttactcaattccagcaaaaatgtcacttttttcattagaaaacatatgcacaagacaaaaaggtacatagaatcagggcaagtttttttttttaagtgcttgacaactacatctaacaattaatgctagtattcttttatatgtttatatattacattcaatgctataacataatcatcatattactattatagaaagatgcattttttttttttaataaaatagatagatgcattttaataattacacaaattaattgattgtaataataatatacttgaaaactaatttgagtttgttatgggcatgaataaatctcttgatattaatataatttatatgttagaaatcaatcttgtcagcaatagttgtcttacattgaaaaaaatgggccatctattaagttgttaccagctcaaatcaatggcagtgaatttcagtttcgatatgtatctatttgataagccattattgaaggggctttaaaattaaacatgatgactataccagtggctgatgagtaactgtgctatatttagcacatatgaataagtttaagatataactatatcaattcttttagggttaatttcacaaatacacaaaaataataaaaaaaataacaaaaatacagtttcac

SEQ ID NO: 394624 - DNA, 860 bp, Cannabis indica
tttgtttatttgttctacctccaactcaagtatggacaatgcacgttgaatggatgcaactcttgaaagggcacccccatgttctcctttttctttatcaaactttaggatcaacacacctccatcctaaaaatatcaggcatcgtatcatagatgtaagcaaagaaattttgtgagcaaatatctcaagcaagtagagaaaagaaaaaaattctcccaggatccttagaatcatagtatagattgtccaccaagtattgtactaaaaacgattaaacaattattccttttgttttatttattttacaaattatagaagaaagaaaagagccctggaggttcaaaataccttaagatgtactacttcaccatcctcaatcaccagaaccttttttgtgtgctcaacgacagcattagcatcactggataagaagagttctttaggacgtccattctttgagaggaaattatcatcatgaattgcagatccatgatttagatcttcggacagttgctgacatgacatcagaaagtcaattaaacctgcagaagcacatctaagctgtatcatcaaaaactcagctcatgcatctaagatgtgttttcacctattcaaataaacataaataacatgcataatttagatcaaactcaaatcccaattattaacagctccactggctttctagccttttaaaagaaattaatattaagcttttccataaatttctgtaatgtgcaaatggaagagacagaactcccttaaaacagtggcacatgtttaccaaaaaaaatgccatattatgtaaacatccgaaatgaatcaaaatgggtaaataccattttggactctgtgtttt

SEQ ID NO: 394625 - DNA, 874 bp, Cannabis indica
ctctctctctctctctctcctagagtatccgagaataagttgttccaaggctcagggaccttgctcttgacaggttgggacctacgataaccgataacacacgggacaacaataactcgaggagtgaaaactggaatgacttgttccaccatagaataataatttcaggcaggtggatcaaccaaactcaagaaattggtacgatcaacctcccattaacttatagactagctaggccagctaggggaatcttgccggtttggttggccatggaagtgcaaccacccaaagtctgaccgaccaaggctcatggctcagccaaaggttggctgggcaaggctcattgcttagccagaggctagccagccaaggccagttgcccgaccaaggatagctctccaaccaggaaaggttgcacgggcaagagccctaccagaacaaatccatctatgcaagtacagttagaacaaataaaagacatgatcaaaggcttgtctgactcaaagctgaccgacctagacctggacatgtcaaggggatcaccctttacatcatacattaatgaacttcctcttctaaagttcaagatgccaactcgaaagatgtacacgtgaaaagaagatcccttagtgcacataaaatactttaagatccaaacaaatctcaaaaaagtaactagagatgtgcgatgccagatctttccagcaaccgtgtctaaaatagcccaacagtggtattacaaggtggcctcaagaagatttaactcatgggatgaattttgtaatgactgtatgtttaatttatggattaatagggtaattattgatatttatgtttatgcatggtcatatatactgtgggtcttatttttcag

SEQ ID NO: 394626 - DNA, 689 bp, Cannabis indica
gggcaaaaaataaaatttccctataataattgactattcatcataacttttcaaataactataatataattattaaattctcattttaaaaaataaattataatttctctaaatatcaaaaatataaatattttactggtaaaagtaaaacaaattagtaacacagtttctagtttttttttttttgggtaaagaacatcgagttcattgattaagaaagataaatggaaatcacatggtgacatctctccccttgatataaatagttggttggctagcaactctagcacacttagttacaccatccgcgaaagagttaaaactacgattaatataaaagaacttacaagctgaaaacttcttaattaaattaactaccgcgattaaaaaaattaaaaactttccaatcaagggggcctctgttcatagacagaacaccttcgaattcgagagaatgtgaatgcacatccaatccttctcatctgcccaagtaagagccaagagaattgccctcggctcagcttctaaagcaaaagctgtaatgatcctcagggaattggatgcccacctacgaacaaaatgaggtcctttcttagttgcagggtcggctcaagtattgggcaacttgggccattgcacaaggcccctatttttataaggcccatttttttttttaaagaaaaggccta

SEQ ID NO: 394627 - DNA, 732 bp, Cannabis indica
tcttttaagataatcactcccagactcccagtacctagtatgtatttgtttgtatatataaaaattaggcacgtagttcccgttaattttttttttatatatatataaaacataggactggacaacacttcagtttttgttcttaatctctaattataattataataaattggtgattgtatataaatatatatttttttaaaacaatgactaatattattgataactgaataatgtcattacacgctaaaggattaaatataataaaataataaaaagtcataactaaataaggattaaatataataaaataataaaaagtcataactaaataagttgttaatccatccgaagaacatgcacaacccatgtgcagttacaagatcagggtcactccaacaaaattaaataataaacttgttatattttctaacaatgattctagatcactgagaaaaataacgtctcctatcaaaaatagatacaattaatacaattactcagggtaaaaatcaacaagaacaacaaattttaaaggaaaattcttatccaacgtcattaaaattaccagaaaatatgtttgaaatattagaaatcttcattttccacacttaaattctcagtcgatgtttgctctactccttccaaaaagttccaaatgaaaataagatgatccaactgtaaaaatataaagaaaattagcaattaatataaatcacaaaaaactatttc

SEQ ID NO: 394628 - DNA, 692 bp, Cannabis indica
ggttacttttatatgtcaatcaaaatccaatctgcacaattacggattttggattttctaatccaatccaatccacacaagtgtaaatattcgcactttgcagattagaattgattgaattgtgcagattgaattggaggatattttataaacaatcctaactatactcattggcagaccgataatttaagttgagagggcgtacttttttattgtaagtgagcaggtgtacttttttttttctagacgatataacatattaaagattgatacaaatttgtatttttatagcattaaatataatttaagtaagaaaaagtaacaataaaaatattaacttctgattaaggtactaaatgtaagtttattggtagagattaaatgaaaaattagaatattgaaaagtaaacatcatttctaattgcaaatatatatgatgtaactaattaaaatatttgttttctaattttttcattttaagaggtgaccacgaccctcgcttctatatcggtctgtccctaactatattgatgtgatttataattaggtagtgattgttagaatatcttttatatgttaacaaattaaataaaatatttgatttgatttatacaaaaatatgattaattatttaataattaattgaaatatttgaagtattgtacatatttaattacttaatatttcagtta

SEQ ID NO: 394629 - DNA, 549 bp, Cannabis indica
tgatcttgtaaaagtataagatctcatccagcgcaaaagacataccaccctaacaacaagcagtatgcctggggaatgagttggaaatgtgctattctagccacgatgtagaagttagaaaaatagcacctcagaggcagatgtacacccatctcgatatgagcccagctccagacactgaagcctccttatacgcacttgctaggcctctcctcgagaacgaagagtctattccagaatagccctagaacactttcaagccctaaaagggtcaagtatttccttaggttgttgtaattcccgaacttgttgacgtcctaatccatctcccatggactgtcattaaggatcaaatgtggagcattttcttgctccattacctcctcctctaaattagcttcctttcaacaattctacctggacatagtttccgtacaaaacaagaaaacccaatcagttagccaccttgactacctagcatagaaagggagctgagggtcttcccccataaactgcttagagaggtcccaactagattgactacctaga

SEQ ID NO: 394630 - DNA, 1357 bp, Cannabis indica
aatgatatataatttctaaactttccatatagttttctaactattacgcattaaaattattcgttatacttacaaagttgactattaattttccctaatttactatgtaataaagcctttttaacgtcaatatcttattttttatttttattttaaattacattatattattattattattattttaattttaatgggtaccaaatggggattctcttatcccgaacccatcggggattaagtggggaggggcggagatgggcgacataaatgggaaataggaacgacgattggaaggtgcattagccacttaatatccacccgatttccatccctactcttgacattgctatggtttagtgactggaattatcagttttctttgagtgcatgtgactcatattttggctattgccatttagtgagaattttattcttttttaaaaaaatataaaataaaataataagaaaaagaactagcttgattatatatgccctccttcaggcacgctcaaggccaacaccgacgcaacttttggctatagttcgcactcgtgcagccttggtatggtgaacagagaccataatggcaaggtcattgcttctgcaacgtggaaagctcacagaagccctcctttagagtgggcagaagctctcgcaatctgcaattctctctcccagtgcatctcttttggcattcacaatatccagattgaatctgattgtcaaagtctcatccataaactcaacaactctctcatttttggacttttctttgggcttacttcttgatgatattagagatttatgttttaattttactattgtattttgaggaaattacattgtatacccactttattctacctattttaatttttaccttcctttctatattttttaaaatatacccacttttatagatgatatccccattatacccttaaattaatgcaaattctgtgttagactaaagtagagggtgagggtgtattggtcaacctactcataaaagtaggtgcattttaatgaaatatattttgagagtatttttgattaatagatataaaaaagaggtatttttcaacttatcccttgtattttttacttatttccctagaactgctaatgaggtagcagatgcacttgcttattatgctttacaggctacttttagcactgtttggtggtctgattatctttcttgtatttagaacattattttagctgataccaataatcaatgaatcttttagtcctccgccctgcagttattccctttagtggtgtttttgtgaggctattctctcttttttttaaaaaaaaaattatacattatagggtgattctacaatgc

SEQ ID NO: 394631 - DNA, 1551 bp, Cannabis indica
actacctttaataacaatttattaattaatttaaacattttagccattttaactcacttgtagtgaaagcttatccttttctttcctttgagacttggagtaggcaatgtaacataaattatgcaattcaatttctatatatttagggtacatttggtagtatttttttaattagaaaaataaaaatattttctaaaaatatgttttataaaactgtttttacttttcaattttttaattaagaataaaaattttgaaaaaaaaataatcacttaaaatgaaataattctttttttttctaaaaggaaacgatcattttaaaagaaaatgtagtaggtttgtttgagtatagaagaagccaacaaggtagctcatctcatgtattagtcaatcaaactctgtatgccaaaattagaggtgttcatctaatttaatctgcacaattttgcttatagtttatgtgatttatactaagcgtggattttatattttagatctaatctgtaaaagtgtggatttgattaattattttagattggttactttttttttaatattgaattatttaatatttgctaaaaaaatatttttttttttcacaactatcaacaaaataaaaaaattattattgttttatgtatctaacaataaattaaaataaatttcaatcaaaaaaaaaataaataaataaaaaaaaaagtaacaaattcaaagcaagaaaaaaaattgtatatataaaaaatatttaattttgttttagataagattttcttataaataaaaatgtaatatacatttcatctactatgctttgaaatgtatttgtatcatatgtattagatttttaaattattaatttttacattaaagtattaatagtatgcataattttttttttaaaaaaaatatatataaatatgtgtggattagatttgatcggttatttttacatgtcaatctatacaagtgcgaattttaaatttttcaatctaatacaatctgcacaagtacggatgtctatactttgtggattggattggatcggatcgtgcagattagattagattgagcattttacgaacactcccaattaaaactagtgctatgtagattagagttgttcctctaatgacaaatcatatgtattagatttttaaatgattattttttacgttaaagtattaatattatgtatatttttaaaatatatatatatttgaattagattaattatttttccatgtcaatttcacccgtgtgaattttaaatttcttaatctaatacaatctgcacaagtacagatattcgtactttacaaattgaatatgattggatcatgtggatttaattgaattgaatcgtatgtattagattaaattggtattttacgaacactcccaatcaaaactagtgctatattggagttgttcccccttctacaaatcggatttctcaattcaatatgccaaattctatgtaatgttactgtttgaattgaaggcttttctttaaaaaaaaaaaaaacagaaaagaaaaaggaaaaaaaccat

SEQ ID NO: 394632 - DNA, 1079 bp, Cannabis indica
ttctcacatagatagcctttgtggtgcaagctgtaacctaaaaagatgcacttggtggatctcaaatttagtttgttaggcaagtatggtttgagatgtggataacatgcacatccaaagcatttgagaaagttgtaatctcgtgtcttgtgaaataaacacttatagggagatacattgccaatcacaggtgtgggaagcctgttaatggtaaaaatagaagtgtcaaaagcatgccactagtattccaagggcgaacctgattgtgcaagtagtgtaagccctgtttcagtaatatgtcgatgtttcctctccgctcttccattttgttcatggtcatgaggacatggatgttgaaattgaattccatgttgtgtaaggaatgatgcaaaagacttatactcacctccccaatcggattggacagtcttgacaagaagttgaaattgtttttcaacaagttttaaactggaggaaagtagagtaagctgcagatttgacatttaatgagaagatccaaatgaatctactaaagtcatcaataaaatgggtataatacctgtaaccatccttagagacgatgtgagtcctcaaacatctatatggattagttctaggagttgagaggctctagagttggatagagtatagggaagtttgtgacttttgcattgttggcaggcttcacaaaatgcaagattcttatgggaccttaagtaatttaagtcagataatactcttgtgagtgtgtgtaatgcagggtgaccaagcttagaatgccatttcttaatgccaatgttttttgtcacattaaaattaacaggagaaccagaaagtgaggaatcaaaagagacatttttattactttcagaattagtacaagcagtagaggcagtgttggctgtcttatcattgcagacttgggataaagaatttgtattggagttacaactagaattggagctaggtttcttagtggctaaatggtattcaatctaaacttaaggatgaggaaaagtatgatgagagtgttgggttttatgccctaaataaaactctttacaatctgattagttatc

SEQ ID NO: 394633 - DNA, 1119 bp, Cannabis indica
aataagataatatagttatttattaattagtgttgaaaatacagagtttcaatgttatcatgtgtgttgagagatctaataataatacaaattgggatgcgattagttggttaattaataggggtttttatactacatattcaaaattataaattttaactctttttattattgtagggtagaattttttttcaaaaataccgtataaattttatatagtgtactgtgttaagtttttacgattgttttacggttattttttagttgttccattattgttttacgattattttataaaaaaaaatagtatttttgtaattttgtgtgacagtataattataaacttaatacctaaaattcaatatttttataaaacccctaattgtccaatgtaaaactttaattgaatttattaaaaaaattattggactaagtaatctaagtaatatgtgtgcagtgtgctataatatgtcaaaaaatgtcttgttgatggtctaattttcttaaagggggattttcatttttatgatttttcaaaagttaataaaaaatatgacatttttaaaaaaataaaaaattattttatgagatttttattttttttaaaaaaaaaaagtacaaagaatgggaaaaacagtttagagtaattagttacattatgcgtttttttttttctttatatttttcttttaacttttttttttcgttttttgtaattttctataatattacatttttgaaaaaagttatatatatatattttttttttgtcataaaaactcaaaaaatatataaatttctatattttttaattggagatgttattggataccctagagtatgcatatgagcttttctactttgttatttaaaatatatcactaaaattttattttatttattttaccaccatattttatattacaccacatatcttttttattttattatatttttaatacattaatgcagtaaaagtaaaaagaaaaaaagggctaaaaatatttttttaatctctccttccttattttattagaaaaaaattatactacatgcctcttttatattgatttctttaatttttacctcattcaaaatctattatatttatttcttttt

SEQ ID NO: 394634 - DNA, 869 bp, Cannabis indica
atacaatattaattgaggctaattatgatcaagtaataaaataaagccgaatgaataaaaacaactccttaaagataactatatctttatcaagtgatcaacaaagaaagttaaatgaataaatttactcaaataattaaggcatgtaaatggatgcctttattgtttgcatacaaaaatttaataaattagataataattaatacaattcattatgattaggccgaacaatggagttaaaatatatataataataaattaaaattgccaccagctattcctatatattattatgtcacattcatttactttattaattattaaatgaagtatgatatagatcacatacacctatatatatttattatttatatatatatatcggtatcaatctctcgattattggtactaattaatatatctatacgtagaatagatatagataatataatatatatttaatataagtgtaattataatattaaatatcttatttggagaactaatttttattaccaacttgtgtcctttcgaacaaagtttgaggcatgtatcatgtcactttatatatttatatataagctaattaagatttttgttatttaaactttactatgtatcaaataatacattttgaaacttttttcgttaaaaaattcttacttaaactaattaaaattattggatttaaagatatttgtctaattatactgattccggaatgtccatgtattaaatcatgcttcttaaactttaatctgttaggaaaaatttataataaaccaagatcaatttgtatataacatagaacacaataataatatataataattaggtatgcgtacctgattgatccatagcaattactc

SEQ ID NO: 394635 - DNA, 855 bp, Cannabis indica
taattattatttttactttttaaattttagactttaccttatattgccgcttaaaagatacgattttaaaagtactaattgattaagtatagattttgatgaattaagtttagaaaaataaattaatgaacactaaatttacaagatgggatgtggaagtcatctctgatttgttcaataatagagacaaggaattcatttatagaatacctatatctaccactaatgtgacggataagtggtattggagcaaagaggtttcggggacctattctgtcaagtcggcttataagttaattcaagatttgaaatttcctactggctcccctattagtactgacttttggaaagctttatgggctttgaaatgccctccaacagtaaaagacatgttgtggagatttgtgtcaaactgtttgcccacctgtggatcacttgttcaaaggcatgttcgaatctcttcttcttgtcccatatgtaatagaggtgttgaaacggttacccattttctggtttcttgttcgtttacagcggcttgttggcgttcagctggtttatatggaggcaacccaggggacatatcatttggagaatggctgcaagaccgatttaacaattgggaattaagggagagacatatggggggcaatgctttgctgggctatttggcaagatagaaacaacaaggtgtgtgatgtcgcccaattagttacactgcggtcgcggtagtaaacgggttatgtcgtatccacagtgaggtaaattactactaaagattaatataaatagataatgatataaatgtgaatgaactaaaaataataaaaatgatgagatgagaaagttgatcagata

SEQ ID NO: 394636 - DNA, 2313 bp, Cannabis indica
aaaattatcactaaaagtagcatctttttgtagtgacattaacaaattacacatgcaaaaataatatttcttgcactacttaatcttttaaaaatacaataaattttgactttttttattttacatcatattttatatattacaccatatattaacttttctatttttttgttctctatactacgtactttaataatgtatatgtatacatatctctaaaaaatttaacttttagcatcttttttattaatttatatttttttgataaatatatcttgtggatgaagatgtaagttcgagatgaaatgaagatatatcttgaaaatcaattaatttggatctatattttagcttaattttcatttggtttttcagtttgtttgtcatgatcatcaataatttgtattttaatttcacaattgttcttttagagtgtatttgtgcttgcttagtctataataataaagtgtaaaaattttctttgtcatgtatatgatgaagataatttggaattttaaagtaaatgataatgaattatgaagaatgttggtaatttgtgataattttaaattttaattctatttatgaagaatatataaattttttataaagatgaataatttttagaaaccttttttgttttgagaaactatactataaaaacacttcaatgaaacaagcctataatcttattgagcaacacacaatgaaacaaagctaatataattgtggctctgatatagtctaatagttcaagtttatttgccaaattcacactcgagtgtaattatttttatgtgatttagcttggaaacaagttctagttactagtgataagattaagcttatatattgctatttatctaaatatgttcatctaagtttttgttgtatttattttatttatgttactacctgacaaatattttttttactgagtttagtatctcacatttatcaaattaccatgtacagaccaaggtaactgaaagtttaaaaggtcggtagtgagtggggcttaccataatttataattagttattaatttttttttttatttttaatcttaatttttttgtgattaaaagtaagatttttttagtgaatcttactaccatttttttttgattaatcagtaaatttcattactccaaacatttacagttacaatcttagcaccttcatccgaaggcctgatatttaaacctatacaattttttttgcttgcttttcctatacctgcttttgtgttacaacagagcaaataatatgtattacgatcagtgataaccatataacaaacaaccttatccgatcaaatcaacaagctgcaaataaaatcaaaaaaccagatgctgcttctggtttacaattttgaaaaccagtccctgtcatcctgtttggctttgcttggccaacaacacatggttctattcttcacatcctccttaatcttcctcactgcttgctcgactgacatagcctctgaattccacaaaattccatttcgaacatgccatatttgatacactacagcagcaatagcagctgatctgacagctttccgaaatgagcttatttttgctctttattctatccacctaatcaacctgttcagatctgtagtttcagctctccatttcaatcattctttaactttagataggtaattgtaagagaaaggacatagaaagattaagtgtttagatgcttcaatctgattactgcacaaaaggcaggaatcctccccaataatactcaatttatgcaatctttctctagttttaagcctattctgcacagcaagccacaaacaattttcctaacaccattaagtgtattccatacctcatggctccaattcactttgttttgagagggatagagagctttgtagccatttgaaattcgataagggactgctagagcttgctgaagattcatgacttctttgacttgattttcgacatccaccagtttctcccaatacgaactagcccgaggaggagcttgataactccaccaatccacccctttcatataaacacaatggatccacctaatccataggttatcttccttgtttgcaattgcccacacatatttggtcatcgctgcaatattccattcagcaacttttttcagacctattcctccaactttttttggttgacaaacaaaatcccaagctataaaagcagccccacacacacatggtggccttgccacaagcagggacgacagagagcttcaatgtccctgatagtcttcttaggtaacaccataatttggctccaatatgagtaaattgac

SEQ ID NO: 394637 - DNA, 661 bp, Cannabis indica
ttttaagttataagttagggatcaaaacatcctcctactctttcacaaaaggctcaaattaactattttggtgtcaaagccacttaattttaataaatatatcaaaaatcacattatttaattccaagccggccgttttctcttaattgttcatcattcactgcctaattttttttccccatacgttttcatgcatagtgtgcccctaataaaccccacactaataacttaggtacgtacacgtattagggtttaattacttagcaagacatgcatgcatatatatgcctaaggttcaatgaaaaaataattaacaaagttctagcaaagaggccccgaagtatagattatacattatatagcaaagtttaaagcttcttacttgaagattttacacaatatggcaaatacaaaacgaaaaggggaacaagaaaaaagaaaaaagaaagaaaaattaaaagataattaaagtacacaacgagagataaggtgcttagggtatataaggggcaaagttaggcagctttagtgatcgatattgttggttcatttaataaataatattgtaaacactctttaaaacacatataaaaacaaaagatattcgtggctaaactacttgaattttaaattttttaacacttaaccacaaaaatcgatt

SEQ ID NO: 394638 - DNA, 736 bp, Cannabis indica
gcttcgagtcatttctatgctccctcagctatggcattacgtcgtaggatagcaaggagaaggtcggaggaaatggtaccatatatccactggagaatcgtagtgtcaaggcatttccataaggcaagatcagttatttttgtagcaaggtatgctgctctggcaggttcctctgtgggtgggacaacatgatcgtagagatcatgaacccgataagattggtaaacaaggcagcccatgagtgatacagagcctgctcgttatctaacgtgacatgaacaagagattcttcacattggtgatggtgagggcaggatagaatttggctacactttctgccattttgagagtgagaagaagaaagggggaagaataagaagaaggtgaatcgctatggttcaacagagaggatcaaattggtagttgatagaaattgattacgtgcctttttcattatcaatcagagccatacatacaatatacaagcatattattatgctataaattagctaactaattgctaaaaatatgtaacaaatattgatcgatttaaataaagatatgtacagaaataagagaatatatattaaatatattctaacaattagttagcaatatttcttgaaagttattttcttaagtcacatgagacccgatacttaattacaccaatagtagtatgacatcgaggtaccagtggtatcttttagtaattctcaatttatatatatatata

SEQ ID NO: 394639 - DNA, 780 bp, Cannabis indica
tttcttgcaaaaattgcctatattggccagaaatctcgtcttggttggatttaataaaatggtctctaatttttacatcatttatctcaataatggttttaggtatatgtgttttgggtttgaatggaatcgcaaaaatttgaggacaatttgcttctaggatttctgggactatgatttcttgaatagattgggacatatttatagacagtatcaccctatttttttggaaaaataaaacacaggttcaaccctaaaaaccaatggatcaaataacctaaatttgtcagccctaacactatcaagacaaacaaaatcaaaattacctataataaccaaataatgcagataggtaatatcaataaaaaaaaaagaaattacgaatacagaaaagaaaaaatagtaagaagaagaagtgtatcacttactgtctgggttgaaatttctggaagagatagaactacacgattgaaatctcaatgattgagaaattgggtcctaaaaatttctaagactggatatgtaatctgatataatacgcagaaaatatgtaaaagacaatgagggcatgcaagtttagaaggggaagcaatcgcgattttagaaaatcttagaggtttaaaaaaatgaaaatggaaaaatagatgttttgtttcaattttatacccaattaataattaccgtttagtcaaaggtaataagatctaacagacaggaacattagaaaataagaacgatcagagcattaaatgctcaatgatgtgcctcaaaattttgaac

SEQ ID NO: 394640 - DNA, 1045 bp, Cannabis indica
atagtcattcgggaactccctttcggatggcaattatcattctacgagatttttttcagaatgaaagttagctgtccgagaacgtacttctaggagacagacaaatttgtaggaaaaacttttgaagcatttcgtttagatgaactacaccaaaaattccacctagttacttgaaattaaaagtatgatgatgaaaaagaaagaatgcaaccattatggttggtgttccagaaatctcaatttactaacttttgagatagataaagttcaagcaacgcttgaacttgtttactattaagaccttagtcccaacatcaacatgattatcttctcttctgaccatctccaaatcaaccagcccttcttctatcttctctctaatctattaaagccttatatctatatgtgtgctcttttcatgataaatcaaattcttacaaagatggatgcatgactggctattcgaacacacagtcactcccctttagatttgtttcaattcataaagaatgccccgaagccataatgttagtttccatgaattctgctttcgtggtggaaagagcaaccacagaatgtaattgggccttccatcttatacaatttcagttagtgaagaaaatataagaagtggttgattttctaatatctcagtttgacacataattagcatgcaggaatccttttaactacaattctccttttgccttctcataggtcagaacataatcccaagttcccttcaagtaccttaataactatttgagggccttctagttcagtgcctggatcagacatgaaccggcttaggatgcttagagcatgagcgatatctggtctggtgctcaccatcacatgcattaaaaatcttaagaccatagcatagggtacatccttcatttcccccttttccttcaaactattagggtattggtcgtttgacaaaatgaactgtccccctaacagaacagatgtactctttatgtcttccatgttgaacttctaaataactttcttgatgtacctggtgttgggttttatgccc

SEQ ID NO: 394641 - DNA, 868 bp, Cannabis indica
cacatacactttcttttttcaattcaataatgattaaaaagagaaaaagagagaatatgcaactaacaaaacccaaattataataattttcaaacaaattacattatattgcaaataacttaaaaaaatgaactaaattaagccaaattagagaacttgcctattcattccattccaatttgacaataacttataaccaaagataaaaacattaataattgctaataatttcaaaattttccaaaaatactcatcatatacacactcacattttttcttaatccaaaaaaagaaaaaaggcaaatactaaacaaataataacaatattttcttttacattatattggaaataagtaatctaagaaaattaagaactaaattaagactaattagaaatctggtattacagttggtgacagttactctcatcaccttgccaactccaaacaatgtccttcaacgcaggcctaacatcttcctcacagaacttattgtactcaaatgtgtccccactcgatttcgagaattccaccaccgcgagctccggtgccacctcgtaaacctccgccaccaccgccaacttcccttttctcccttcaatttttttactcattttcactttgtattccttctccaaacaaaacccaaaattaagcttcttagcaacagattgaagcttcactaaaatagccaaggcagagcatttcgaagtaaacatcgatctcgatttcctcttgttctcgaacatactcgacaaatcaaaacccgaagacatcgaagatatgaactcgaaagcattgtaaaacggaggagaagataaagaagatgaagaagaagaaggagatttagttattactaattcttcttc

SEQ ID NO: 394642 - DNA, 563 bp, Cannabis indica
gtactgagacattattttttcaacactaaataaaattgattataacataagaattacatttatgtaaatattatattttaatttttaagggtatatttaacaagtaatatatgtttggagtatcattttgtagtgtcataataatttagataatatcaatcttcttttgaatatatgtaaaccctttttcattaattttttccttaagagcactcaccacaagttttttacagtaaagactctttaattttatttttttgaattaaatgtaataaacgtaagatatgtataataaaaatatacttaaattaatacaacttgctttacatgaatgatgtattcatgttttgtgcttattttaataatatataatgtttattataaagattatatatatgtttaaaaaatattattttaatattgtagaatgttaaagtatatatattttgatagtgcagataaaaatattaaaaagctaatacatagcctaatgtaaaattttaatataaaatataataaaaaaaataaaattttagtaatatattttaaataatagaatagaa

SEQ ID NO: 394643 - DNA, 547 bp, Cannabis indica
attagaaaaataaaaaaaatattgagatagtatagaagaaggtggtgaaaaagaagaggaattaattcgtgagaagagaaaaataaataaaaaaagcaagagcacattaatttacaccatcaattccaaaatattattaaaaaaataaaaattaagaataatttaatacaccctaaatattcattattattgtatactcattcatttatcacctttatagttttaatttatggctgtaaaaatatctctatcgtagagataaaattcatgtgcctaccatcagttgcagacccagaatttaaagtaagggagacataatgttttttggtaaggcaatggcaaaaataacttaaaaaaaatgttctttaattgaattattgatctctatcctatatgtaatctagtttaaccattacattaaaactaatattatatctataaatatcatttttttattacatacatattgtaactaactaagttgcgtatgttgcgaaaattattaattactacgtaagtgcacgcaatcaagtagtatactcacgca

SEQ ID NO: 394644 - DNA, 2219 bp, Cannabis indica
tgttagaatattagctgtaaaaaattaggctaatttctatttagtagtttcctatttgtatttagtagcttttatttatcttctagctttgtatgtactattatatggaatacaatacacaattcaatcaccatattttgcatggtatgagagcagattgggattgggaatttaaaattagggtttatcacaaattggggttttcaattagggttcttttttcggaaaccatatttagagggatcttttgttctcatcgcccactcagaaggattgcctagccgccgatctgccaaaccccaaagtccgatcgccggattcctcgcgcgtgtctcacgcgtcgctcgtttcttctgccacgttccccatgcactaacgcgtggaggcgcgtgtgacggaggtttcgacggcggttcttctccgattcgtttttttggctccccttaagctgacttgcatctgtctcaggttgtagtttggtatttctccatacttcgtatttgggtattctttacttatttttaattagtcgatgctgcgttgtctctttcgaaatttgtttctgagattatggtagagacgaaatcagatccaaaaccactagttgattggttcgaattatttggaatggaataagacaattcgactttatctaaggagtattgacaaagatgatcacttgattgatgatcctcccaaagaaaaagacgattcaatgaaagtatggttacgtgaggatgctcgcttgtttcgtcaaattcgaaattctattgataatgaggtaattagtttgattaatcattgtgaattggttaaagaactagtgcttgattggtttgaaatttgaaaacaattttatgtttttgaaaacttaaaaggtgggggccacataaaaatacttgattggtttagtgttttcaaaaactaaatctgaatatgattttgagttttaagcttaaaaatgaaaacaacaattttatgttttctatgttttcaaatcattgaatctgaaaactcttcaaataccctcttacttttctattttgaggttcccaatcaatcacaaatccaacttttaaaactcaaagacacaaaattacactacaactaatcacatttttggaaacaatttttcacatacaaaattcaaatttttgtttccaaaacactcttttggaaaacccaatttttaaatataataccatatataagatgaatgggctatacctctcattgctcccacacctttgctcactttgccatcagtcttacatttatctaatttgtcctttaatttctttttgtgagtcaacacacttgtaatctaaactgttcaatctcattctttcccgatcattgtttgttttaagatcttatgacgaagaagattattggtaaaggatatgaatctggcagtctgtatgttcttgatccacttccaccagcctctatctattcctctacttaagaaactttatccccagtatagtaaggtgtcttcattacattgtgagtcatgtcagtttgtcaaacatcatcgtattagtttaagtcctcgagtaaattagcgtgctagtgttccttttgagtttacctggcttttgtgaatgattattctcgtgtaacttggttatatttaatgaaaagtaattttgagttgttttctatatttttgtactttttgtgctgagattcaaaatcaatttattgtgtctgttcgtattttgcgaagtgaacgccaaagagtacacatatgttcaatttctatcttacatgacctctaatggcatgcttcttgaaacttcttgtgttgatactgcacctcaaaatggtgtagcagaacgtaaaatcagacatcttcttgaaactgcacgtgccctcttgtttcaactgaaagttcctaaacctttttgggctgaggcagtttccacagcatgctttcttattaatcgcatgccatcttctgtacttaatggtgagatcccatttaaaatatatgttctgggtaagtcattgtttccagttgctccttgggtatttcgtagtgtttgttctgctcgcgatgtccatcgacatgtcaccaaataggccctaaggtactaaaagtgtctttcttgattattctcgtcctcagaaagggtataggtgttattgtcctgatctcaacaaatatcttgtttctattgatgttacctttgtgaaaaatacactttattttt

SEQ ID NO: 394645 - DNA, 1227 bp, Cannabis indica
ggttttttttattttttatttttacactttaaataatttttatatatatttttataaaattttacacagaaatcttaataacaactaatggagtaacttaaactgcaattaaaattcatatggtaatccacatagacactattgaatatactaccggagcaactcaaactgtaaatttgaaaaaaaaaaaaaaagttatccaatccatattattataaatctattctcaaagtggtgcatattaactgtcatgagaattatttggtactccctagttttgttggtcataataaaagtgtcttcttcaatgcggtgcaagatagaatttggaaaaagctcaacaactggaagtccaaacttttttctatggcaggataggaagttttgatcaaagcaattattcaatccattcccacttataccatgaatcttttcaaacttcttataaattctatcaatgatattcattcatagaatgtgtgtcagattttgatggggtggctcagatgttatgaaaaaaatacattggtatacttaggactaactatgtaagcataaaaatgattgtggtatgtgtagaaaatcattttaccaaggtctagatttactaacatgtatgttagattataattctataatctaacatcataaatataaattattcaaaaaattgaattaaacacataaaggtatagaaatcattgtagtagttgcagtggaatattatgactcattttattcaaatctctaacccttgattcctgtctatagcagagcattatcaagatctgaacttggatcttcttctccttcgattgtgttcatagaattaggttgttaggttaattctctcttctcattactttctttatataggctttcacatagggttaggttagatgaaatgtaaaagactttgggctgaaatcaactcttagggtcgaaatcacatgatgggctttagagttagatttttgccactttatttcaactaataaaacaaaagtgtcttctaattttagcactttttccatctaattatttaaatacaattttattataataataatcaaataaaatacaatttaaatgtatttattaattagactcataaagtgtactagttaacaaataaattcctatttctcttttttttttccttaaaattgtcaatttggtgaaaattatcaaataagacatagtccatttttgaattctaattgactt

SEQ ID NO: 394646 - DNA, 1304 bp, Cannabis indica
attgacttcaaaataataaaattactttctagtatatattaaaaacatttttttttagaatttataaaaatattttaataatgaaattataaaatttgtaagctttctaaacgttttttgaccccaatttaaataaataatattttgaatactaatttctatttataaaaatagtgacactttgaaatgtgactaattcgttaataagaaaataaaactaatagaatttaaaattcttttattgacatttgaaatgttatttatacattatatagtgacatttgaagttttagtgatatgggcatatcttcgtaccaaatgtcactaattcaataaatgtgacaaaaagtaacaaataataacacttttaaatgtaactaatgttgtacatgattctaactgaatgaatagatacttgaattgttagaaaatatctcaacttagcatgtctgagcttaatttcatatcatttgggattgtcgattttgttcatattttggggtgttttaccgtgttcatggatttatggcaatcccatcaaaatagatgcttcaggttggcaagcttgtattttacagcacgagtatgatgatttagagggaactctttatgtcgataggtgcctagaacattcaggactgtaggaaacttagatttgtctctaccagatggatgccccaagcttggaattccctagcttatcattttgagaaaaatctagataatttgatgcaaggggttaaaggttgagtttcacatatattttgcttggattcttggactccttctttgtgcaagtttgtactgttgtatatcaaaatttatttgttctcgagcaaggtcaaattgcattaggaaagtagtcatctctgctcaactctgagtgtcagttttcagctatgaataaccagaaaaagatctgaatgtgtgaatgtgttagatacattcagcctaatttttgtaattgggattattgtataagtatatttgaatcattatgatgtataaaagaggcattttctctctcttttggggttatagttgattaaataataatataaaaaagtaacatttagatactcttttaatttaattttataagattagtttatgccataacaatgaaaaacaccatcagatttcaaagtagcacgatctagccacccaaacaattttgattcaaaaatcaaatgctcaatcgtaacatcctaatcgtagaacacgagaccaatttcaatcataagtttatatacacaattatggcattcttaacaagtttacttttataaaacaaatcgtttaaa

SEQ ID NO: 394647 - DNA, 1375 bp, Cannabis indica
taaattaaaagtttttttagttttttttttttttttttgtgagataatgtcaaaattaaagttaaatatatattatataaagactttttggaccttggtacaacaagtttgttatgactacaataaaaccaataaaaaaaagggatattcacataatacatcatttttataaaaaaaaattatatttttacgtttaaagagtttttctttacatttttacggtttttcataaaatgtagaaacaacacgaaaataataaaaaaactacataaacgtaacatgaaaataacgtttaaataacatcaaaacaacaacaaaaaataacatacagataaaaaatcaacaacaaattaacaagagtataacataaaaaaatcttatttctataaataaaattaaaaaaatcataaaaatatttaaaatttcgtgaaaccgtatttttatatatatatatatatatttttttttatgtattggtgaaataatccttaaaaaaatagaattataatcaatttacgtgcttaaaacacaaaatcatgatgtacggatacaaaagagtagactttcctagctttaccttaatgatggagtatggtcaattctgaatttgccagattttgcataatcttccaaactaagctcatacaattctttagggtcagttgggagagttaccttccatttccctatagctgccacaatcaccataacaatcttagtaagaggactacccgaaggccatttatgcctataaaatttggtgccaaccaaaaacaccaatatggcaaatgcaagcccaatagtaggaagcccatatccaatggcccagcccacattatcttgtatgtagaccaagaatgtgtttgagaatagggtaccaaaaaagatactaaacatccaccaattgaaaaatgagagcttttgcatcttttctttaggttcatactcatcaaattgatcagcacccatggttgagatgttgggtttggttcctcctgttccgatggcgatgatgtacaaagcgcagtagaatatccctacttgaaaattcgaggctcgtttcttgcaatcttctactttaataccgtgaccacacgatgggggttttaagccgggaactgaaactgttaatgttaataacaacattccctacatatagttttgaagaatatttaaatagttagtgatgatcataatgtagtgtgctatatagggccaagcctcacattagcggtgcgtttggaagtaactgtgtaattactaagtagggtaattactaggatggtaattacatagtgtagtaattacactatattttaaaatgcaaggtgtgtttggatatgaggtggtaattacacagtgtaattacattcaa

SEQ ID NO: 394648 - DNA, 981 bp, Cannabis indica
aaaagataatagaaaaaaaaagaaccgaggatttcaatggtgtactatttcactaaattagtgtagaatctttacattattttacttaattatacactaaattggtagtgcactaaattctatattattaatggtattgaattttgaatttacaccaatttggatttgaatttttttatttttttaatttattttaaaaaataattttaaattttaatcctcaaataaaaatttagcacaaaataataattaatttaatcaaaacactattatcttgaaaaatacaaaataacaataacaaaatattaatattaaataaaataaaataaacagtaattaaatataaaaaaaaataacataaataatatatattaataaaatagaaaattaatatgatcacttgatctaaaccttgaaaaatattaaattatgcatgattttattttattttaaaaaaaaaattgtaatttttaattaatttaataaatattttatttttgagtaattgatgtaaaatacgttatttattatgatttttggtgtgaacaccaaactcaaaaattctacgccaaattcgtgaaagattggagatgttgtttatattaacagttacactaaatcacatgccctaatcctctctttaggaagaaaccctttcttcacaaatccaagaactcctcattcagacggaaatttcttaaacagcacccacaagtatgaaccattctagctttttaatatgattataattattacaaatgtattgatggaatttatttattttctactcataaaacataaatccttgaaagttttaaaatttattgcattctatgaatcaattgatgatttctctgtttttgtttttacttgttacaggtcaatcatggctgaaagtagtgatagaacatcagtgttgatggttgaggaggacagaatttcaaaactacctgatgcgttaatcctacacatactgtcatt

SEQ ID NO: 394649 - DNA, 1218 bp, Cannabis indica
attaccaaaaatatccataaaacatcaataaaattctcaatccaaggttcattaaaagatctaattaagataaattagttcatgctcaaaaacacaaaaatacccaaaataaaaataaagaagtatgaaaatgaaatacaaaagaataaaggagtagaagaaactatgtggatggatcctccttcttccttcttccttgtgcactccttttcttcttcttctttttcttcattcctctaggtattattaataatggtggctgccaaaaattatgttcccccctttctttaaagctagggttttttatctctccaaaaataccctccacacggttccttaattcccacttagagacttttccaactagatcagctctaaaccacttatctttcgccaccccagcctcatatttgctaactcaattaatgaagtgctatatcctctttttctacattaatttcaacaatcaggccctgccacttttgctacagcaaaattcctgcaaaacttcagcaaaaccttgcactttttctattaagtctttttctttaccaaaatccaaataaaacttaataattcctactaacaactccaaattacccaaaagaacataaaaatacaaaataacatatattctcacaaaatggaaggaaaagaactaaatataagttaaatacacacacaaattaagctaaaagaacatgacaaataactctttattcaagagttatcagttgtctcattaagcaacaattcaaggaagatttactactctattggctgtctcattaatttttatagttcatatcaaagttgcagcggaagtagaataaaattttggatttaataaaaataattgttgaatctgatatgaaccataaatagtggatctcaaaacaattatacataatgcaaacttaactattagtttagagattttacctcttattgcctatcagggtttctttactatctttttgtgttattcaatcgaacattcaatccagaagaacttgttaaagagttcacaccatggtattaacactccacgaataaattggctattagatccgatttggatgaatgtaatttagtaaaatcactatgtgtatacaaattcatgagacactacgattgagataggaaaagaacacaacacacgcaaccacactataagagagaggcgtacgtgtgagagagagagaggagagagagaga

SEQ ID NO: 394650 - DNA, 1368 bp, Cannabis indica
attataataaacctaccctttatttgattcaaaatcatctctacactttgacaaagagtgggtgataaggctggaccaataacaaaggttggaagtaatgtcaccaagtcaattttgttttcctttgcaaattcccaagcagccttttctgccaatatttttgaaagagcataccaactctatcgaaaagaaataataaaaaaatatacatataaatttaacaccatccttaatggaagatacaactaattaagtgacaaaatattagcacaaaaatagataaattatatatttgatacattattttaattgtgttctaataatgtgtatgtaaatttatttaagaaaataaaattgggggaattttcatatttatggtttttaaagtataagttttcaattttttttttcaaaaataaattattttatggcattattatgtatttttttaaaaaaaaagttttataatacaagtaagataactggataccttaagagataactggtttatactaatttattgcaaaaatataaataaaaaatgattaattatttattttttgtaaatctggtactaattttagcacataatcatagaaataaaaaaaaattaaaatataatacacacaactaattatttagcacaacttaagaggatatgtaacatatataatgataaaatgtacagaaagagggacccaaaatttcacttttataaatgacaaaaatgagtaaaagggtaatgatataatatatataataatgtacaatatataaaatattacaaaattttatattatattatatgtaaaaatttctttaatttgtttttcctcctctaattcaaagaaaatcagtagtaggtataaattaagctaccccactttgactatgttgtcaataatgtaaagacattttctttagggtaataattgatgtacataccttcaactcctcacaatagagaggatctgaaaaccatgtttcatcaagaactacattagggttattcaaagattttccattatacataactgcagccatggaagatgttagaaccaccctcttcacacatctaaatttcacacatgatctcagaatgttaagtgttcccttcactgctggatcaagtagttctttctgagcacacacatatggagtatatataagaggtctgtaattcaataatattagattttgcacattgaggagtgctaattatatataaccacctattataacttcttagtcgacctttacgttcgaaatcacatattggaatatttttttcaaatttttttatggtggtgtattcgttatagttataatatctctctataaattttttgtaaacaatccaaatatatt

SEQ ID NO: 394651 - DNA, 669 bp, Cannabis indica
ccgttaggaaattgctgagaaacgcaaaaccagagagaacccagagaaaaaaaacaccatcttgggataaaaagagaaattatttgatatccccgatcttttctggaaatttcccgggaaagaataaaataataaggaaatagagaaagggtaaggttggtgaaagaaaggtacctcggaagggaactcggcgcaaagacgctcgcagatgaaaatggcgttggagtacatgaaatcgcgaagactgtgttgaacacagtctatgagtatgggttccatggtgttgttttccgatttgcagagtgagaaagaagagagaggagcaggcagcgttttgatttttttttgggggcttttctaggttcaaaatcaaatcaggtgccacgtgctaatctcagtttgaaatccaacctcacgtgatactgcttccttcctcccactctctgtcttcacatatgttgtgtcaaatttttgtaaattgtatgtgcacatacatatcattatcattactctaataataaattaataataatccaagattgtcaaagaaaaaataattattgtcttataaattatgaaagatacatacatacattcaaaatttgctaaatatttattaatattatgaaatattagtattatgtaatattataatttagagaaagaaaa

SEQ ID NO: 394652 - DNA, 698 bp, Cannabis indica
aaagtttgtcaacataataccaaaaaattgtatttataccctgctaaaccatgaattccgaaataggcgttgttaccatctgaataattaaaagtcaaaatatctttacaggcataaagtaacactaacaatataaactccagacaaaacacctcaaataccagacgtaagtggacataatttgtcactcataaaatactagttcttacactctacttttaaacaaaaaaaaaaaaagagtaaaaaataattaagtttagttcaaatatatgacaaatattcttatggaaattcaatgtaaccacgtttagttcaaatatatataacaaaagttattgtgaaaattgaatgtaaccactattataaagtcaccccatatggatattctatatataaaattattgcaaaaatcttaatactctctcatcattcagtgcacttttgttataatgttcatactaagggagccttctagtttttattagaaattttcacacaaaaatacaaaataccaattttattacatatatacaacaacacaggtcacatcaacattttcaccttctctcttaattttattacacatataccacttgcacatcaaatccatgcacctatcaacatcaatcaactctcaatctacttttcctttttttttcttttttatttgattttttatttctattctattttttttt

SEQ ID NO: 394653 - DNA, 977 bp, Cannabis indica
tattttattgagtgatatttgactcctaaatcacattactttttatttaaaaaactaattatttttaaataacaaattatttaaatataaagaaattattacaactacaaaaaaaaaaaaaaaaaaaaaaactgaaaaaaaagccacatgtacatagatatactaccataacatgtaccgttcactcatttcattctcattggcccaaaatacttccccatttgatgaggtagaaacaaataggcttccagtaaataaaccctatacatatatattaagaaattctatttatactccacaaaataataagtataccctaaaatttataaaagttaagtttaaactaattttaaaaatcactcttaatattttttaaaaagaatttctcacattattttgtgttagttttaatacttattttaattttatttttacaaattttttaaatcatgaataatttctttttaaaatataatttatttttattttataggcctgttttttagaaatatgaattgaaagaaaaatattaaattttttttatataattaaaaatataaattttatataaaataaaaaattattttaaaaaaagtatatttataaatttgtaagatacaaataaaaaccatataatatatttgaaggttgccctagtaagcagactaagtctagtaagaagatggctttcaatgcatatgcatatgcatgtactcatcattaaattcgtgcacgaaggagtaggcaatttatatatatgtactcatcatcatcatcatcatcatcatcatcatcattattattattattaaagagattctacgtacgttataaaaagatcgatcaaaaataaaaagtctaaccttatcttctttctgtgtacgcaccgcttatcaaagttcaaaaaagaaattaataaaaatggagttcgtttttacgtacgtatatgtcactacaaaaaatagggataacttttt

SEQ ID NO: 394654 - DNA, 988 bp, Cannabis indica
catggtgtttaagaaaataaaatcaactctcaaacaaaaaaaaaaaaactaatgtagtgaatattaagtattttatacattaaaagtatatttaattttggtaatgataacaatcatgatttttccatgaataaattacaattcagttttacttcacatcccacacatgtaatgtcctatgaaagacattaatgtgtataaaaaacaaaatactcctaaagtaaataaactaagagtactctcaacatttcttctactttatcactcaaaatatattattaaatttattttttttattttatttctaatgtttacatttcgtatactaaatttacaaaatgtatttctttcatacttccaaaaatttcaatgtaagagcaagtacatgtcaattcgacgaaaactatgtctattttattattcaatgttaaacaattattaaaatagagaattatttttataatataaaattaaataactcaactgaagaaagtgaataaagtatgatactacaattttaaatgatagttaaagataatcttcaccctcaacaatcatcctcaattataataacaaatgatattttaactttttaataaaattattaaccccacagataacgttaaagcaaacaattattcaaattcccctattgcaagttgaattatctacgtttttgggactggacacatggccttcaggttgacatttaagacttatcagtaggactctcatgatggatatagtgggccaagcccacctgtataggaccttccgggtgttgtatgagtttcgtcctcacagtacctgttaggctaaaattagtctaagtttcgggtcatattttccgttagttttcactctttgtttctagttttaggactatattacacttgattcttttgtttcaggtcctcgggcatttaaagaaagcatgtacaagaattgaggaaaaatggggaaagaatcgagaagaaaaaccaagatt

SEQ ID NO: 394655 - DNA, 790 bp, Cannabis indica
aaaataatttcttaaaaatccttttcaaagaaattacaaattctatctctaaagttttattatagccgttaaattttctagtctaatttttttaataatttatatcataaataaatggccgtctagatatataataggttttattattaaattttctagtcattggttacgaaatgtccaaagtataattgtatatagttattttggttaagttgtaattttttttgaataaaaatagatttcctaaaagaaaaaaatagtcgcatgccaaattacaaatactatggtggtaaattatatatatatatatatatatatatatattgtaaggatgatagtaaaatatgttattttaaaatgagtgaccaaatttgtgtaaaaaaaatgagtgaccaaacagtgtataacaataataatgaaaaatggggggcttaattaaatgacactaagaatatatcatatgaatgtgatgattattctagagtaattctaatacagtcaaactaattattataatttaagcaaataaagatttatctccatacacgtcaatgcagaatttatttgccagcactaaaaaaacttatatattcaagcaccatggcgacaaggggttcttctgagaaattaatacaataattgactggtcgatccaaattaaataagaaccatacaattttttaaattgccaataagttaaaaatatatacacaattgtcaaacattttttttttccatttgatgataatgatcaataagagagctgtaaatatatataattattactttt

SEQ ID NO: 394656 - DNA, 522 bp, Cannabis indica
cgtctccctggggccttggccggaggcttctcgggcttatcggagttcttggggagcttctttggtgggcggccggggcgacggcggcggtgacggtctgtgggcgtacccgtgtcaagtatttcgacattgctgactgagaaaacatcgtccaatacaggtgtggaggtggtgccgggggtagtggcggggacaatggcggtggaagttgatgtaggtgggatttctaggttttcggaaatgggggttttgggtttacgacctcgttttcttttggcctcagtctcacccattttggatactgggatttggcgaagggtctctcctctgttgaaatggttttggtcagctcggaggaataagaaaagaagaaaatgactcctccagaagtagtagagggaaaataataacggggaataatttcgagggcttttgaataatttactaaagtaatagggagtcgtggaatggtgaataaaataaattttacaaaattattttttttctttttcaatgaatttt

SEQ ID NO: 394657 - DNA, 762 bp, Cannabis indica
caaaaatcctaattagtcaaactttattgttgccattgtaaaatatttagaaatttttttttttaaaaaaaaagtacgtgcttaataaaaaaaaaataaactaaaaacttttgttggatgaaacaaataagtgtaccaatacgatcttttaaggaagtgtagtataaatcttctaaaaactttaatagttggcccttagtattaactattggctcaacttttgtccatgctgttgcatttttgttctttatttaaataatttgttaatatagcacaaatataatgttaatataatccaattaaaagttaaggcaaaaaataaatacataaataacagtctaatgatatattagagtatgcatgttcattcttagaactactatttgtatgttaaatgctaataaattggattttagctagacagtttaaaattattaaataagtccttattataattatttcatagccgcataagtaaattagtttaaaaaatgaaaaaaaaaaaaaaatataactgaaggacaatatttgcaacgatttatatagttcaggagaaacttttgcgacgtttagaagaaaaaccctaaaaaagtcgcaattgaaggggcaaaacactacataaaataattaaaatgttaaaattataattaaaacaacttattccacatgcatatcaaacacaaacattcctactatacattcactaaaaaaaaatattacttttttagtgataattttttagtcacaatataaattttttgt

SEQ ID NO: 394658 - DNA, 621 bp, Cannabis indica
ccatattaaatgcaataaataaaaatataaaaaattaataattatattaattagtcaacaaaaaattaaataaaaaattaatatttattataatataaaatttaatttatactaattttgtgttaaatacaacttttatcataccttaaatttacaccacattaaatactactaaattatacatacaccactcttataacactacattatatatatgttctaaataaataaaaataatggaattggagtttggggatatttttgtaaaaaaagaataatatgtaatgggaggaggtcagaaaaggaatatggtggcagacaaatgttctgaagtccaatgagcaggcttgttggtcatatattttcaacggaagtaagtaattctaagtctaaagtagtatttttattactaaaaaattataaaatcatcaacacgcgcaactctcgttttgttttttttttatttcttttctggaagggtgcaattctcgttttgaagtatggtcaatattactatacgatgtttttttcttaaatgaactattactatattctaatttcgtttaattcactaattagggtttatcatttgtttgtatctcactaatactatttctcacc

SEQ ID NO: 394659 - DNA, 884 bp, Cannabis indica
ttacgtttttcgttacgttaaatttttcgtatttttactatttttttgtcatttgttattctttagtttgtattcgggcaggttattcagttgtgtggttcaaaaggataatgtacacccgtacttggtatcttgtgatgtgtgatttgataaaaaattatgttacaaatgcaaaatgagaaactgtcttcccatttaatcaaattgcttgaagtaggaatcaacttggaccccagaccctggacctggacctcagacccaaccccgaccccgaccttgaccatgactccgaccttgaccctgacccaaacccgtacctcagagctcgacccagattaggacctcgaacccataccccagagcccagacctaggaccctagaccccgctctcgacctggacctaaacctcgacccgaatcccagactttgtgttggaaagtcttttacgagaatcttatttaccactcacgtatgctggattaattctaataacattctaataaagaatttcctaaaatgataaagaaacacataaatggattaatagatccttacagtggttgcaacataatgtattgtctccttccgttcggatctctagcctttgattcttgtctttagcagagcattatcaatatctgaacctgaatcttctcaccattcgattgtgttgatcatagtcttctacaaaggcctgagtatcacctcgaataatgtgggcataaaatttacattttttttctctattttgcaacgcaatgtcaaaaaaaacctttgctataaaactcaaaagtttttgtaggaattttaagataggaatttactatcttgcccctacaccaacaaacaaacgaatcaaattcccaaggtcaatttcgacctt

SEQ ID NO: 394660 - DNA, 656 bp, Cannabis indica
aattggttaaaaaataatgctactttttggtgtataaatacatgcacatattgctctttatatttattaataatagccaataaattgttgatgatgtgtatttgaattttgatacaaataattcaaaggtgttgtcctgtgtattattagggacaaggtgaggttgtgaatgagtagatttctggttaaaatgctttcatatttggggctgattacaactccacttagcaaagtggcacagatttttgataagcatgaagtgtttgtgtagcacaagtgagatcccactcaccgaatgaaaagacttaaaacagagatagagagggtatataatcaacttcctataagcccaaatgggcagaaataccattccctttttcccaaatggttccaacacaacaagggaacatatcttcccagccccatatcatcatcatcatcatctgaataacctgaaatgttctctgcatgtgaatatccactttttcaaagttccctctaccaaatgaccaattctattcgatgatgatacatataataatttatctcaatcatgattgttgataggcagcttttcattatttgttagtggtcatgttttagttccaagaaagtttataagttgtaacacacttatttgttagtcattctgtttt

SEQ ID NO: 394661 - DNA, 764 bp, Cannabis indica
ttggaaggaaagtagtatataaataataagtactatattatgtatatagatatacaattattcttatgctaacaataatactatgtaaataatatttaattatgttaatcaatataaaatattttaacataattatattataaaatgttaataaaaaataatattttaatagtgctactataatgattgaatccttatatcagttattcttcttctttgacaaaattattatacaaatcctttaaatcattctagtaatgtactaagaaaaaaaaaactaggtacacatctctgttgctaaaaattataaatatgaattacaacaaataaattatcaaaatgtagctatcaagtgctccatttggtaacacttcattattattttattttatttttttaattagaaaagtaaaaatttttaaaactatattctataaaattgctttcacttttcattttttaattgataattaaaattttaatttcacttttaattttttaattgataatcaaaattttttaatattttggaccccgatcctaaacttagaccttgggacccagaccttgaccgcatgaccctgaccctggaccccgacccagaccccgactctgaccccagactcggactcgatttaaataaaaggagctttttcatttttacactttaaaatagctttttttttttttttgtgcatttttacaaaattttatatagaaactcctattgtaactagcgctgcaacctaaattgtaataaaaaa

SEQ ID NO: 394662 - DNA, 513 bp, Cannabis indica
agtacacatcaacgagctcaccatatggcccaccaaatattaggcatctgaagtaataaaaggacacacatcatcctaaagccatgactaatgcaaaatatcaaccttcgcaccaaaacctattgcccaacaaacctcagacttaagaagctcctacgattcaaagatgctcttccacacaaaatttggattattcccaagggatgctaaaagaaaattacccctgggaaaatagccaaccttatataatctactcactaaagagtttgtttttgtcagtaaacgtcacccttgctttcccaacaatacaaaattaaagtcacaaaattataaaagtccattccacttataaacatataaaattaataattaataaacattatcaataataatataaacatgtcttacataatgtcacatttaattacagtttcatatatttttataaatacatttttgaataactaataaacatgagtgtttattcaaaaaaaaataattaaataaacataa

SEQ ID NO: 394663 - DNA, 884 bp, Cannabis indica
tatagataaagacatatttataggaaattaaccttgtatttgtgtagtaatgttaattgtgataaatattgataacagtagaaattcgacgaattgacgaagaagtcacaagattaaaatttagcaggttggatattgtattatttaagggaaattacaattttatccttaagttttttagatatttacttcattttaaaattctctgcaaattataagttacttattaattttaatatatatatatgaaaaagatgaataaaaaggtgatgtaatagtctaaaattactctaaatgtatatatttcttctttctttaattttcttcttttttttttaatttttattaagtttataaatattttttattaatattataaatattgattcattttttagttaataaattagaaagtacacttaaaaattctccacatatgtttataaatatttttttattaattttataaatattgatcattttttagtatgtttattaattaatattaattttgaaatttatatctatataatgcctctatttagaattctctaacctaaaattttcaagccctcaacgttagcctccgcttgatgccaccattcatcggatcaattcatggagaaaccaaaccatgaatataccatcaatattccattctataattttttttacattaattattgttgattatattataattttgaccagatagcttgtgttaggctaaaattagtctaagttttgggttgtattttcggttagttttcactctttgtttctagttttagggctattttacgcttgattcttttgtttcaggtccccgggtgtttaaagaaagtatgtataagaatcgaggacaagtggtgaaagaatcgaga

SEQ ID NO: 394664 - DNA, 899 bp, Cannabis indica
ctctctctctctctctctcaatgcactaggataactaatatagtaataataaaaactttaatacaaatcccatgttcaatatgtctttaaaagtgcaattatgcagtatattagaaaatatatccacacatagtaatagtacaatatagacttgtaatccatataagaccacttttttggcctccaaaatcaactttgtccattggaaattaagctatatacattgcagattatagaacactacctatgaagaccttggaattttgttaagtatgacactagtgaagtgatcaatagaccaatcatatccttgcccaagaattagggcatgactttatgtggggatgccaatattgaaatcaaactatgatttttatagtgaaattaacctatatgattgacttatagtgccatgccatgacaaaggatgcctttagaatagtgtggtctcatattagtatatatatctcaaatttaaatataaaatagtcaacacaaattaatatatatgtacatatagtttgaaaagtaaatggaaatttttattgatgtgtaattgtgtatattggacgtatgacttatcaagcagaaacaataataaaaataagctaattaagttatatatacaaatataaaaagaaaactttaacgtaacaacactttaaactaaaaatttaataaatcatcaacgataaaatattaaaagaatgtgaagagtactatatttataaccaaaataaataatgacaaatcatacatattaatcaataactatcattcaaaaatgataatagcaaccctgtgtacatatagattttttactatgcattccttgttagataaattaacaattaactcaagatttatttgtatataacatagaacacaataataagata

SEQ ID NO: 394665 - DNA, 989 bp, Cannabis indica
ttatatgtatgtatatattttattaagatataattatttttatatagatatatattttcttaatgcgatacttaaaaatgtataaattagagatgattaagtattattaattcttaacaaaacaaataaagaaaaaaagttagtctacacaaaaggtataccaataactgaaaaataaataaaatataaaccacttggaaaaggtggagtgcagatttttttgttgaacagttcaacttttttcatttttttcacaatacccaccaacatttatttagtgaatattttaacactttttagtgcctagagtgagtggaatttaaggaccaaattaattgctaattattattttaaattcttaaaaacattcttttcttttcttggtaatgtcatttatgacatttgaatactgttataatctcccattttcgatctctttcaattcaacctcgtttttatacacaaaaaataataaacaagttaaaaagagtttttcaatacttgtagttgtaatacttaattacacaactaatctagacttgtgtgactttatacatacaagaaatggactttataatagaatactaattctctacttttaatgtcggaaactatagtgtagatttgtgttaatgattcaacttttatggtcatatattataaccctttttatattcactaaattcatgcccacccactacttaacatgttaatttgtcaaagatgatttgggcgcgtttagaaactattatagtaattacactttattttaatatgaaataaaaatagaataatttttttgatatttttttacaataatgtagttttgatggtagtatcgaaggaaccaagaaagtagaaaaaattatagaactaataattttagtataaaagtaagaaagaataatgtaaaaattttaatttggtataataataattagggatttttactataaatattttattttaattatgtgtgacctcctatt

SEQ ID NO: 394666 - DNA, 1000 bp, Cannabis indica
aaagcttgggagagcttgtgctactattaatagcaagatttccttaccaactttggacaagaaatgcccttcccaatgctaacttctcttctgcaatttatccttcaagaagcccaagatggcctttttgttttgaccaatcaaacaaggtaatcgcaaataaaggctagaagcatcagattcattaactcccaactattgacatattctatttctagcatccattttagtgttagtgctgaaaaaaatagaatatttggcaaaatttaccacctggcctgaagcgagttcgaacttttttgtaatatccttataagtctaatggtaagtaataaggatttacaattatattatgggttaatcatgtaataagtgggattatgatcctattaatttagtttaacataaattttaaattcgctataagtgagtaaataaacgtaatttataaattacggagatttatatagcatgtttgaatgtaatatgagctatacgtggaataaaaatattttcaagtatggcgaccttggagactcgatcgagggccagaaatatcataataggtttaattgatagaattgataggaatattgtgataaaatgataatataagtattgagataattaggagtatgtgggatttgacttagtgccctaaaaatgtgaattttttactggctaagaaatgataagataattatgaataataaagttttattaatattattattataatattatttatatatattataagtttataatcaaagaacaaaattgaacgaaaccctcttttcttttcttcgacgaaaccttgtcatcctttatctatttttttttatttttaacccgaaacctagcgatctaagctccagtagtagcgggatagcaaatctttgaaataagaaagcttaaggtatggtttaatttcgttttaagctaaaaatgattggttttgtataggggtttcgtgaattagaatagttatgaaggttct

SEQ ID NO: 394667 - DNA, 1156 bp, Cannabis indica
tttagcacaagtactactttcttatttatttttatgtcatttatactattttattagtatagttagccatatagattgactataaactatgtatattcattttttttattaattacacaataaagacaataataaagttattagcttttatatgttcaataaaaatattaatgaaatattaaaattttcatcaaattttgcatgtttttattggagcataatgataattataattgatacaaacacatcaagttgtcggcagaatttagacaacactaaatattgcgattactcaaacaaagttaaaatattcactagcagttatgcgagtactgacttaataaaatagtaagtactcataatataagctactaaaatagacaaaaatgaaagcaaaaataaagagaaaataagagaattatagtggttaaagtttggtttacttagttcacttatggtaataatttcagcctaatttatttgatttggatcattcatttatatagaaaataagttccctttaggattacataatttgtctagcagggccgttattacaataaattacagaatcaaatcaaaataaacgttgtttaaagaataaataaaaaaaagtttcatcagttcttgaattaagtgcagcaacgtatgcgacttgatagaccgcgacttcccattcatattccaacacacgagctcacctactctacgatgttttacttgcagaatatgcgtttcggcctattttgtcgaatgtctacattcaccttttgtctcatagtcggacattctatgtgttgacaatgtaggacatgcaagtccctaatgagttgtccaacacattagtcgtttagaccaaaacctatgtaaagagacggcctttactcgtcataagagagatatacttgatcattggatataatcttactactagaaaaacgggttttagtgacccacattgagtaactctaagactctttattgatacttcaacgcacgtcactaatgagggtgactgaaaagacagttttagtgacactgcacacgtgtcactgaacctttttacattcactttcttcacgtcaccataggcctatagagtcaggttttgtcacactaaaaaggtaacagcaacacgcataaaatgtcactatat

SEQ ID NO: 394668 - DNA, 1292 bp, Cannabis indica
tgatatagtgacgcgccaggtgtattatggcacatgtatgcagtcacgcttgtcgtgtcactataagtcaatattttttttaaaaaaataatagaaaatatggaaattattttttagtgacacttcatatttttagtgacgcaaaataaaggacactaacactgaatttttagagtctttatgtgcatgtcactaaagctcacctctaaccctttagtgactcgcacttttgtgcgagttactaaaactcaattttgtagtagtgtaactaactaagccaatgataaactagagaccttaagagtgtctactcatttatactattattaagttaaggataaacaaaataagaaggataaattataccctttgttgctcaaatccctcaaaatgtccgatatatcactaaatgtcaatttactgcagtttgaatgataaactctgaagatacttacaaaataaagctaactcacaaaaattgaattcaataaagaaacaactgaacacatataaatatttatatatcaattgaatttatattttgaaagaaaaaaaatccaatattaatatatgtatttattagctatgttatatgaaattgaaaatttattgaggagacccagttgaaccagttgaagttttttgggggtagaagagtttgaagacgacaagatgaataccaaaaatgaattttaatgctaaagaaatttaagatttaggtcacaaggagataaatgagaggaaatcaagggatatagttcaattccttctctccaagcttcccaaataatgaaataattgtggaatgatgatctcttgttcagtgccaagcaacaaagaaaggttgagaaggaagatgttgacgtcaagcaaaagagaaaagtgggaatgagggagaggaaaatagaaggaatgagaaatgattaaaatatttttgaaaattttatagtgcttcgctagatgtggagcaactaatgtagccttctgtaaaaaatttagaagatgaaggagctgatggagtaccattaaattacatctttatattttacaggttgagaaagcttacaggagttgatgtatatacaatattcaacaataaataaatagaaatatagtagtgtacgtagatatgtgctaagttacacccgttgtaaatttgattttctatatttacatatacctaatattttatttctaaactaatacatattaccattgaaaatatatgaccactttatctaaaacccaaaaatacccctatcaaatttttcatacttttttttagtgcaaaa

SEQ ID NO: 394669 - DNA, 909 bp, Cannabis indica
agagagagatagagagagagagatgatgttgtggagggggttagttttgggtttaagaaaaaaaagtattagttttttatagtgttaaagttttggtaataataattaaaatttttaatatttaagcatataaattcaaatttacccaaacaaagtgcgtgtctatgtactccttttaccaccaataaaaaaaaaatagaaattatataataaatgagtaaagttataaagatttattgttttatggcataaataaataatattatggggttattattttttattttttttttatatttgtatgagtttttttatgtcatatttttgtaataaaatttaataaaaacttgtaataataaatttcaccgaaaaagtctatcagttttgattgttttctctaatatttggtcagtataaataatgtgtaaggctaaccaaagggaaatgctttgcttttcacttagtttccccagctttacaatatcatatatgttgacactttagagcaaaagatttccttgttaaacactacacatcatatcttataaagcatttatttctcatacatcaagaacattgaggtatgtgtttaatttatgtttgttataaatattttctatgaatattttttttatttaatttcttattagaaaatagtagatgtgttttataagtttttaaataatatatgtgttttaatgatactaattttattaggctaattagtaattttttctcctgaattttgacatgtactaaatcgtgctccgtgaactttttttgaaaaaattccctccgaactattgagattgttaaatttaaggatttttgtctaattttagtaaaaaattctaacatggatgaaagttcaagaggcatgatttactacatatcaaagtttgaggggca

SEQ ID NO: 394670 - DNA, 821 bp, Cannabis indica
ttatatgtataataataataattatagtatttttaaaaattattatactatttgaatgtttttaaaaataaaggtaccaaaaataatgtaaaaatatttgaataatatgtaaataaagcatcttcaaagaatgttattaccattaaaagaggcttaaataaacaactaagattttcaatattaatactcagtaattaatgtaaataaaattacaataacatttctttcccattttatttggttcaaaacccaaaggaaaatgcaatcaatgagggtattatggtaaattaagtgatcatgaacatttagattttctattaaagttgtaacaatatgcaaggcatgcaggagccttactccacttcattctttcttttctttctttctctgtctatataacttcagagaaaacattagtttaattacttgacaacaaaggtatgcaactaactcacattctttgttttcttagaaattaaccacacaacattaatttataggtttcgtatttatgcattttgattctgtttttgagtattttttttttaaaaaaagttaatttttgtgattgcaaggtatagtaaaatcaataggttgaggctgtttttctttttattgattttactttctctatatgactctgtatccaaacataaatgttggcctttctttgttctcatgccatacatccatataatatataaatatggtggtaggaatatttttgttggtatcttcttttgttaggagttagaaaatagtgttcatatgtagtaaatcttttagttttggtttaaaaggaaatgagttttgtatgtttt

SEQ ID NO: 394671 - DNA, 673 bp, Cannabis indica
tacgtcttaggatagcgctcaagcctaattaaacctacttctccttcttacttctcagtgggttgagacttgatcttgtaagaagtataagactctcctctagcgtcggtggagatttattgtgctgagcacaaaaaacataccaccccgaaaaatgacgatacacctagggaataaatagaaaggtgctactccaacaatggcacaaaagttggcaaagtaacacctcaggggcagatgtgcaccaatttcgatatgaactcgcctctagacgttgaagcctccttctgcgcacttgctatgcatctccctctgaacagagagtctattctagaatagtcccgaaacactttagagccccatttgggtctcatagttcctcaaatagttataaatcctaaatttattgatatattggtccatctcccataaactgtcatttaggatcaactttagaacaccatatttctccatgatctcctcctccatgtcaacttcctcttaatggagcttctaaggcattattttgtacaaaaaagactatccaagtagttagccaccctaactacctagtataaaaagggagcaggagagtactcccccataaactactttgagaggtcctaattgttggaagttattttaccaggaacttagatctactcacaagtat

SEQ ID NO: 394672 - DNA, 973 bp, Cannabis indica
atacagatgtacatagtagttactggccatccagttaatatactaaactaaaatctacaaaattttaaacaaaaaaaaaataaacgtaaagggttttaattgaaaaaaaaataaaagtattaagtgtaataataaaaaatataagagaacttcgcctactaattatcttataatttatttaagtaatagtcctagtttttaaggacttgcatgtttattatttgtttgtcatgatcacattctaaacaaattttaaaaataaaaaccaaattaacacatttctaattataattttgtagtaattaaaagatcactaatggtgtgtaagaaaaataattttaaaatatatattttttaaattataatatatataataacttcagattcaagtaattaattactctttgggaaaatatttctcaattattgctcccaatctcaaatctaagccaatctagcatcgacaacatttctataacgaattaactttaagctaattattagaagtaattaatgatatgatcaaatcaacaaagaaaaaaaaaagtacttctaattaagaacaagaattaatatattataagaagacaaataataataataatactaatatagtacaatttaattcaagaataattatgacaacaatgagatcataaatattaatattaattaaccgaattatacgcgtaattaactatcaaatggctataaataatttgttataataatctacttattctctattaattacgagcttgaaatttctaaacagaaaataataatataaggattctatatttttcttctgtttagaatattctacaaaattctagcataaaatgattaaatttaattttatatagaaatggaaaaagttctatatatttttcttttaataaatgcattaaatgatatatatataaaaaaaaaacttttctgtaaaataattaaatagattatgagagtattt

SEQ ID NO: 394673 - DNA, 606 bp, Cannabis indica
atactaacaccagatctataaatataaataccataaattattttaccaaaacccaacatgtaaaaaaaaaatcccaaacacaaaagttcattaaaagagcacttaaattaaaaaaaaaatgcaattaagtaaatgaatatttttttatttatatatattgtagatcatgatcttataaaaacaaaaacaagtaaaaagtaagatctctcttctcatattatattaaaactactatattatagttagggtttaataataataataatatatatatatagagagagagagataaccctaattacatatatacttgattatatatatttatgtatatatatatatagatatacctttgatttgcatactcataaaggcgtccacggctagagaagacaataagagcaacttcagcatcacacaaaacagagagttcataagcttttttcaacaaaccatttcttcttttacaaaaagtgacttgtctatttgttgtgttttcaattctctttatctcaatctttcctcttcccatttttctccccggagaagaaccgacatcgacatcgacatcgatatcgaattattaacattgttgttgctgtgttg

SEQ ID NO: 394674 - DNA, 1372 bp, Cannabis indica
gtctcaaagaaaatccccctttcgtttcttcatcagattttgaacctgaagaagagaccaaggaggatcacgaatcagaaggtttgtctgattcaagtgaagagtttgtgcccaaagaacaaccctctgctaatgattctaggtctgaaagggaagagcctgaagctaaacttgtttaattagtgcagaactagtcgctgtccctagtgtagttccaaagaaggacaaaggaaaacgacccattgtttctccaaatcttatttttcctcataaaagaaagaggccttctggtattactcttgaaaacttcaagccccattctcattatttttgttacattgataatgccagagacatgaaattttatgagaatcagattttactattgagaaaaatttcaatgtcaatgctcataagccttttggggtttataacatgttgaaagaaagacaatggatggatactttgatcagttttgatggttatgtggatcgaattgtgaaggaattttatgctagcatccctaataagtgcctcgatgacgactcttttatgtttggcaaagtatttgtcaggggacactgatattcctttactgtgaaagatatggctgaggctctcaatttgcctttgggaattaagataacagatgtggagtttgatcgtgaaaaggtgttcgggtatctcactggtgataatgatgtggaactctctaacactatgcatatgtctcaactaacatatcaacatgttgttctcatgattttccctatccaattggtttccttgctccaatccggtaaatgtttcaaatgaacttgcattattttttgcataaagtttcaattcgtgttgaaattgatttggctgatatgatttgggagcaaattgtttctcttagaaagggcaagaaacctagactcaatcttatctttcctcatttaatctataagattttatctgaccaagaggaattgattcttgagaatgaatccattgaaatgccagttgttggaacaactttcaaagttttagagagaccttctaaaggaaaatccgttaagaaaaggctcggtctgcttcccctagtgttactgataaacctgctgctagaactgcttccacttctgcttctacagaaatggctgaattcaacttgtgtttggaaggagtggagacaagtcaagcctcacttctcaggaggatggacagcatcatgaaattcttccgatccaattatgatgaataagtggtccattttttatctcttgctttcttatttatgtgtgcttgaactattatgactttgttcatgttgtttttcgttctctttggctgcttggtagacaaaaagggggagtagtattatttt

SEQ ID NO: 394675 - DNA, 1048 bp, Cannabis indica
aatgctctggaaagaacatagcacttctccaaatgcaagtaaactctgttgtagattatcatatcagtaaaaccctatgtctgataaatctaggaaactttattcacatagtcatgtttactttccaatgtgttgacggcacaataaacaggatcaagtatgtgaaaagggtttcagatgaatttatacattatgtacatataatcatgaaataaatcatgtgaaccatgcaacattaaatgttatttctgatctatattaataagtaaatctgattatattgaaatgagttttatttagggcataaaacccaacagtcctttggccaatagtgtttactctatctttggttttagcctccatttctttcagttttttgtcatgattggcctggagggacttgagaaaatccttaagttctttgaccttcttttgtcagccaaatgctgcttttctactcctcctttgtgtgagaaatctcggccaccgagtcattccacttcttggcttaggtatccctaagctccctgatttggcgaagcttagtctcgagcatttcaactcgctgagacaaccgttgatgggtaacattggagagaagagaagcctgcaaggagatggccactcaaagttagtaaaaatgataaaatgataaaatgtgggaactagaagaaaaggaaattaaattgctgcaaaagttcgcccaacccaagagtcataatgttgcaccaaccattggcagcatgcttcgagtagagttgcgagccttcagtcccaaccttgtggataggcgataggagggttccagaagaaccatctctagatttgaaccacatagtttcacctagtgtactgatccggttggttgctccttggcattctccacagcagagacctcattcctcttctctggggactttactagctccatggtaagctaatttgaggacttcttcttgttgttagtatttttggtccttttgggttctttggtagaacccgaggcctctaccagcttgagcaacttgttggcttttgcgccctaaat

SEQ ID NO: 394676 - DNA, 2479 bp, Cannabis indica
agagaagagaagaatgataaaaactctctgaagaatgtctcaaatattgcagttgatctctccactttgcatctgtattctctctttttttctcgctgaaatcaactcccttcttccctttatataggcattgaaggcctaaaaatatggaaaaaaacgcacatgtttaaattcccattcggatttaaatttttggaaaacctcaaacgagattatttttttttactgcgtcgactgatagtattttggtcataactctctcgatattgcttggaattggacgattcaagatgttccggaaagataaaagagagatataaaacttttatgttttcaatttttccaaaatataatcagaagatagtcgaattcaagcttaaagttacagctttatttccttgcacaattttctctattttaaatatcatctttttgtggaaatatttttatcttttttcccatctttttttcttgatatttttctaatcttcttctattttaaatgtgtcacaaataaaagataataagcgtaaaaaatgctccaaacacgattaaaactaaatttaaaatatactaaactaatactaaattaatactaaaaataacctaacattttaggcaagggatacagagatacaatggttgctagggttttgagatatatatcacatataataagtatatatgagtgttatatctatatttcaagcattaataaaaagttgatacatgtattaaagcgggaatatgaaccaactcaaattacacattattaaatgtacttaaatgactcgcctcggaaatattgttaataaaaatacttaaactcactaccatatagataacaacaagacatgagtaagaactattgattgatgagaccagcaaggtaagcaggtccatctcaggataaacaaaatacataatggaatttttggaataggtaaataatgagtttccagctcattgacccacatactgatcatgagtagggctgaatattttaccaccactattagttttctagtccaacattattggacatgatgaagttcttttctagtccaacattattggactagaaaactcctaaaataatgtttatgtccaacactaattttgttggacatgaaaaaaggacattaaaggatttttttgtagtagtgtcccaataagtattgtcgtttccgttgagatatcaagcataccactgaggagtgccatcaattgaaagacgagcttgaaaatctcatcttgcgaggatacctaaggcagtatgtaagggctaaaggaaatgagcaaaatctgcctgataactaaaaacaaccaaggattgcaacctcccccagtcgagggtaaggacatctttctaatttttatcctaatatataagttcaaaatacatatcaaagtcaatgacaaaactgctgaaataactttgatcttatttaatgaagtagctgaaatattactagatacatgttagcaaataaattggttaataagttgtcttcgaacaatgatgtttctgtagagattcaaaggctttgggaaagaatttgtttacaagttgaagttgaatgagtacaatttgaaagaagggcttgaaaattttattgtgtcaaaatatttaatagaaccgatcttgatgatagaaaaacatgatctcttgaatgagactacagaaaaatatgatgaagaaaacgcttttcaaattttgatcagtaagtaactatattaatctattatacaatgatatttttttagccaataaagactactgctacttaagtttatataaatattaatactatatgtccctcactttctaaatattttattctgagtttgttggtattttgacaaaatggctatattacctagtttatatataaacaaatagaaagaaactacactacttctgtcgtgcttagctgttaagtgttaagtaaattgtcatgcaataattcttaattggtccaaattattaaatttttattttttatttaaaattaatttaaatataaaaatgacatgagagtaataacttgacacttaaagtctaagtaataactatagaagaaatataatttaagtatttttaccgtaaaatattaaactaaagtatttaaatatttatgctacaaattaatcttttatttaatatagatatgcaccatactatagcacacgcactttgtcccacacaaattaacaataaaattacaaaatgtttttaataactaataaacatgaccaaattatttatggttttgtaagtgtatttgtccaaattattgagtaatattagtatatatttattctatataaaatgtggttatataacagaatttttggtttatgagaatttattggttgacttttttttttttttaaattaaaaaaataacaaattattaaatgttgccacgtaaagggtcagcatccatgtagttagttaaaccaaatataattaagg

SEQ ID NO: 394677 - DNA, 1004 bp, Cannabis indica
gaatacataccagaggattagcatccactttgagctcagtcaaaaaaacaaaattcaggagagcgcgatctgagcagggacttcagttcgcgaactggtagaggtctgccccaaccctctacagttccaggctacacctctcatggctcctgtggaggagatatgacattctcctccacaaagttaatcgagtgcacagaaagactggatccagattcttcaattacaaaagagccaatcagatgactccttctaacaccattgttacagctcggagagctcgacacctcagtaggttcttcaaaaagatcatcaaaatccacctttgactcaaggtccctctccctagagtcccaagggaagtccctaacaacatccggatgacgtctaacaattttgttaggacgggtgcagagagaagcggagccctcaaatttcctcttcttaaaaggggtggtacgctcattagtttccgacgtaggcttcactccaatgtctccaccaatttttttaatttcatacaagtccaacttcccaaaatgcttaaggtcataaagtaactcttcttggactttaagaaaatgagttaaagccctttcctcatcaccttgatgctcggtcccacttgcaacattcacgtgggctatattctcctccaccagatcacattcaatcccacaaggcccaccaataacctcacctctctccttgccctttaatacatttaactcaatcggcctctttaaagccttagacccaacaacccatttaaatttatatgtatgtgtctatgtaaataagaataatttttttagtgtttttatcataaaataaataaaatacactaactcattgtattactaaaaaaattaaaaaattagaagtttatgtttttttttaatattactagaacattaatatatattatatattatgatttttttaaaatatatataattaagtgtagattggattgattattttttgaggtcaaacaacattca

SEQ ID NO: 394678 - DNA, 645 bp, Cannabis indica
gaagtcaaaggtgttccggtctatacagttgagttacgattttttggaaattgaaggggccaaatcactattattgctttgcagtatatttccagaagatgaactcatatgtgatgatgatttgttgatgtatagtgtgggctggccctcgtttcagaatgtcaacacattgggagatgcaagagacaagttgtacactctaatagatattttgaggaaacaatgtctattgctgcccagtgatgaaagcgaatctcacatttgttatcattgggtcaaactgcatgatgttatccgggatgttgtcaaatcagttgcctcggaaaagaattggtttcctctgtctaagcatgcaaagaatggagaattgcctaaaggtgacctcaaagatgttaatgcaacttcgttacttaatgactttacagagaagcttcctgacaaattggcatgcccaaatcttctttcattcattgatgagtgcccaaatcttctttcattcattgatgagtttgacaataatgaatgtctctcagattgcttcttcgcagaaacaaaaatgctaaaagttctgaagttaagtcgtgtagatctacgctcaccaccttcatcctttagttgtctgcttgagagtctcgaaactctttg

SEQ ID NO: 394679 - DNA, 643 bp, Cannabis indica
atatatatatttgtatatatttgattatatatttctcttcttattaactttttttttcatggtgttttctccaataaaaggaagaacaatgagaatgacaacaacaagatcaaaacaacgaggtaactaattatatatgtaatcttattttaatttttggtattttccatttttttttcatttaacataacgcaaatttagaaatctagtgattaattacaattattattattattatcttgctgattattaattttctgtattttattatcagccataataaaagtgatgttagttattggaagagattaaagaacttcatgaagaaaacttgtaagaaaggctcgacaaacaaattataagtgtctttcttataaattgaggtacattaattaattgactatattgatttttcagtttcttaaaattaatctgtgaacacttaattaatatagtttattatttttgatcaattttatcaactatatatacatgattaatttatcttctgtttcaggtacaatgttcttaattatcataaagaaataaaaaactggtggtcacatttgttcccaaaagacttgagatttttttattttattttttaatgaaaactgtattgtcctccacaaattataataaa

SEQ ID NO: 394680 - DNA, 787 bp, Cannabis indica
cccaatccatatgtatatataataatgaatatgattgaggaccctcaaacacaaaattacagatgtatccttctagctgaaaaggtttggtagttcactagtattttttttaaccattaagtgtgagtttagaaatatatgacaatatattattaaagagcattgctattattaggtatggtgtctaacaccttctcgacatgtcgtgttgcgattggctagcgatactccctaaaagctattatattaaattatatagaacctaatacttagttggaccaatagcgatattgactcataacaagatgctaagcactgctaatgcctcattattaaattagaagtattaaataagctaaaaaaaatatgttactatgtattttttagttcttaattaacacaaaataataagaagaaaatctctaattaatacatattaaaattaataataagaaaagagaagaatgttttgttagtcttcaccaatctggcagtctttagccggtaatctaccggtcaatcctagaacaactccttgcacctagatttccacaaccaacagctgactgacacgtgtcaattgacttattatataagcctttttattattatgttagacaaaattttgaaatcatatgaaatttcctaagctgcttttttaggagcagaaacaaagaaagaaaagtccctttccaaaatccctttttgtgttttataattacatcagtaatttcagaccccatttcattattttcaatgtgtcatcattatatatatgtatgtatat

SEQ ID NO: 394681 - DNA, 527 bp, Cannabis indica
aaaaaaaaaaaaaaaacatataggatgagcaaaatgtatattgtatatgcgtgataaaagagtgacttatgcattggtattatgttctcatagattctaataatattaaagagtgtgtagcgtctttattttaataaaaataaaaattactgtcaatttcttattttattcttttctcaacttttgcatccaaaaatacatattagagtagaaaatatgaaataaaataaaaatacttaggcatatattttttaaggctaagtccaatagaagtctaaaatgttaaactcattgagaattttacacttccaaccacattctaaaaattatcctatttatgacattatttatagtatcccactaatattagtgttacactataaattataccaattctttcttaatgtttttagtcagtcataaataatatatttataattaaacttttcaatatatattatttatatttatttataatttaataaaataatataataataaaaagtataattttagtattgtgattg

SEQ ID NO: 394682 - DNA, 944 bp, Cannabis indica
ttgtgcttctcaagatctgtctacaactcggagatgagagcagcttggttgatattcttgttgttcctggcatacagcacagtctcctttcctgatgtcattcttaacttctctgctagaaaggcctccagctcgacattaactttatcctttacggtaacagatgcctctaacaccttcacacgctcttggaaagtgtttgaagaccctctagagctgtcacagctgaactcagcttaaccaagccctgaaaacaaagcaaaataatgtcagtatcaaacagttaattttggccgcctagtcctttccttagatagccatggccggccagaaccctgcatggatgcccaaggccggccagccacattcaaactgcaccatgcccagctagcttatacaatgccaaaaagatgaacaaagttggaagcacaactcactagagaaaggtcttgaagactgacagagtacaacctgtcaagcccaccatcacccaactcctgtaatgcatcatccaagaaagggattgctctctctatacgtcgagtggctaactcaggagccttcttaccagtagctgacctcgcccctctatcgggcctccttgtaccttggccggcaggctgaattataggtttcccagtaggtgcatggtcgtgtggaaggggaggcagtgatggtcccctagcatctccaccatgagaggtcctggccaccttgaccctcacttgattaaaataaatatatatatatatattaaaataaatagattaaaataagtatcaaatgaagatacaaccttttaaaataataagctttagttataaggatattcgatctccattgttggtcttacatggttaatatttcaatgggacctcaaaacgctagactttgtcccccatatggatggtcttacattaaacatttaacaccgtaaagatctc

SEQ ID NO: 394683 - DNA, 615 bp, Cannabis indica
gggtttgaaatgaagatgatgatgaccatactcagtctctctttctctctgcaactttttttttttgaaatgcgcggtactaatcgaactcttctgctttcaagtatttttggctttcttctctttttgggttttggtttataattaccaatgtgccattgtggttagccttcagtttttttctttatttttttgacaaaagtaaacagatgtaattaagaaagaatacattttaatcaaaaaaaaaaaaaaaaagtgttataaaatatataagaataaaagaggaagatgaaaagagaaagaaaaattgaatgagaatttttttgtttattctaatgaggtgaactctatttataccatgactaaaagaatggaaaattaaatgatgtccataaaaattgtctcatcaaaaacttggtaaaaaaatttggtcaaaagaaagagtccagcataaattaactctcaattatttaggcattcgtgaagatcctctaaatgacaaatttcaatcttgtatatcgtcttctcaaatgttgatgctggtaatgactttgtgaataagtctgcaagatagacacttgattgaatttttttgaacaccaatatacattctct

SEQ ID NO: 394684 - DNA, 1238 bp, Cannabis indica
agtccatagctcaatgttattatcctttgtcatgagagacaaagacaataagcatttgtatcttgagccttttgccagtggtcaagagtaatccatgctgagtaaagaacttgtgttggagatgaatgttttttatcccacgcaatagagtttcgagatttccatagcgcccaacaaaccataatagcacggcatgagacatcatcatcatatttatcaaacatagactcgagccaatgtcctattgttgaagccgtatccgacagagtaatcaaaccacatttgttccagcaactgatggcaaacgggcaacttaggaacgcatgtgagacagtttcagcacacgtttggcaggtgggacacgaagatgatatgtcaatgtgctttgacacaagttccaagcaagtagggagggtattagtgacagccctccacatgaagttcttgacttttggagggatttttaggtgccaaaacccggagttgtcttgaacttgctgtccatgcttgttctgctgtagcaaatcgtaggggcttcaaactgagaagcaaccggacttctccccagaccaggaccagcagtcatcggtggctgtagagctgagaggaatgccaagaattaatgatgcatcacggttgttgaacatatcagtgacaatagagtaatctcagctcctagcatgagaatcaaatagagaatgcaccattttataaacaagcccgattgtacttgaagtaacatatggattggaaggatcgggcagccaaggatgctgcaaaatatttgttgtaactccattaccaattgttctacaacttccaagcttaagcagattttgagcactccaaatgcttcgccaaacaaaactatgattgttcttagttctgcattgagaaagtcagaacaaggatagaattttgccttgaatattctactagcaagagatgtaggagaacaaagaagacgccaaccttgtttggccaacatagcaagattaaaatcatgtagatggcgaaagcccataccacctaagttcttatgagaagccatacgatcccatgacatccaaatgattccttggcctttagcgcttgttgttttccaccaaaaatttgccatgatcttctcaatttcatgacaagtttctagaggaataagaaagacactcatagcgtaattggggagagattgaatgacagtttttagaagaatttctttgccagcacgggagagaaac

SEQ ID NO: 394685 - DNA, 524 bp, Cannabis indica
gggcaagagattgggtttgggctggattcatagtccctgtcacatgatctggtacaagtgagtttcccaggtttggatggggagagagaaacaggccagcagtgtcgttgtattgtccagagttgttgtggaaagagaaatcttattgcaagacttggccccgagggtggtgaacagagatcagattgtttgtagtggggttcagagtagggacattggggtgtggtattgttggtgtagagttaaggaggaaaggattgagaaggagcccaaaagggccatagtttggatgtgtggtaccacgcaaaacattctcataggggagaggtggaggttggtttgactcatccgaggctctcatatattcagtgcaagaagggtaagagtgtccaaggcgaccgcagtaatagcagtggtcaggaatatcctcatatttcatctcaagccaggttggggaggctaatcctgggaacatgatagggatgccacggggcaaaggcattcgggttttatgccctaaataa

SEQ ID NO: 394686 - DNA, 859 bp, Cannabis indica
atagtaaagatgagtatatactttttattttacgacttggataggatttgaatatatattgaagtatatcacaaatgtaagttagtacattgtaaccacattcgtaaatatatagttattttggacaaataaaagtatatatttgcggttcttttgcgccaaagacgatagtatttgaactaatatttgtgtatgcgctattaaagacattaaaaaattataagtgaagctattaaaatttagtaattgatcattatattagaacgaatagcttaaagttctaaacttacatttttatcatctcagcaatgtttgacgagatattaaatttaagcggatttaagaatacaattcttcctaatgtcattgttataaccaacatctaatgtttgctgaaaaaattaacaatgataattaatataaaaataaaatattatagtgaaagtgaaataaaagtgtgattcttaccctatgttccatggtataaaataatgttatcgtatttgagtcatagtgtttaaccatgttgacaattgattgatggctatcaccttgtcgtggtcgttattataaataagaagctcaatatcataaaacttgtataactctttttctctttcatttaaatttttctaaatgcatctatttaaaaaagaaaaaaagttcaaataatgtgtcctaaaaaaatggagagggcttcctctattttcataacattccctaaattttttaagtaaatagcaacacaacaaacaacacatataaagttttttcttatatctccgcagtcaatcaaacctagaatgtaaagcccgcttagttaatttggaaattagcagttgtttatgtttaattatga

SEQ ID NO: 394687 - DNA, 736 bp, Cannabis indica
cacaaagagcaaaataaataggaaacctggaacaagttgttaacagcttaagttttaattcgaactatgatttgagatccaacagaatttccaagggtattgatcccataattcaaacaacacaatactgaatcatctatgagttaaaatttccttcggagcctatgtagaatgaccttttttttttaaacgaggatccccacttaacccctatctatcatacatgtgaatatatgcctgtctatttgtgcacgcatattatgtacttgagttgtaagtatgtgtttttatactaatgaatatattataccagcaatagtgaagacacctaaacatattcaagagaagcatcagtagttagttgcatcatagcaccacacaaaatatcaagcaattgttttgaaaacagttagttgcatcatagtaacacagaatatcaaagaattattgggaaaataaacaattccagaatttatggataattaagcatgaaaagtttttagatcattcaaataaattagtaattattctagtattgctttagtgcaacatttttttagtctgtgtacttcttctaaatgcttctgctttgtcctctctacatggtgtaggaatggcgcagaagttatttttagtgttttgttagttattttctgtttactttctaaaggaaatttacactctgtcaattgagagagagagagagagagagagagagagagaggagagagagaga

SEQ ID NO: 394688 - DNA, 513 bp, Cannabis indica
aatattactaactgttttgtcaggtaatgatccccaatttgcagtatgttatcttttcattctccatcaacaagagacaaaagttaaggagaaagatttcattgcaaaattggaagatcataccattacaaaattgattttatggactccggtatacttctgctatttcttaatcctattttttgattttcatgaattaattagagctaaattcaaatatacagtgttcttacatgtggtatcaagagcatccctaattaattcttgaagatttatagtaattttggtcttccattaaattattttttgtatttagtgacttgctagatatatacatatggatcatttcttatgggtattacacatgaattgttattaaacaaatttaattataaatattaattttaaaaatatataatcatcaaatttcgatctaataacaaataataaaagaaattttaatttctatacttagtttaactacttaattaaaaaaatataatcaaaaaatat

SEQ ID NO: 394689 - DNA, 1160 bp, Cannabis indica
gaaaaagcagtaagcatagtctccataacaaagaaatctgaggttgatgttgctgcagaggaggagaaattatagaatgctcgggaactccctaatccacgagcattccaattgagaagactctatttttcgtcggtgggttgctgtgcaacacccgctgtttcctcattgtcggacatagaaggaacaactacaaaatcagaatgagaggcacgagcccgtttcagcatgctacgaaccgaagaacccacttggtagctctggctagtgaaagaccgcttccttgtggttgtaggggcaattggagtgttaaggttgtggagggtggatgagggaggattgatggacagtggcctggagggttcggggtacataggagcctttcctttggaagttgaaggagtgacagtggaagtcattatgggacgtgaggaaagtgtgcagtggaccgtggagtgtgtgggacgttgttgagtggaaatgatagtagttggtgtggataaagtgggggaatggacaagtgtagtgtgagctgtatggttgacagtagggagagtaggttcagccatagttgggacaatgaaatggtccatagtttcctggaggctagcatggccagtattggagagagagggttgttcctcgaaagggatagaagtggaaagctcgaaaatgctttttttttgtagatggacttggcaggggcacgtagaatgtctttgtaactaaggttgggaggaaaggggtgatgatcacaatgatggaggaacttttcacacttattgaaagtgtggtccaacttaccacaatggtagtaataattctgaataccctcgtacagaagtttgagccacttagtgagggataactttctgaaatggacatgcaagccacggtggagaggtttggtagtgtcgagaaggacatgaacacgcataaaaggagtgacaacatcataaagagaggccagatgcacctcaataagatctccaatggtgtcagcaacaaattgagccaggccataggaacgagaaccaaacgggacataatgaacctggacccagagaggtatgtagcaaagttgggtaggaaggacagtatcaaaaccatggcaaaaatcatgagggatcgatctgttggaatttattttaccaggatct

SEQ ID NO: 394690 - DNA, 745 bp, Cannabis indica
aaaataacttccaacagattcctggtgcagatgcaacagcttgatcatctcttggatccttcgtgctgtgtcgactgagatcggagatagcataatgtatctcgagaatgcttcttcgatctgggcagaactacaggaaaggttcagtcaaaaaaatgcaccaagaatttttgaagctaaacgtgctacgcagcttcttcagtaaggatcgaacaatgtcactttgtactataccaggctcaagtctctttgggacatgattcaagagtacagacccacacctatatgtaattgtggagctatgaagattgtccaacagtatcaagaagaggatcgagttcttgagtttcttgttggattgaatgaatcttacagtcaagctcgatctcaagttttaatgcaggatcctctcccaagcattaacaaggattttgcttcgattctccaagaggaaagacagggaggaattactgttgtccatgttgatgttgagaaacctgtttctcctcctactggtaagtttgctggaggtgttcaaacttagagacagaagcttgtttgtactcattatggcctcaatggccacaccatgtgttgcgaaaatttattaattactacgcaagtgcacgcaatcaagtagtatactcacgcaagtgaggtcgaaccacagggaattggattaattactactaaactatacttataattctatttggaaaatcaaaagtatttatgattgaaaaag

SEQ ID NO: 394691 - DNA, 903 bp, Cannabis indica
ttttttttttaattttcaatcttttatttgttggggagacttcttatttgcttgtccccaaggcttcctcttttttacattaggggagatattttattagcttgtccccaaggctatcttttttttaggctattttctaatatatatacttttttcttggcattctagccttgtgagcaatatgttttgagttatttatgaatgctttatgtcctactaccccccaagtgactaaatagtttaatttttttttgtcgctttgcataaacttgaaaggatagtatattacataaagttcttggtttacaataggtcctctttgattaaaaatttaaagatggaagtaaataccgaactcctaacttttgatagtatttatagagatgatcaacattccatgctcttgggattaatgatctatccattcgtttaagcttgtaggcccagagcctatttcagtttcaatctcataaggtccttcccaatttggacctaacacccccactctggggtcttgtgaggcgggaaagacgctccttaagatcaggtcttctacggagaattttctatttttcactttagaattaaagtgtctctccactttcctttggtatgcatccagatgaatttgtgactcctcccgaagctcttctataagatccagtgattcttgcaacaatgattggttggtggctggattatagctagtccttctgtcggagggaatggtaggctctattgggatcattacttcgcatccgtataccattaaaaacagagagtgtccagtggtggttcgagtagtggttctgtatgcccagagtattcgtggtgattcttcaggccagttatttttgcagctaggatctactttttgagtgtgacttttaatatcttattcac

SEQ ID NO: 394692 - DNA, 945 bp, Cannabis indica
aaaaaaaaataatttgtttacatatctattaatttttactaccacggttaataatattacattttacttattttagtcataaatttagtagataaaaactttattattttactgtatatactagtattacatatgattaattaggacactcttcatttattatgtagacatgtctataagctaaattttagccgtgataatagtactatataaagttttttccaataacataatatttttttttaacgaataacatatacaataattaattaaatattatttgcatttgtgataatttataatattatcactcgtttatacttaaaatacaagtttactatgcatatttgatatattcaaataaaagattacgatatgacaaatttaatattagctagagcgcactttattcattgttaaattaataattgaatacagaaatgttcttactgttttcaatttcttgaaagaaactaaaaccccttaaacacgtagagattgtgaaaattacgtcatttttttccaaataaattatgtaataagtttattttcaaagtacgtaacaacaattacggtcaaatgttcttattgtcatataaagatttttcaaagccccatttgggccattcccatgaggcagaagaccattaacaaccctttctcaaaagccaacttagttggataataattaactcttttttcttctttttttttttttctaaaaataaaaaaaaaataaaaaaaaaaaattagcttgcatttttaaaaataaaataattaataaacataaaggacaataaatttcatggtgcattcctaaaaaaggtaccgatatatctatttatatttttttgtatattttaagatgtttgtataaaaaaaatttaaaatcggttttacttatattttttaatttaaaaaatttaaaaaataatttttttatta

SEQ ID NO: 394693 - DNA, 979 bp, Cannabis indica
ccatgatgatcatcagcgaccacttagtggatatgcatacatagttatagaccactagaaaatgtatgaagataaggtaatgcaactagttaaagctatacatatatagctagctaataagtcaataataaacatataatctaagaattaatgaagaagaagaaagtagttgaaatggggagtagtgaagaaagtgggtcaaataataatggtgaggtgcactttgtgctagtccatggggctggacatggaagttggtgttggtacaaaatacgtattcttctacaaagttgtggatacaaggtcacctgcatcgacctcaaatgctctggcatcgatccaactgattacaataccatattcactttcgcagattacaatgagcctcttaccactttcatatccaaccttccacccaatgaaaaggtcataattatatttacatataataattaagacttacttactacccatttcgttataacagagctaacttggtgcatacattttgtttgtggggaagcagataattttggtgggtcacagcataggggggcgtagtgtaactgaagccttacatcagtttccaaacaaaatcaatatggtcatttatgttgcagcaatgatggtcaaccttcccttcaattttaggactaatgcctctcaatataacgtaagaacgcacgttttttttttaaatggtgtgcagttttttctagttataataaagcaatactcaaaatagtttttggttttttcatacttaaattattttactcttaacacttttatatatatagtatacatcacaattatataagatattatataatttttcaaaaaatttgaaacaatttgatattcggaaaacaaggttttttattttaaacgagtgtgaagtaaattattttaaacttattttttgtattttaaattattctaaagtttttaaaaatttacaaaatatcttaaataacta

SEQ ID NO: 394694 - DNA, 1756 bp, Cannabis indica
atataggcacattttatatagaatagatatatccgagtctgagctgccgagttcatttgtaccttttaaaaaaataatattatttctatttaattttagatgagtgtaatatattagtgtatgtatgattgtatgtaatttgtgtaaattgtgagaaaaacatttgaaatattgttgcaaagttcaaattatagttttcacctacatttttgttcgttttcctttgggtatattaaaagtttacatttatttgaagaaatattttcaccagattgtctattgatgaatttttgtttattcaattgtatataaatagttatcattatttttttatatatattaaatcaaaataaaaacacaatattttatctaattatcaaaaaaaaaattgaaggagtgaaggtagctaaatgtatacatatagttgaatatttaatatcagtttaaatattaataggatttgttttattattattttattatatataaataatattttattattttattaaataaaaataaaaagtcacccataaatttctcataaaccaagaatttcagttatatagatacactttatataaaatagatatcgaatgacaattaatgataattattatataatatatgtaattcaaaatatataaataaaaataagatgatttattattataagttattcaaccttaaaagtataaaatctaactaataagtatgagcaatcaaattatcaaaatatatataatttaattaataacaaaaaaatttaagatcaactagtgcacatataccttagtttgttctcaatctcaactgcaattcgatatttgtgcaaactataaaagctaccaactaattaagtaaatgtatataaattttgagtaacttataatatactaattattaatgacagttatgtgaaatgtaaaaaaatatatttgtactttttttcttcactcaaataaaataaaaaagatgtatattgtagaaaagaataaaagactctatcttatgattggtgaagtaaatttatagtacaattgtataattggatacaattataaatattataaataataaaataattggatacagagcaaaaaaaaaatttaaatctcacatgcgcctcatcaatcaccttatcaattttacaaataacaattaagatttaacatctcataagaatcaaagtataaatatatatatactaggtgaatgttacgtgtcaagtaacgtattgttagttttattgtaagtttcgtttttttattttttagatttcggtaactaaagtggtatgattatttgaactatttattttataaaagtaaattgtgtgcgagtatatttcgtaagttaaacaactataaacatatgatatgtacattgttattataataaaaagtatgttaatctcaatatatacatactcatagtagttatccttaatgtggcaaaataatttatgatacgttataacaatacatgactttaacatttattatttatttttaaaaaactcaaatgaacaatatatgtgtcttataaaatttaaaaaaaaatattatgtaccaaaaaataaaagaaaagagccatctaaaaataataaaaaaattattaaataaaatattaatgtagaatatgttagaaaattaataatatacccaagatctatttgtatataacataaaacacaatagtaatatataataattaggtatgtgtacctgattgatccatagcaattatctctgtt

SEQ ID NO: 394695 - DNA, 1088 bp, Cannabis indica
gcaagtaatgtagatgatagaaggtcatttggtgggtactgtgtctaccttggtgagtctctggtgtcttgttcgtcaaagaaacaatcggttgtatcgagatcaagcacagaatctgaatacagagctcttgctcatgtaagtgctgagttaacatggattgagtctttactcaatgaaatcagatttcctcttcctactcttcctgtaacctggtgtgataacatgagtgcaagtgctcttgcctcgaatcttgtttatcatgctcgcaccaaacacattgagattgacattcacttcgtgagggataaggtattgaacaaagaacttgagatcagatacattccttcggctgaccagatagcagattgcatgaccaaaccactctcacactcaagatttctttacctaattggcaaactcggagtgaaaaacaccctctcgtttgaggggtggtcttaagaaagttgattagttattagttattattaattccctgttaatcctctgttattctctttgtttaattgctggttattatttgtaaaaggttgtacgttttctgtgtttgtttgtttcctttggctccaacactagggccacttgtcacattgtaatttgtccttgtactccttttgtagcatataaatagaacatgtttgttctcagccgactttgagctgagaattgttttcatccatttttgtgcatagtttaactatatccatccaaaattgatggaaatttggagtagtgaaagcataggtttttggttttctttagataacccaaaactctcccaattgccttccaatgatccacacttagattactagtaaacctactaattttactcaccgcaaatgatatattgggccttgtacattgggaagggtacataaagctccctatagcacttgcatactccaattgagccactgctctaccactatttttaactagtggtttactatgatcgaatggtgtgttggcctctttaatctttatatggctaaacttattcaacactttctcaatatagtgtgcttgccctaaagcaaaacccccactatgccttgtaactttga

SEQ ID NO: 394696 - DNA, 989 bp, Cannabis indica
aaaataatctccgtccctatctcattccccattcagacaaagaatccccgtcccattaggggtagggtcgacaaaacgggtcagacccaataacacaactcgaaacccgcgcaagatttagcgaatttgggtttaccttaaatgttcgagttgactcgtgtaacccgattaataaacgggtcgtgttcaggttgacacgactaacaaattgactcgttagcaacctagctagttaaacgtgttgcatacttcataaacgtgttattggttcacatgtctaaacaaaatatgcttataaataggttacacgggtcttgccgtatcaacccattaaaaaatagatcgtgttcgggtttcattttctgatacgattatcaaacaggtcgtgttaggatcgagtatatacctgttatacatggatctcgatacgatacgagttcaactcgtgaacatgaattgccacctcctaagggcaagtcctcgcgaggccatcccgaaagaaaaattgtgcatccttaatactaatagtaatatactttccatttcgttatatttcattttctatatatgaaagaaaagtactaatttttgtttagtcctccaacagccaaaaatgaattaactgtcaaaaattgagtgcattgacatagaagtcaatcagctttgtctcgaagtggcaatatgtttaactatttgatgttaaatagagagttggtatgtgttggaaaaaccacatctacaagttttagtgttctctaatgttgtgtattgaggccacaaattctagacgccatggaaatgagtcagtcaagcataacacaggtacacaatgcaattcctctacatttgtttttatcattattaaaaagtttgattcatacatagaaagaatgatgtcggttgagaattatgagattctatctcaaaattgatttgtaatgagtggagtaacctatgttcttagatatgacttaatatttttacattta

SEQ ID NO: 394697 - DNA, 1094 bp, Cannabis indica
aatatttactcttttgatgatgaatgtattctagttttattgtagatgcttcttattcttcactttcatcctcacttttgagaatagactcggtttgagaatatgcctcttctgtagattgagtcataaatagtggggtacgatcatcttcacttgtatctgaatcttaagactcgtcactagtatctgaatcttgagactcgtcactagtatctaaatcttgggactaagtttcagaagtctcttcttggtcagaggaagaagactgattgtcaagttcttcatctgtttgatggatcatggtaaaattaggattattcacagttcgttgggccataaattgcttaggctcttttttcgatagggatgatgcttgtggaggaaatttatctaggctttctttttttctttcctattttggtttgtttgctgatatcactgctatttctttcaattttgttaaatgatctgctaataaggttgcacatgctttagcgcgatcttctctttatgagggtgattgtacttttaatggtttttctttaccgattataatctcatccttaatgattaatgatttgaattaatgaagtttgcattattattcaaaaaaaattccttttataaattatttaatatttaactctttcctttttgattctagataaattatgactcttgttgtaaagaatctgagtagcacaggaattcacaagaccattttgtactactactaatacatttttctctcaaacatatatataaatatgaaactattatggttatatttttttagttattggatcattattgaatagttgtggttaattcagaaaacaaataaaaataaatgacttgtaactagtactttatttccttataaaatcttaattaagattaatttttataatttttactaaataagtttctttttagcatttttttgcttaaactattgaaatatttatagcaaaagcccttatgattttaaatttttacacactgtttacaccaaaagtagcttgatgacgtggacatcaatgtttgacacatggcaagaaagatagcatctcggagttgagtagtcccgagtc

SEQ ID NO: 394698 - DNA, 1128 bp, Cannabis indica
aatatatatatatatatgtatacgcgcgactagtaaaactttttagtattttcttatcgatattgagtaaggacagatactgatcatatggacatatcctgttaccttcctcttttaatttatattgaaaaaatatagttacttttatattattcttcatataaacttgattttacgtatttattaaaggaaaaaaaaaatgattcatagcatgatttgtgtggaaggaattgtttaattagggttaatttagaaggcttttgcaatggaatcaagcggcttttggtaaatatgtcagatcggtagttattagacaagatatactataagtaaaattggtggataatgtttatcaagggtgaaaattggtagaattacaggatactgcgcaaagtagttggtattggagataaatattacaagtcaaagagaagtaataaatctccaactccaacgattcgcgatgtgcaagtatacaatcaagcaagaatataagaagcttgtgcctgaacaagaaatcatgtcttggtatatggggagattttgggtagatttatcactccaaaacataaatttattatatggttggttgtgttaaatagatttcaggcaaaagatagactattcgagttcaatattagtgatgatgataattgtttaatttgtgcacaaaaaatggaaacaagccacttgttctttgaatgttattatagcaagcgatgtttaaaggctaattcagatttgctcgattggaagcgtattgattctaagttaatgagagtgttaaaagccattaaaaggagaagatgcacgagatttagaagacaagcttttactacatcggtagttacggtagtatattatgtttggaagggtcagaatgaggtattttggaataattctttgccaacattaaatattttgatatctagagtgaagcaatcatttgatacgtattatattatattatattatattatattaaattaaattaaattatatatcatattattatataattattatgttaagttttaatttatattaaaatattatatatttattcgtctataaaatttaatataacatataattttatataaaaatattgtataaaatataatttaa

SEQ ID NO: 394699 - DNA, 939 bp, Cannabis indica
tttattttgacaaaaaatcattttagagttctacttgtagaattttaaaaaatacatgatctattttgttatttaacaaaaacagataatctaattaataactattacaaaatacataatccaaacaattatttaccctattaaatattaatcttgtaataatttaaaaaaaaaaaaatttaaaaaaaatttactaaccaaatacagaaagtattgggcacaataacattgctctaataataattactcatttgcgtattaacaacctttgaccagtgagggtcccctagatgagatcttcttcttctcatgcataaaatggcaaaaattgaaatcagttatggatcccacacactccaattattattaataatataataactgttttagacttaggaccccaccactaccgtttcttcttcctttgattaatgaatcattattcttttttttttttgagtacgaatcattattcattaatgttgtgtacataagtctacaaattattggacataattaaataataatgtttgaaaattactaatgattttattgtgtcaacatactaagatacaatacaagtctcacctctccttgtcacaaatactagtttgggtttgggctagctagtagctaccattaattgcggtggataattgaatttcatattcttctacattaatttcttcatgttagtctcattacaaaataagattttatggattgattttgcatactcgaaaaaaaaaatcagtttttctgcttaattttaggagttccacttgaaaatgattggatgtattacaaacttatgaagaaaaattgttgaagtattcgtggataaattgattagggaattttgattttatatacttaaaaaataaaaaaaatttattattaaaccaaaaatttaaatcctaaaaaactataccttttttt

SEQ ID NO: 394700 - DNA, 784 bp, Cannabis indica
ataaaagtttgctgtaaaacagataaagtaaaattttagagatgtattataaaggatagacaagagaagttgtatgttggaagtgatcttattgctgtaaacatgttttattaattctttagaatttttaatttttctttctaatgggatatgtgttaatattaatattatatatttgaaataaatgtatgatgtagaataaagtaaagaatgaactgaattgagaaatgtttctatttttataaaacggtcagttaatatgacagtttataactttacaagaacttctatattaattttgcttatcgtttcaatttgtaaaatgttttaactgatttgctattgtatttaataatgaagtttttttttttttgaagaaaagcaaagcaatatatatattaatgaggattagactcgcggtcattacataacaggtttaccggtatagaggaaacaagaataacaccaaacgtcttgtgggtaaacgcccacttggccacgttatgggccccaaaattacatgttcgactaacataagaaaagacacaactcgaaaataaaggagaagatctattacaaaatgagatgtagttctcaagcgcccattgagactccttcctaataagagcattgataaccacactcgaatcattctccagaatgttgagaatcatggggttccatctcaaaactaattggcaatgagtggagtagcccatgttcttatatatggctcaatactttcacatttaatccatgtgggacaatattctccaatatcccc

SEQ ID NO: 394701 - DNA, 1809 bp, Cannabis indica
cctggtaaaataatttccagcaagggaaagctatcactagaagaaggggtggaaggacaataatatccactaaaatccctacagcctgtactcttgaatatattaaagggctcaattgattctaaatcccagctcacgcttatatgatttgccctatctgcgaaagtgccatatttctcagctataccataatatgactcatgatagttaatctagacatggaacctagggtaccagctatcaaacttacgagaaattcagtgtacgagcagggaatcccaaatataaaaattaaggtgggtgtctcggaaggtgactaaggtgttacgttaaaccctaagaactgtgggggaccaaccacattgattaccctaggatgctccttcactagcttcccgaggggcagtgttttgaagatattgtgcttgagccacgcgatcccaagccttatcctcgtctggaacggtaacctgctgccaagataaatacttgggaaacttataatcacaagtatactccttgtcagaaagaaggctcatcgatctcagattggcctcgttcaaaacgaagttgtatgacctaaggccataaggaagagtcatcaggcgcttgtgccgattgaccatctcgggggtaggggtaagcctcatcaagagagccgtaaaaaaaacaaacaaaacatttgtcagaaagctgaatgacaaggattaatgtaactgagcaagaggaaaataatcacttacgaagtctgcgaaagatggttgtgccgagtggggaaagacaagatgtccagaagaagttgtctttgaaagacactttatttggaaagtccacaatgatcgctagaatgagtaccaagataatggaagccccctgcgacatttttcctcgctggaacggccttaaccgagtagagatactcaatttatactagtgtggggcacccccgttcataatttaatacaagaccttcaaactagcaagaatcttgtaagagataggattcagctggaatggggcaaccccaaggtggtttatgtagtccttgaagtagtctcggagaggaagtatggcccctgcactgatatggttaaggctccaagcgcccataccagtcaagccactagtactagtctcaccactggtccatggggcactacttgaaaaacacacaggggggaaacaactaaacccaccctttcgtattgacctaacttggcatgattgcccaagttcgattcctcaagtcttcagtatatcacctgtgtagcctaagatagatcacaccttcgattaaataaactcagcttcaaaggtgactctggggtcttggggagtctttgatatacgtgacttggaaggcattatttcaagtcacgtggttcaaaagtaatcgtgactttgggtaaaaacaaaggattttccaaacgaattaataaaggacacggtgggaggttctggccaggccgcatctcgcaagaatcggcgtatgcctacagagatttcttgcgagaaacgcctataaagactagcattatcttcctggtgggttctcacaacgtgttccctaaccctagcatcgttcaactctaatttggaggtgggttttcaagggttaggtttatacaggatggttgattttgtaggaaactcaaattctaaatcttctggacgataaattcctgaaccagagtgggagattgctgcaagcagaaagtagcccctgttggattttgtgccctaaataaaacccatttcaatataatcaaatttacttactaataaagatcagaaataacattttatgtt

SEQ ID NO: 394702 - DNA, 514 bp, Cannabis indica
ctctctctctctctctctgggctcgatgttttttaccaccgatgaagtctcgctgtaaaaaatggacgccattacgggcctcgacgtcattctctggaggcaaggccaccatggccttagtcgagtttcaaaccacgagctccaaggttcctgtagttccctttggcgttcagtcggcgtcaaaagctcgtcagagtaaaattttttgggtccgatctagtcatattcgagatctattgagtaaaacgactttcaaaaacgtattctatctgtaaagatcttttatatctcgtcaatagtttttgcaagcttcaccttcgacggtagaaggtcaccgtgcgcgatggaactctgattagctcgaggactagagtgtggctgaagataggggtggttcggggtccagatttggctggaggaagaagacgaagttacggtagtgtggttagaggaagaaaatgatataggggtggtgggggtggactgctggaggtagaagacgaaagagaaaaaa

SEQ ID NO: 394703 - DNA, 1121 bp, Cannabis indica
aacaattgaacaacaaaaccctagttttctactgggttccaagaaaggtcgagagagagggacttcaagagagagagagacttctattttttgttggatttttcctaatttagtcaattatagttttaagaataattaacttaaactcactatattcagcttataactaaagataagcatacaaaaataataagcaaattcccactaaataaaatagtactaatctagggtaaaagactaacttaccctttcttaactaggaagcaactaacataattagaggtaaaatggtcatataccataaacccaataactctcgacattctaaatatctaactaaattgctctgctatttctaaagttctaacccaagatagagtgactctataggccatatatcgcattctattgttaccgggcataaattagaaaaaatatgaaatttcacatataacataattagcacacctagaattccaatatatctccataattacataaataataattaaaagtctaattctaaattaaaccttaattatctgataatttcatattaaagttaagcagtcattacaaccaaagtcaaccacaaaccaccaaggccaccaacccctggctctcccacctaccaaagttcccgtaacagttggttggcggcagccataagtcacgaacaccaaaaccaaactcgaagaaaagaattgttagcacccacgaccaatcgaagtccatcctagagagttctctaggctaaggctcgagagcctccgacgaagatgacaacaacgacgccccaagcaagaaaaaggaaaagtgtaaagccctagttagttaggaagaagacttttcgttttctgagagaaaagagaagaagattttctaaatgagaaactgagtattaatattaatatatttttttattattattatacaatcaatcataatgatttatatttatgcatgtataaattttgaatagcctaaaaattgatctagtatgtagcaccttttttaatttcaaatcctaaccttccaatcatatatggttgataatatgtacaccagggccggccctaggcataggcgggctaggcccatgcctagggcccacactttcc

SEQ ID NO: 394704 - DNA, 1418 bp, Cannabis indica
aaaggttaaatattagtatttttttcctaataatttatagtgttaaaattaaactccaaataatttttttaatactatttttgatatcataaattatttaaaaaagcaaaaaaattagttaaatacctacaactacaatatataatcatattaaaagaattatttcaaatcctgacctgtatgatcttaaaccacaaaaatcacactgtaaaaatataatgtggggtgaacaatttattaattaccaaataaataaataatataataaagctagcttcaccaacacaataaaatagaatattattaaagtttaaaaaatacttaataaaaaatggtaaatactattttaggaattgtctttaaattggttttattaaaaaaagtgtcgaaaattaagcttagagtcctatttttattatttttgaataatacaaggttcgttttatcatataacaaaatagatggtccaatcagtaacttttacaaaacacaggattcaaaatgatattttcactaacaaaaattaaactaatgtatatgcacaatctttaatttaggacataaaattaaaaaaaacataatgtttaaaatttcaaaccccaccgaatatgtcaatatatttacataatattttagggcatgaaaaaaataaacaaaaaaaatgttcaatttttttttgtgtaaggaaccgatacaagttaaaattacaaaagtaacaatgttatacaagagtggaggattttttttcatctataaaagttcattctctatcctaagggtatgcagagatacttcagaagaactatacaataaaaccttaatatcagaaaagaaaaacccctaaactgagaggtgtaacttccgacccaccaatggaacacccacaaaataaataaaaaaaaatatcaaatctttaataaaatattaaaatttatataatgttgtcactcatatttctctaatgtaaagactagaactcatttgttcccgtctccattgctgaaggtggctacaatacatctgatgtgtttatattaaaccatattgaccttacaaaattaaaactaagcataatgacttttcaaaaccaaaattagtcatactcgccttaaaaaaaactaaaactagtcatactgaccttacaaaactaaaattaaccatctagctttacaaaaccaaaacaaaccaaaactagtctcacaaaaataaaactacacaaaaaaaaaactagccacgttggccgtacaaaacaaaacaagccacaatgcattttaatcaaaattgttaattaaatccgaatttaatgtataaatatgttatttattgtataaatttataaatatttgtttaaatttaaattgtaattattaaatttgaaactgcagtcataagtggtttgatgaacacttctcgttaat

SEQ ID NO: 394705 - DNA, 545 bp, Cannabis indica
tacaataaaaggcaaggcatattaattagaatgtaccagaaattgagaactccaaatatacctaaactcaaaccaatatataattactttaatatgcatttattttcttgttacttaaataaatttttcaatttttaatttggatatttgtggtcaaattttttttatatattttaatttgtacacacttaattttcttatttttccttttttgtagcatacctttagcttcactttttatttgcataattaaaatttcagttaaattttaccgttaaatacgaattatttaaaataaattttataatatttgaataataactaaaattatttagactaataaaaacatgtcacgtgtacatacagtggcagtctcaattaacatttaataataaaatttaactgacaccacgtatttacaaaatgaaagtgaaattaagaaggtattacaccaaaaacataattagaggattaattgtatacaaggaataaaaggagatttaggtgcaaaaatcaccctataaaaattattatatatatcatta

SEQ ID NO: 394706 - DNA, 1053 bp, Cannabis indica
tttttttttgctttaaagattgttgtaatttgtttgtttccattgtcttaagattgttgtaatttcgtttgctttcattgtcttaagattgtcataatcatcgtttgtttctattgtcttaataagattgttataatcattgtttgtttcatcaatacatattctgttttagtatcttagaatttatagctaaacttggtttttgaatttattgataatttattgaaagattttgaagtgaattgatgtcatgtgtttctatccagactcatcgatttaaaatttgggtgttacagtgtccctttaagagcccgtattaaggaaactgaatagaaatttactataaaaaattttacttttagtcacaacaaaacttgtgaacaaaaagtaaaaaagttgtgactaattataaatattattcttacgttgtgactaaaaagcccgtggctaaaaatattagtcacaaaagtcaaattttgttgtgactaaatatatttttagtcacaatatttgttgtgattaaaactaaattagtggtaacttgtgtctaaatactatgtttagtcacaagcaatttttttattgtgactataagtcacatttagtcacaaaaaaatttgttgtgactaaaaatttgtcactaaaagttgtcttttttttatagtgattttacattgggcacattactatagtgaatgaatcaccctgaaaaacttgaccaagtaaactttatagcaatcaaaaataataacaaaataactaaatgacaatcaatattcgaaaaagtaaaacagaatgaatttaactaagagaattgataatagaagaccttttattgatgctgaaaatcagtacatgagagacttgaaacaatagagaattgatgagcagaaattacaatgtagctcactagggaaaccaagatcagatacacttggaccccttttaaaaccctcctttcactttgatatttcactctctctaattaagttctctgacatcacaacataactaaaaatgaatggtacaatgtctatttatacactacaaaaa

SEQ ID NO: 394707 - DNA, 699 bp, Cannabis indica
aagtaaaatgatatgttttacatataaacgtgtggtacgtacttatgtatataattaaacaatagttaacaaagaaaaaaaaatgggaattgttgtaaaaaagtgagtattgttataattatggtagtagaagtagtattaaagaaaaaaaaaagtagtattatatatatatgcttctttattcttagtataattaaagctcttaaactcaaatgggggacctttctttcatttactatatataatgtatatattgcttgcataaatagaagaccttaggatgtttaatatatatatttaattgctcacatgtgctaattatatgctgtatgcctttagaaccactcaccaatttatctattaattaattaactaactgagccctactactaattatgttgagtatgattaattttttgaactcttttaatatactagttaaaaattcatgaaactctttatgttgaagcagacaataatatatgtatatatatagacaaatattcatcatattttgttttaagtttaaaatttaattatcagatgaagataagttattttcaaatgaaaaaaaaataaataaataaagagagagaagaaggatgaagagtagaagaaattatgtttcattatttgttaactgataaaaaaagagacacatagcatatatacatacgatttttatttttaatttttttt

SEQ ID NO: 394708 - DNA, 1106 bp, Cannabis indica
cccgcacgccgctcgcccacacaccccactgtccggtcgtgtgcctgcacgttttcccgcgtccacctgcacgactgccatttgccttcgtgcccgtgcaccgcgtgccgtctgcctgtacgcctgccgttttgcctgcacaattgccgtctacctgcatacccgcgcgtcgctcgccatcttcccacacacccgtcgtctgcccgcgcgtcgcccactgtctactgtctgcatgtgtgcccgtgcaccgcccgtcgtctgctcgcgcgctcgttgtctgcccactgtctgcgcctgtatgcccgtccgcacccgcacctgttcgtgtctgcgtgcctaacctccaacactcctgctattattcttttccctcctttcacaaacagtctacggaaggaagtgtctaacgatataacaatggcacaatgagtgttaataggatcaaagttcatttcacgtgaggtacaaaataaaaggggtattttagtgtaaattaggatgtcatgtacatcaagccacctaggatacaacgttatcaggtgtgaaaatgacttcacattcaatagattggggatctagtgaagttgtaaagtactaaacgctcactataaataggacccttgaattcattgtaaaggggcttttgggattagtgaataaaacgataatacttctggagatcaaaggttgtgagatttttatttcaagcatttttctatcaagatctttaaataccattttaagtccttgctctttcgttgacgagttcttactgtaaacagatatgttaactagtctttttaactactcaacccttaaaaaaataaaacaaaacaaaataatcaaaacaaggcataattgacaaagtatgaatcaaaatacatctaatcacatatatgttgagattttatgccctaaataatatttcaatataatcagatttactaattaataaaagattagaaattattttatgttgcatgattcacatgattactttcatgattatatgtttaatgcataatttattattatagtgttgtctacacagtaaaaaataattatgattatacgttttaaggttctaagtcccgtgatttatcagt

SEQ ID NO: 394709 - DNA, 1132 bp, Cannabis indica
agccgcacatctagccactaaactcatgccaaaccgaacttcgggagtgaaaattgcgccatcaacatttactttgatgtatgggaaatttggagggcaccatttctcacacatcacacctgactgcatgggaagagtctcttgttcgaactgttgtgccttgcaccagtccaaaaaattcactttagccacatgaattacctcttcacttgagggagaaatagaaatccaaacaacctcattacgcaccttccacactgcccaaagagtcatggctgcttcgagactctcagcctcactccatttggccaaaccctcctcaaaccaactccgaaacaccattgcatcaggtgctatggcctgaacttgggtctgccgccagcaggaacgggtaaagctacaccgcaccagcacatgtaagatagtttcaggggcagcagaacaaaaaggacagaacgtaccaacttgaacatgtttagaagccaagagaaacttagtcggaagacaattcgcacttgctctccaaagaaaactaagcaccttcggaggtactttaatagtccacaatttcttccacaaattagtagcaacattattatgaatattgccattaatctcttgttgcagtctatacgcactcttgactgaaaacaaacctttaccatcctttagccaataccaatcggcctccctagcagctgccgtaagaggaatacgccaaaccaatcttttatcccgatcatttaacacatccgagagtacctcattatcccattccaacttgtcaatttgcatcagtgaactcaccatttccccttgaagactcgggctagaagtctcagtgtaaggattaacatcatccataagccatggctcatttacaatactaacccgagaaccatcactaatcagtcgccttgctccagagcgaaccaagtcctgagcttccaacacactacgccaaatgtaacttgggttactgcctatagtagcagtaagaaacgtaccagaggggaaatatctagctttaaaaacttttgtagctagagaatcctcgcaagacaacagccgccacccttgtttcgcaagtaatgaaacattaaaatcccgaatatcgcgaaaccccatacct

SEQ ID NO: 394710 - DNA, 1454 bp, Cannabis indica
catatgtctcatggtgaggtttaatgtccttaaaataggtgatcactacactattgagtaaaatcaatgtgtattaggctttggctcacaaaaaaaatgaagaaagaccgacaaaagcatgaagaaacgggatgaaattctacttgaagaactctaagatcataagaaatgggataatactcaagaacaacaatgaagtttatattacttattagagacgataaacaattctcatccaacattgtatattattatgttttagattttttttaaaagcactcccatattgtgctactgtatatttagacctttatattcgtcttctttatttttattttttctctttttgtgtgttgaagagtgtgtttcatacctatatatatatttatatatatacttgtttgcttattctcacatcatgtaatataaggctatttttgtagttttttttagtgataaaaagttacttgttgatttacttgttaagaaatggtgaaaaaagaaaatatataacattttagttgtttattttggaacttattagtattttattatttaattaataccattataaaaattatagtgataatttttggcttctttttgtttatattcatctggactagaacattttttaactaaaaatatttatcaattttagtaaaaatgtacaattttaaattagtaataaatcgaggtaaacaactcattcttactcattttagttagcattcctctcctttcggtggtgggaccacccagcaccgatgatatgaagagaaaaaaggataggaagtagagcgagctaataacaactaaaaatagcgctaatcaaaatgaggtatgtaatgtattttcactctaattagcgctagctctatcatagaggtagcaaaacaaaaaatccaagccttaaaatcatcgaatgcctctctataaagtagagcgagctaataacaactttacaatatttcttaacaaatagagaattcttatttagtgatcttcatttaacttagtacataaatggcataatattgtcatttttttttataaagtttaatgtatagaaaaggtgaagttgataatgatatctacaatatcaattgcaataatttgttcatgttcactaaaacaataaaaaatagaacactcccacaccatataattaagcaaattaatttcaatactttggtgaattggggtcccaataattgaattttggtaccaaactttgctccttgaaaaaaaaaagaaaaaagaaaaaagaaaacccacacaccataacactacttcacctgagttgttagtatatcaaatctcaaatctttacactatactactatgtaggtctactttcaaaagtcaatcttttgaagaaattctctttctttcttttctaaaaaagtgagttgaaaatggctaaaatatgcaaaatatatatatatatatat

SEQ ID NO: 394711 - DNA, 662 bp, Cannabis indica
ggaggaagtgagggaaattgaactgaagaagtagagcaggcagggccccaaaagcaaagccaaggccaataaagagaactgcagaggcagcgagtcgagaaaaaacctgaggagacgaagcctcggtgtcggagtgacaggaaatgaccaccgccagagaatgcaatttgacatggcggcgattggagatcctgatgttgctgaagtgaagaggcgtcaaaggagcgtaagaagaaagagagttgggcaatgagaaacagttttgggtcggcaaagcaaccatgtttgttgctattggttttgacgggtgcttctgtaataagcctgatttctgatataataatgcttcaattttttttcattattattttttattttttaatttttttttttatgtaagcgtttatatattacaatgatatataatctggactcgaaccaacacttccaacacacaaagtgattttttttattttttatttcttatttttaaataataatgcttcaattttgatagtttgatttgtttgggatttgaaaataattttatgtttttgaaaacttaaaattagtgtggtgttttcaaaaattaaatttaaatatgattttgagttttaagctaaaaaatgaaaacaacaattttatgttttctatgttttcaa

SEQ ID NO: 394712 - DNA, 1066 bp, Cannabis indica
tgacatatcaagatattatgcccctatgaacctctctttgataaaaccaccttgagactgtgatattattgaaggaaggatgttattgattctagaactcaaaagcttggttgcaatcttataaatcacattgcaacaagctatagtctaaaatctttaacagagttaggacatttaaccttaggcaccaaagtaattatggtagagtttattttttcaaaatgttacctgaattcagaaaagaatgcacaacaccacatatgtcctctccaatgggatcccaattatcttgatagaagctattagaaaagccatctggacccggggatttatttcaaggtatgttgaaaacaaccttttttatctcatcctttgtgaattcctgtagtaaacaatcagcctgagttgaagttaatacagggccattgttgagaatacttctttccattaccttcctctgatctcttttggttccaaggagacttttatagaagtttaggaaagctgctgtaatgagttctaaatctgtaactctgctgcgctcttggttttcaatggaaaggattcggttttgcctcattctatgctttatgcaagcatgaaataaggcagaattagtgtcaccatcttgaatccactccattttagctctctcttttaaaaacaaagagtaatcctgctacttttgaagtaaattctcacgggctaatctttcctgctggtgtaggctgtcttcaaggggctattgttccagctggttttggagtctgtcgaaagtttccttggcctcatgaacctgctgttgcaaatcactgtatacttccttgtttaactttctcaatctctctttgaatagctttagtttacaaacagcctggtacatttggttacccgatattttcaatttccatacatctcttaacatagaatcatacttagtatgggatttccacatcctaaagtatttgaacggctttttccccaccaccacatgaggatgcaaggaaaggattgctggagaatgatcaaaaagtccctcgttaagaaatacagcttcagcaaactc

SEQ ID NO: 394713 - DNA, 1189 bp, Cannabis indica
tttttttaaaaaaaaataatcccaattattaaattgggaagaatcttaagaaataaaacatagataggtcaacaacaaatttttgacatatattggtctccacaaacaaaacacacataagagttttttttttttctttccttcaaaaaaaacagaaagactttaatcactaaactaaaaaattgatttttgtcctattggtaggaatgtttaattgtttatgtatataaagatattataatctaaatctttaaatcattattagttatatcacatattttatcgattttcgataatttacagtactaaaaataaaatttaaaataaattatagttcaagtgtgaaaaaaaaaaacctaacacgcatacaactgattatttgaactttactttcaacactataaactttttgaatattttgaaaattgggagaatgcctactattcattttcatataaaaaaaattggattataattcttcccacgtgctaaaaaaaaaaaaattaagactaaaataatgttcctactataatcttatcctatacataaatgagagagaaaaatcttaactagtaacatcactttagttcctagaatgtattgcttcgcttttctccaaaaaaaaaaaacatcatttttgttcctagaatgtattctagttttgacatttagaaaaattatatctcaaatatttttcatcaaacgatgtacattataattatagtaggtaattgtagggacgataaaatgagtcaaacacgataagacgactcgaaattcacaagaaataaactttactatgatcagaatgatataaaatagtactctgagttcaatttttatcaaattaaaacttaataataaacctaattgagaagtattaattataattagactaacttcaagttgtttatatttaaaaaaataaatgaaaaatgagatcatgatagtctaattaataaggatttttataaaaatactaaattttgagcaaaagtttacaattttattgtcatacagaattttttataaaaatattatctttttataaaataaccgtgaaacaacaaaacagcacaattaattaaaaaccagtgaaacaactaaaaaaataaccgtgaaacaacaataaaaacttaacacagtacacaatataaaatttacacagtatttttaaaaaaattatatc

SEQ ID NO: 394714 - DNA, 530 bp, Cannabis indica
aatgcccatgatttcagccaaatcaggggacactttgccatgttgaccccagcaaaggcagcaaccagatctccattcgagtttcaaacaacacactcgaagccatgtttgaagaaatgatcgaaaatggttgcatctacgttaagcttgatacctgaagtcgacttaacccactgctccgatccatctccatctttgagaggagacaacaagggaatgttaccctttccatgagctttcaaccattgatcaagactcgaattgggaaaagtaaccacatccctcacacttcgaacatgctgcttccataaaagatcatttcttgctgaccaaatggcccaacacaacatcaccactctgcccatggactcaccatctactagcctgaaggtatcgtccagccaagaccgaagagatgaagattctctactaacagcagccaaaccagcatactcccaacatgaccatgcaaagttgcaggacaccagaatatgccattccgtctcagcaaacacaccacacaaaggaca

SEQ ID NO: 394715 - DNA, 1351 bp, Cannabis indica
gtccaaaagtttgaagtccaaaaagtcagatcagatcccttagcctctacttaatctatatataggttatatgggttgttagtgatcccccacatgtcagggtatcttattaacaaaatcttgtgtactactcttttttaagaataacatattacaagaaaataaatatttataaaaacctccttgtttctagacaaatatcccacaaattgggaaagttgttattttcagttgaggatgcaccaatttgaaatggagtgatgggatgtcacctctctcctagaaatgcatgatattggtgatgagtgctgaaaaacatgtattttggaatatcaatgctcgcatacaatgccacaagtgctagggcagtgtcctccaacaactctcacttagccgcattacttgattcccgagtaaaatgtaccatcctgccttgtgagttaattttggatccgataacttcagagttgagccatgtttgtgagatacactttaatccgtcttggaattatctttccaatgcaagttgaactaggtcatttagataaaaattgagagagttatgcccatttgagtgaaggtagtttatgctgtcttgtactagttacgagcactaacatagccaaatgccagtggtcggtcgtgcatgctctcggatcccttggggtgtgttttgatttgttttgttgatagtgagttatattttgggggtctcaggacccaaaaacctcatttggatgtctgaaaccctaacgggagaccactaccaccagttggagctagacaatggcagtggtcggccattgcttgtgggaagccatgggtggtgtttctcacttgtatttgatacatggatgttgaacatacaatttggccaataaatctcttttccttgtgtagtagccgaccactgccactctactatggtagtgccctccaattttggggagcactgccattttcttatggcagtggtcggatatggaccttgcaaagccttgggtatcttttctcatttgtacttgatgcatatatgttggaaatgtaatttggtcaacttcttgtgtggggtcgaccattgccactccattgtggcagtgctccctaaaattggggagcactgccattttctatggcagtggtcggccaagtagttttttaccacttggctgcttctttcacttggctttgacatattattgataaaaatgtattgttggcaaagaatctcacttccgttcttcttggtcgaccactgccatctccttatggcagtgctcataaaaattggggagcactgccattcccttatggcagtggtcggctagggtaattcctaggtgaaaaatga

SEQ ID NO: 394716 - DNA, 1473 bp, Cannabis indica
tttagagatgaaggtgaagaaacctgtcaactttaatggagatctaaatctaagcagagggagacaaaattagaagaaaccatggcaaaattgaggaagaagtaaagggaaataatcataatagaggaagattaaactcaataggacctaaacaccctaatggaagctatcattgtggaaagtgacacacttcaaacgagaatgttatttctacaagagaagtggtagaaaacctaattcagatcatcaagaagatttaaataaacaaaacaagaacaagaataattatcataatgccaatctcagtgatggttataatagtggggatgtctatgtggctgcatcacaccatccacctctttaagtttacatttgaccatccacctcttcatcgactaagttcttggatggatactgcttttgaatccaagagatcctatcttcgagattacggatcacaccatccaactctccaaaaaaattctttttccatttgcaaagaaaagtaaacttaaagaggttttgctaccaaaaacaaaaaataagggggttaaatgtataaaaattaaaacataaagagctttcaccgcaaattccccttaaaaatattatataattgcattagtattctattgtttttctttccaaattactccaaattcccaaaatttttctctaactttcattctctcttctccattatcagtcctatgtctcttcattttcttatcagtttagttttctttcattattttctaatgtctaaatttctctaacacttcagttgcacttttcaaaataataatccatagtttttcgagaaatcatcaataatagatagaaagtacctccatcctgagtgagatacagttcttgagagcccccccacagataattatgaatgtagtcaagtgttctcttggttctcttctttctaattataaatttgaccttgtaagatttaccaacacacaataatcacagaagtcaagcttttcaagtttactttttcaagcaaaccttgtttgctcaattcacttagttctctttcactcacatggcaaagtttctcgtgccataattttgtttctgaatccaactgcttgcttgacacacatgctttggtgtttgtcacactaacaccttcaagaggatagattccatttgattttcttcccctcataactagcattgaaccctgcaaactttcatgactctattctcaatcttgacaagaaaaccctgatcatctaacattccaacaaagattaaattcattttaagatttggtaccattccgacatctttcaatagtctttccatgccatcatgaagtttcagcctcacagttctaattcctaccattttgcaaaacttattatcactaagatacacagtaccaaaagtctcctgatctgaattcctcgaaccatgatgtaacaccctaactaccttaggcgtattacgtgattt

SEQ ID NO: 394717 - DNA, 719 bp, Cannabis indica
aatcttttttttttttaactaacttcccaattttgtggcattattttttcctttgctacttttagaaattctattaattttcctcatatatttgcaaaatagttttttttttagggagaagttgaaaaatatcttttttttatatacgttaatcaaatttacctccagataaaatttaattcaaagatacctctttttatgagtattgtacctaaattatcctcacacactcacctaattaagacataattccaaaaataatagatttgtgtgctttgtagatagatgtgtagatttgtgggaaagttgtggcaaaattttgactaaagaagaatgaaaactatcgtgaagtgatagaggtaaaattggtagaatagttaaaaaaacaggtaaatataatagattttaaaaaagagggtgaaaattaaaggcatcaagttaaacgaggtatgtaatataattttctcattattttatgtgtttggcccaaatttctcatattcacgtctatttttccgtagagaaattatagtaaatgaccttaaatcataggattatcttaataaatgcccctatttcaaaatttgtagcaaaatgtctatttttttagattatttattatttatattgtcttttgtcacataagaaaatgaataattttttttttcatattttgtttttagaaattagaaagaaattacttaaagattatggtatat

SEQ ID NO: 394718 - DNA, 1240 bp, Cannabis indica
gagagagagagagagagaggtcatatgtgttagacagtcagctgaagtttatgtacaaactgcctctttatagcctaaaaaggagctgcactctttatccaacctcaaagtacccgtgtttcaactggttgaaacccaaattaaaaacctttacatcacgccttaaataggttactattccaaggagcattcaagccttattgaaacccgaatagaaaaaggtggttgatgattagatgagtgcattagataaaaaccaagcctagaaagttgtctacagccaaaacaaatcaacatgcagtaggaaggtgccatcataccagcactaatacactaaatcccgacataaatccacagttacgtgagttgggtgagagtactactaggacggaagacagaataggaagtcctcatgttgcacctctaaaaatattttttgacagtgactttgtgtctttgttaaaacaaaaatcagcatgtggtagaaatcaaatggaattttactattgataagtcatctgaacctagcacttggtcctcatcacatacaaacactgtctgtttaatttcctcctcaaaaggtcactcgaggtgtgctactaagtaatatggtattttctcccattcaatgccttcaatatcaaccactgctcttccagcaaatttacataccttagaatagaaggatgtgatctcgctcactataccttccactctatctagcattgacccatcatctctctcgattctagatatgaaattcttagctttcctagcccttagcatgcgatgaaagagcttttagtttgcatccccttctttggcttaatccgcctttactcaaggagaacacttgtactccaaataagggaaaggtttttctcttttttaaatccatcgaaaaagagattcgattaaagggatttagtatgatacttatgaaatcgataatatcgatgatattgatattcaaatacttcttcttagaacatattgatttgactccataagtgggaccgccaccccataacatgttactgccgaaaggagaaccttgtatttcttcaagggaatctcctaattgttctcgagcaattagaaatagattctttaaccaataagaattcagttcaaatgtaagatatctatccaaaaaatttcaaaactcaatcatttatgatgaaatttttttttttttttgaaaaagaaaaggatcctcttgtcttagacaggaccctcc

SEQ ID NO: 394719 - DNA, 813 bp, Cannabis indica
agagagagagagaatacggtttcaagcttagagtgatttggaggccaagtgacttttgtttctaggatagggttcaggcctttatataggagccctaaatagtagattacaatataaatccttagatatttgcataggttgttagataattacaaaagactaaagtgcctttgaatctagatattattcagccattctgttgggcttttagggcccaattcgtagcccatggcttgttgtccacgttttgtcatggtctacagcatttggcaagttaaggcctacaggacctagtcggtccccatagctctaccaagaagaggccatgttgagttttgtgccctaaataaaacctatttaattataatcagatttactaattaataaagatcataaataattttatgttgcatggttcacatgatttatttcatgattatgtttgatgtataaattctattaactccagaacatatgtatttgttcatgattatagcgttgtcagcacagtggaatatattcatgattatatgttcaaaagtttaatttccatgatttatcagttcactagatttggacagccatgataatctgcgataggtatacttacaccttggataagtgctatgtcatttttagggcattggcaaagtttactagtatcgaatgtatggagtatacattgaaagggaccgatattgatcttagataagatatcataaacttaccgttatatctttctaagtcaacatcaatggttgatcttaggtatatggatcttaatcctgcatggttaatttcgatcttaagagt

SEQ ID NO: 394720 - DNA, 938 bp, Cannabis indica
ttgatcagcttcatcaaaataaatattataaaaggataagtcccagtagcatgaagcaatgctatagatatgttaaataaataaattattatgataccttttctatttcttggaaatgaagagatatccacccaacagtccaccaagaaaaccacatgcatatcctatagccactgctttccaaccaaaaccactccaaaattcagattcatgatcaagtctagtacttggcatcttatcattattgtcttcacactctgacaatggcaaaccacataactcaacatttccataaaatgaagattttggaaatgtactcatttgtgtgctttgtggtatcatcccagtaagttggttattactaaggttgagatactcaagaaatgttagagttgccaattcttgaggaattcttccagagagcttgttgttggacaaatctaatgattcaagttgtttcatattctcaactgatagtggaatgtggccttcaaaattgttacttgataaacttagcacaatcagtgaccgaagatccccaacagattttggaatttcaccatgaaaattattgtttgagatatcgatacaagagaagattgttaagattcttacaaattccatttcgaatcccttattcgtcacggctagcgactcttggtagtaactacggtcatcctcatccatgtacaacggccttgacttatttgcaccggtattgagtgtattaatggcactccaattggtaaaataatgtgatgacaatgttccactgaaatgattgaaagagagatcaacaatctgcagtttcttaaagcccatatacttgtttggatcccatattggaccatgaaatttgttggagcgcagtacaagaactttcaaatttgtcaaattttgtaaccaaaagggaacgtgtcaatcagtcgattgtgtcc

SEQ ID NO: 394721 - DNA, 893 bp, Cannabis indica
tcgaccaattgcccatactcatttagatactgaataaaccaaagaggattatcagctatgtccatctctacaagaactcttgcaaactgaattcgggttctttccttagtaaatttatccatcatcattggcttcccaattgtacaaacaagagcactgaggcaattgttgccccaatactaaagaccaaggccatggagacgtatttataaggggacaaatcgaattaggtgaattgagtttaggtccttagaccaaggacgtacaatcactggtttcctatcaaattggactactccatttttaagaacctgatcaagagttgaagtttcaaagaactttaccatcataagccctcctgtcattctaataacttgctctatccccagtttgccccaaatacgtttgataaagccctcaaacatagccataggaggatttgctcctaaaaccatacatataacagccgagtcccaatttgcagcttgagcattaacttcatccacatcaacctaagctattttcttgccttccttgattatcgactcctcatatttcaatttagcattagaatttggggacttacttgctaaaaaatttcctccaatgactctgtgcagattgttgtagatcctgctccacttcctctgcccaagactgagtagcacgagcatcgccatagccttcatctggaatttttgagcaagttcttcatgcatcacgttgtgcattatcttctcttctccttcatcgaccacatctgccataacctctcctaactccttcatcacaacatgagtatcttgctcctccctcacatctgagttcaaaataggatttggtgaaatcaatcgaagtgctggcttcttggttgctcttttcttcttcgccat

SEQ ID NO: 394722 - DNA, 525 bp, Cannabis indica
aaatttagtataaaatttacactagggatggtctaagagtctctaattatttggtgttggggttaattttttagcttttttgtgtttggttggttgtaaaaaagttggttgattaatgaaagatttttttttttctggcctgggttaacaaagttataattttcacaagtttcaaattattttatctcaatattattagataataacccttttaaatagaacaacaaatcttataatttccttattaaaattaataatataattagacatatttatatatttttggatatagtttgtgaaaagaaattgaatcttgggataagattgtattatgggaagaaaagacaagtatgacacggcattgtgaatgtcaagctaatttaggagtaaaaaaattgacaattgctacatgaacatgttcatgatattatggaaaaggaagtaaaataaggattttttaagggataaaattaggaaacttgaactaggttatcatgattgtgctccctagctctatcttcaatg

SEQ ID NO: 394723 - DNA, 571 bp, Cannabis indica
caccacccattcttaattgattcgatcacttcaacttaattatatttatttttaatgactactgatcattaatgaattattatgaattaaaccggtaatatgctattctatttataggaaattaattgttcatccaaatcgtattaggaatatagatcgatttatatatatatatatttaaattttcaaatgtctcacgacttagcttattcaactaaaaaatagatatatatatataatatatgcattaggataaaaatattttaaattcaatattaaaagtatatatattcatattagtgttattaaaaaaaatcaaattaaatatctgaccgacgacttatcatattcaattaaaaatagatatatatcttatcatttttattaattacttaatttaaaattaacgtaattatgtcttttgaaaaaaaaaaagataaattatcgaccctaatttaattttatattaatcattagaaataaatacgtgttattcatttgaatgcgagtttaacttgaacaaggatgaatttttttttttttttaaattaattaagataatggagataat

SEQ ID NO: 394724 - DNA, 1499 bp, Cannabis indica
agtgcaagcctgtaaaaagaaaggaagctcgcgcgaagaaagaagaaggaaggccaccagaccgcttattaggttctggccaaaggtcaggagggtcttggcgagaagtattgttcaaaccgagggtcaacacccttagtcgcctgaagaaactacagaagatgaacaacacgacctagaaatactcaccacgttcgcgcttgcccctaaaaacccagatctggccagccaactccatggcaaggtaaccgaccactggtatcctcacgctcgtgctcttcaccgtccactaaagcataactacgcagacacggtgaggcgcaagaggtgttagggccaggtgaagaggataatacctgatgcggttgccacgactaactcaggaaggatcgtcaggtatgacgacccaatctagcaagagacttcagtgctggtgctggagcgagcaccggatctattttttgacaactacttccactgcctttgcgttgggctacgtagttgatcggaaattgatcatgtaatggcgacaactgagaggagaccatcagtatcgtcgccgtctgatggtctcaagtcaggcctggttatggtattgttggttgaggcatgccattttaggcacaactccctcagaaggtttctgacgcctgatgtgactgcaaccccagagttacatcagagaaagcaattcaagacattataaagaatttaggaagttcttgccagaccactgcttatcctgctaggattctgagtcttagcttttgaagccattggatgccctgcacttcattggaagaaacagactgcccaggagatcctgggggcacatgcatgcaaccctcaaagcttctagaagctcgggagatgcatgcgcattgcttttcacgcatgaaagatcattgggtgtgcagcatgtcttcaaccctccttccaaaataaaaggactgcttgaagtctgctttactcccaatgactctttcaccctttgatcttttcaagcaaagtctaagcttgaatttttatgcaacttcagtcttccttcacggaagtcaaagcttgcttcataaaaattcaacatgtctctcgcatgcacgatatttttcgtgcaagaaagatcactaggggtacaatacatcttcaaccctctttcccagaaaggaaggattgcttgaagtctatcttactccccgtgatgctttactttagatcttttcaagagaagtctattgaatttttatgcaacttaacccttccttcgcggaagtcgaagcttgcttcgtaaaatttcaacatggctctcgcatgcacgatgctttttgtgtaagaaagatcactatgggtacgatttgtctttaaccctctttcctggaagggaaggattgtttaaagtctaccttactccccgtgatactttccattttatatttttaagcgatgtctaagcttgaattttttatgcaacttcagacttccttcgcagaagccaaagcttg

SEQ ID NO: 394725 - DNA, 644 bp, Cannabis indica
ctctctctctctctcttcttgttattattactctgcgatagattgaaacaagagttaggtcactaaacgaaaggagacataatatgctatgctacacctctgtaagtactactctatactctatattcatgatattgatgttatagaaaattaatatttacattacatataaatttacttaaaaaataaaatcaatcttattaagtatgatttcccaacaacttgaccttaaaagatattcatttagagagagctgcctttcttgagattttggagcttggttcaaaactccaaaatcttggcagagacttcaaaagtgaaatatttctccagtatactccatatcactctcgcagtatcacgtccaaccattagtgtaagtaaactttcactcatcgaggagagaaatcacgaaacaagtagttgattttggactattcccatttgaaataggctggattaggagtgggagcagcatgatcatcacgagaaacaaagtagagtggagaggtgcttcaaagatgaaatgtagaagacgattgccacgaatcgtaactagaacttgttgtttccataatgtaaagtccttttttggcaagttagttgacaaaatattttttcctttatggtaagattgttttgca

SEQ ID NO: 394726 - DNA, 867 bp, Cannabis indica
ggtaggatatagacaaatctttggttgttacacatttattaaatattattttagagcaagagagaaacgtttattatcttcatattaaaaaaaagacctttcttttccaaacttacttattggagagagaatgaagaatattaaatagacgactgagatgattgtaaatggaaaatttaaatttctatgcatgtatgcattaggggataagtttttccctaaactaatacttttcaacattaaaaatatatgaccacttttccaaaacctcaaaaataccctctcaaaatttcaaaccctttctctctccttccctcaaactgtctctgcctcttttccttcgcccgaacccacatcacacaaacccccgacacaacccactccgactgagaccctcatcaccgcccttcgcccgaacccacatcgcacaaccccccacacaacccactccgactgaccaccccgaccgagacccacacccaccattctgaccctcatcaccgcgtcacggaggagacccgagcggtgcccaacaatgtccaaggttcagatctgcgatttgggtaaatcacagtttgggaaagacaatggcacaatgggatccgatgtatgtgcgaaaaaatatagtttttgggttcgacgggtccgatgggaccccgatgggagtccgatgcatgtgctgtaaatgggagtccgacgggtccgatggggaccccgattgggtccgacaggtctgatggggaccccgatggggctccgatgggtaagaaagagagaaaaagagagagggcgggttcgatggggaccccaattgggtccgacaggtccgatggggaccccaatgggggtccaatgggtatgaagaaa

SEQ ID NO: 394727 - DNA, 1143 bp, Cannabis indica
taaaggttgaacctttgcatgccccgtgtccctatggtacaaaatagtccccattatccagctgatacatgcatgggcataatgttccccacgggatcattcgatcagctctaatattgcatgtaattaccccaatagtgggatttgagcataacctttgggcaggccatgtgcctgtccatacccgccacttagcttataaatatcccttgattctcatacgaagggagaaacacaatttgcgtagctaaaactctatcaagattactctaggtcttcatcttctccaagagaaacttagagtaaagaattaggatttcctgctaaaattttataaacacatcaaactcaccctaataggctaatagacagactcgtggactaagatttgttaacatttgaaccacataaaaaaatcatcacctgttcatttctgcaatttataatttctttagttcttaaatatttagttttcaaaaatcttagcaaatattttggtgcttttattgagagctaaagaaagacataacccactgatgcttccatggtgttcacatgaaagacagctccttagaagactcttcaaggtggtcttaagacggtcgtggagcaagtaaaccccctctcgccagagcaagcccagtcgagcgatgcgaggggtggggatacgtccagcgtgaacaattgaggggacgatccaaaccagtatgaccacattggtgatgacagagaagctgagatgaatgaagaagaagaggaaggcgatgatggttacatcaaagacgggtattacaaagacgactatcattacgagcaagatcccaaagtagttctagtgtctaattatttgagaccagactgaaactagactgtcaagagagattttctcaaaagatggagaagatgatgtctcgccttcgagccaagtttgaagatctagacggagaggatttgacgatgatccctcggtggaatgcttcggaggaaacaccaggggaaaccttagtgaacctctactcctccacaggataagggtaaggctaaagtaagtgaccctaagaacccacatgctcctcaacctcctaacaaaaaaaaaaaaaaaaacaacaaatcagatcagtaggccttctcaggcacagaagg

SEQ ID NO: 394728 - DNA, 917 bp, Cannabis indica
gaattcgacgtgcgctcagctctaggacccaaatacatccacacaataacatggaatgcatatttcaataaaagttctagaataggccatgaatactcctaagctccgcgttctccttataagaccacaataacatgaagttgcagaatttgttctagtactgatccatctcctagtgagaggaattagctgtgacagtcagctttgctcctccaacatcccaagccgactccttcgcagaatctgcaagcatctcctctgtaaatctgtctgctttagacatgggggtaactggaataaaagaaagaaaaaccaagcaattagcacccaacactaatagacatggtaaaggtacaggagagtcctcccatataactacttagtgaggtctccgcctgacccaacatccaaaagtatttcccctagagaacttcacttctaggtagcaagatttggaacacaaaaagatagaatttataataaagatcatccatcaccataaaggggtatggatggtaaaacaaaattttcataaggacattaaatcactaatgcagattgagattgctaagctaagctatcctaatcaacatcagaactctacaaaaatggggaatcacacacctgaatttctcacaaatcctacaactacacaatttggctacctatcggtttcattaagccacaccaattatagacaaaaaattaaaaatgccaagcaaaacgaagaacttacatgtcagagatgaaggtttgttaggctatttttagcctaagttttgggtcacattttatagttgtttttcttctttattattattattggaatataattacgcttgttttctttggttttaggtttctacacttggaatgtataaattggataaatttcggaaaacagtgatctataaaat

SEQ ID NO: 394729 - DNA, 1701 bp, Cannabis indica
aaaaattatgggtgggtagtgtatgaggggagttcagctggagttattggaataattgagaagaagagaggggggtaaaattggattttagacaaagttatcccattttacaaatgatacatagtattagtttaggggaccaacttttaagtttattaagcatggaatttcaaatttcccatcataaataattgactataaaaaaattagcgtgagtttgatatcttacgtatatatgtcaatagtgtttgatatcttaaaattcaaacattgtaatgcaaatttaatcatgataatataattgagttttgcaggtgaaaataagaagtgtgttttgtttttttagggtggttgagtggaaggggcaaaatttttgttaataaagtgatggacacgattcagttacaagttgaaagtaagatttaagtttaaaccattgctgtcaacattattatccacgtggacaacttgattcaaacaactattcacacaccacacgaggttaaatagctagtctaggcaaggcacctagactagacttaccagatgacttcggaaaagtgagcgtgcaagttgtgcagtaatcggacgaaaccatccaaactcatctcattgaagcagcagcagcagcttcgaccgtgaccacgtagaataaataaatattcggtttcacattctgtattttattataccccaaaaaataattaacgccctcaatatttacattcaatttctaaaaatgaaaatgtaatgatatgtacactacaaacatgcaacactactttttacacccactactagtctactacactactctctagttctcaaaaagtgtaactgtgtaatgttaagttacaaacaatcatgtggttaattaaaacacaatgaggacaagcaaaacactaatacaaaatgggatgagtgtgttgtttctactttctagcagcggtaattgtgtgtaaattcccaagacccagaattgtgcttctttagaattttataaggtcaggtcaggactttatgctgtagatatcactaaagatggtgccttagggcttgatgatacagctaataggatcatcacccatgatattagtctatcatgcttaaatcaaatgacacaatattcaggctttagcaattaccaaatcgaaaaacatcacaaagctacattgtcttaatcataaaaagagagttcccctcgagtaacaatacagaaaccaatgcagcaccaaggaagattctcaaagtcattagaaccacaacttactaagattctaacaaaccaaaggcgttttattcatttttgaagactttcttcctcagaactgacttttaatttcgggctttaatttctgggtttgagtgtgtttgcgtgcagctgttagaagaagagataagaacaacctagaagagaagaaccctaaccctagtttggtgcggctggtcttgagaagaagagaagttgaaaccctagaagagaagaagactagaaaacctaattgtgtaattttgaattctgaaaaagatagatagccgaataggtctagaaagagattagggtttgttgagtcttaccgtgtgtcatatccattagtggatgggtaaataatggcataagttcccaaatttttaagtttggaagtggcataattccaatgttatttttagcagtataagtacccaatgtttataaaaact

SEQ ID NO: 394730 - DNA, 1333 bp, Cannabis indica
taaaatctgatgaaaaaccctaattgtatgtagtgaataaaactggaatgaagtgtagcataatcctaagtagaaagcatagccctaagtagaaagcatatatggagatgaagattttctcaaacctagaaaaaatgtgtgagagagagagagagagtgagagagaagagagatggagatgaagaaatctttaccaggaatggaatagctgaagccattgatgaatttttggaatggaactgagcaaggaacgagtgatccagagagagagaaggaaatgagaaaaaagtgattttaaaatcatcaaatatgtgtttttaaaatttgattaaatttgattttaaattaaaaaaacaaaaaataaaatcagttaccgaacattattttcaaaatgtgtttttataattttgattaaaaaaataacaatctacttttaaaattgttaccgaacagagcctaaataaagcaagagtggaaatttaatttcaataatttgtaaaaaactaaaaacatattataaaagaaaatccaagaaaaataatggtgaatcaaattcaaagctaccagaccaatcgaattacactatttaaatcatatatataatatatgcattgtatatatgatttaacattaaacttaaagaattgaagtgaagataaaagaagagaagaaagatgatacatggaggactggattggacagtttgcttggagtggtggaggggtggaggagtcgacgacgcctgggaatttggatgttagggaggagatagcagcggtagtgcctcaccgaactgagccaaccatagggatgagaactcgccagaggagagattcgattcagggaagggatgaaagtcggtctgtcttcttcttctcttctgcttttggtttgggaacgaattacatttatatgggtgatttattattttattttactatttaggaataaggaaaaggaacaaaaaaaataaatgttatttttttttataaaaaacagattatttattcgggtttcgggtgcccaccccacttacagaaaatgttttttaaaaatccaaacccgatacccgaatatgctattttcaggtgagacccgacctgattatacaggttttatttttttcagtttttttttacagcgggtcggagcgagttggcgggtttttcgggcttccgggttgaaatgttcagccctagtttgtaacacttaaccacaaaaatcgaatttttggtcggctaaactacctaaaccctggttccgttttgctctgcacacctccgtccaaaaacacacagttaacgtgccacagtggattgtccacgtgtcacac

SEQ ID NO: 394731 - DNA, 749 bp, Cannabis indica
ctctctctctcttctatgctcagtctcacctaaaacccaagagaatcagaaattttgttcttcaattctgtcgagttcttgaattttttagcagctatagttcaagaaggtactgaggtaagatccttgctctcttcttctaagtttgttcaagaaaagttaggttttcatgcttaaattttaggttagatttgttgtgcgaattattgaggttaatttgttttttgagatatttgtatgttaagatgagtgattttaagtagaatttacaacatgttatggagcttaggccaggtttgagcttttaagctcaaactttgtccattcatggtagattttttttccagaggttttaaactatttctgttgcttgaaatacgtttattatgggttgtttaggtggttcggagagttggaaacgatttgaggttgatttgagttgtttgtggtgtttttagtgttttttgcactgaaccggttaagttttgcaatgtagaaccggttaactggtttcccccaggcagaacccatagaatcggttatccgaatgggatacagtttgccagttgtggcaattttggacaccctagattttcatattttagtgatgtttaggatattgccatattatccatcaataggaagacttttagttttaattttatgttcccaaaagttgattagcgtgtcactcattaattttacgaatattgtgacttaggggcttgtaaattatcgagcagcagttc

SEQ ID NO: 394732 - DNA, 1127 bp, Cannabis indica
ttaatggttttttcttttctttttccattaaaatttttaattacaactaacaccgataaatcaaacaattaattaataatgcccaaaatcttatcaatttgatgtgttaaagttgattaaattgatgtcctgttattattctcttttctttctaagctttgtcgatatcttagattgtatactttactgatgtgctctattttattattgtaacacgacaggctttataagttgacctaaatttttgtatcatttcgaaccaacagagatagtaacaaaattatctgttattacttgtgtttttagtccaaatttgtttctattatgactagaattgcaagtaatgattaattgcttcatttcttgtgttgtttaaagaggtatagttgataaaagatgttgaaagaattcatcaaattattataagtaaattatagtgaattggcctaccacatggaaaaaatattagtaaaattttggtgtgagtggttatcaaaaaaaacatttggtgtgagtttcattttatcattaaaaaaataatattctctacacataatttataaacatgtgatgtgcaagttgtacttgtttttacggataatgatcaaataaataaaactcatttcccacgttttattatttttgtttgaagactcaaatcaaaagtatcccaaaaaccttttcaaattagtaccaaccaactagtgtgaaacagtaggggtgtacatcaaaccgcttaaaccgcccgcaccgcaaaaaaaatgcggtttgaaattcttcgtggtgcggttgcggtttgaattttttccaaaccgcgcggtgcggtgcggtttgcggttttgaattattataccgcgattcaaaccgcaccgcaccgcatcttttaaaatttcaatttttatatttattttattgagcccaacccaagcctataaatcttacggcaaaatccataactcttcacaaaccctctcttcaaagcaacaaacccaagcccatacatgtgtattaaaatttggagttggaagtttgtgtttgttttatttttaatctattgatgtaagtatgttagttgtacatttatattgttgttggaacttaattagtttcaagtttgttattttgat

SEQ ID NO: 394733 - DNA, 850 bp, Cannabis indica
agaagagtgttcttaaacataaaaaatagcgcagttggcgtgctcggacctaactgagatggaccatatcaagtaacagaagtcacagattctagagcaaataaacttggtcagtataatgaaaacatggaactggttctggtactacgacattagaatggggaccatttgaggaaatactaccaattagtgtacaaggtttaatgacccctatgaagtacacaatgctcaaacatctactcttaagtaggtggccttctgagcggacttcgcttaaaggtttggaaaaaacaacttgatactcaagtcggatgaccatctacagtcggttcaaaaatcattactcttgagcattgtctcttgcacgagctataccgttcaattttttatgttttaattagctaaagatcaattagatcatgtaatagcttttataattcaataaatatatattactacggtaacaacacatcaagaccaataaatgaaaaaagatattaattatcattctaatagtttctatttcttcttttctatagcaagttatgtaattaccataaaaaattcgtacaaagggtctccttgaacctagtagctggactgaaaaaaattgaacttgtgtaatacaagtgaccaagagtcataagtttgctcggtcacttgggggcaactataaaacagatagagatgtatcgatgtatcccttttaagagggtgcattataaaattttccaattatttttttcttttaaaaaactaatcacctttttttgtccctaaatattttagttaactcttattatttatttaattaattattttatttaacttttaatatgtattattaatt

SEQ ID NO: 394734 - DNA, 1326 bp, Cannabis indica
gggtctggtatatattaaaaaaaaaagatttttcaagtgggtttgggtttgacctaatttttcagatgtcgcaattttatagcatacttggccccgtgtgtaatccagacacgccttataattttttgaaccctttttatttttgaagggattttcaagttttgggttgggtagattttctgagtgagtgggttttcgggtatgaatgtgacgtatgagtatatattgagagttactaaaaagcaacactggtgtcttagcaccttattcagtgtcatactattattagtgtaattaagtatcagatgtcatataacttaaaaacacatataaaaagtgatgggcaccactaatacccaatagcaaagtatatattgtatactcaattaatacacattaatttttctactcttttttttgttttttagtttgataaatcaagatcaaaattcaaaattatgaaaaatagggcacttctaaatttacattacaataaatgctatatttctatatttaccattatgctatttttaatatgagcattggacaccattagtgtctaaaactttctaaacgtgtcgtcttgcgattggttagcgatactccataaaaattattattaaactatatgagatccgatacttaattacactaatagcgatattgacatgtaaaaaggtactagacaacaatggtaccctttagcatttctcttttaatattttattattaaattttaattaacatactcatttacttgtattattattattattattattattttattattattaaattttatatttactgttgcattattattattttatattttcttaataaattactaagagcattagataacattaaattttgcatcaaatttacaattatgcattgaagtacaataataaaaaataatgtaaaaatatcacaaaaccactttttgtgtcaaatttttgtgcaacaaaacaaactatatgagaagttctgccgctattgtcttcatttgagcaggttaatgtttttggacaagtgcataatgacttaacatttaacggacaggtatttacgaagttctaaaaatataacttagctattattactgacaaaaaaaataaacttaagtatttatttgcaaccgtaaattaaacttaaatatttatgtcataaattaaatatattataggactaagcttcaactaaaaataattagattcactctatgttgaaggtttctcttctctaataaagcaatttaagcttaatggtgatattaaaagctgcaaagtggctaatggtgtccctgttgggttttatgcc

SEQ ID NO: 394735 - DNA, 592 bp, Cannabis indica
cagacaaatttattgaagagaaggttttttcaattagtaagtaataatatgccaaacttaatctagtttttcatattaatttaatttctgttttttgtttacctttactaattttggttccttgttatatttttctcagaactccattgatgataagtttgttcattaactggtctcatatttagtagctttaaagtctcaagagtttgacagttgaagcactaaagggtactactcagtactcactccacattcatgtttatcaattagattataagtctacttgtatctcttaaaatagataaaatgttactctgctttaatgtttgcttatgaataattcagtgtatttgtttatggtatactcgatgaaaggttgtaaaagtagcaaaacttataatttgtaataactcttttgtaaaatattgagtaatttgcgacataaatacctaagtttaactcccggttgcaaataaatacttaagtttaatttttagcggtaataatacctaagttatatttttagaactctgtaagtacctgagtgttaaattcaagtcattatccacgtatcatttttttattggtatat

SEQ ID NO: 394736 - DNA, 931 bp, Cannabis indica
ttgggtttgaagagaattgtgaaggaaggtatgagtatttataggtaaaaagacctaatggaaggtgtaatatattaggattaggaggctatcaaatattttaaattaaaagttcaaaaatagtaattttaatatttaaaaatggaaaagaaaattcctgattttttgtaaaatgattctgcattaggtgagttgtacgttgcgaattatccacgcggcggtttcctgctccagaatagtgacacgtaatgcatgttagtcgagtacgtgtaacatttacggcgcgtgttgcttacgcttcttcttattggagcgcacttttatctttatttcttacaaatttaatcattgtctaatcaaattaggattctgtcagaataagctaatttttaaaaattcaataaaatttacttttaatatatccttttgaaaaaatacatttgatatattttcctaattttttttcttacatctttttattaatttttgaaagtttttttttttaggaaaagaaaataattcattcaaacaaaacaagttacagagcaaaggcacacaagaaacagttacatgactgttaataaataataatacctatctcttttgtttagtaaagaaaggcatctaattctagcttgatgactaatttaatagctaagctaatcaatttcgtcgaattacacataaacttaaaaatacacttgttcctattgcactaaacaaaatatatatagtggctgatatcattgcattagtaatagatttcatcaaaattaggcttgaaatcagtacaccaagactgccactcaaccagaggcaaaggttcattgaaatggacacaactacaacaaagcatgagtaacacttgttaaaaataccataagatttgaaaaataaatatgaaaaaaaaagttttaataatacaataatt

SEQ ID NO: 394737 - DNA, 832 bp, Cannabis indica
tttttacagtaatctataaaaacaacacgataataacagaaaaattacataaatgtaacataaaaataaaatctaaataacatcaaaacaacaataaaaaataatatacaaataacaaaaatcaacaacaaactaataagagtacaacataaaaagattgtattttctgtaaataaaatcaaaaaaatcataaaaatatttactatgtattacttttgaaacagatgtaagctttattggttgaatctttatatatatattttttaatttacttgatatctcatttgagtgttgacatattatattgttatttgtgcaattaaattttaagtctcgcatataaattaatttaataaaatactactgttatccaataaaaatgctcatttaatttaataaataatgatatgtgtatatataaactacacacaaatacaacacacactcatgtgacaaaatcacttatatgtgagtcaaatgtgatttttgtgtgcacaaattattactctattattattattattatggcatgttagtttttcaatattttaaaaaatctataccttttggaaatatatttcaaatgtaacatattattaagagattattttacaaatatataaaaatacgcatgtacagaattttaaatatttttatgattttatttataaaaaatacggtcctttgatgtatttttatattatactcttgttattttgttgttgatttttttattatcagcaataggttttttttttttttgttgttttaacattgtttggatgttattttcctattatttttatgtaatttttgtgttatttttataaaa

SEQ ID NO: 394738 - DNA, 593 bp, Cannabis indica
aaaaaaaaaaaaaaaagtaaatccaaaatgaatataatttctcagtaatgttttgatgagtctgccattgacgtgaaaattcatttaaatggactgatgaagacattaatcgtctatataatcataacaacaataataataaatattataacactattaatgatatatattttgtcattacaatttacaatcacgtgcaaatgaaattattgtcatagaaatgtaattcatattcataacaaatattcttgtcagaattaatagatcgaattgtaattaaaatttcgagcattgctattaggtaccagtagtgcgtagcaccttctcgacatgttgcgttgcgattggctagcgatacttcctaaaagctatcatattaaactatatgggacccgatacttagttagaccaatagcgatactaacacataagagagtgctaggcaccactagtaccttttagcatttctcttaaatctctttttttcaactcaactatatacataacatgtacatatatatttatatatatatatatatatatatatatacaatagagacaatagagactaatgatagtcattggtggatttc

SEQ ID NO: 394739 - DNA, 774 bp, Cannabis indica
atattattttagaatttgtgtttcgatagttactaattggatcttctgttttgttaaatgacaaaatggactctatattttctaaaataataaaaatagaactctggactcaattttcaacaattttattttttaatataacaaattttaaaataatttctaacacgaacaaatataaaaaatataattagctttgtcataacatctctagatcagattattattaagttttattttgacaaaaaattagtttacaggaacctatttgtacaattttagaaaatataggatctattttgccatttaacaaaacagatggtccaattagtaacttttacaaaacacaaaatttaaaatagtatttacccttattattgtaggagtaattgcgttataaatttttattgtttataaatttacacacttaaataccttaaatttctttttaatggcaaaaccacccaatgttacattttaatgtctaccgttatcaccattatgttaaagagttaaaaaagacacgtggatgaccaaaattttattgcttctttttttttaaaaaaaaaaatatatatatcaatttaatagaaaaaaaaaacttgatattaacaatttaaaaataaacattaaattgattaacaaacaaaaattgataaataaatataaaatacattaaatttaatagttgcagttcaaaccacactgcactatacattacaaagttactaatttttacaatataatttttatttttttatataagaacaaatatat

SEQ ID NO: 394740 - DNA, 699 bp, Cannabis indica
ggaataattacctcgctaataccatcatagtaaatgaagactgctaggagcattataccaatgcttagcattttttatacaaaaacagtaaataaggacaactcacacttagtgagagacaaccttcatagtcagcagtgacaaacccagaaattttactttatggaggcttatttatcattaaagaaatatttatacttacattagaatcactcttaataaatttatttaattttgtggggggggggggggggttcgtactatttttggtctataattatcaaaattaaaaaattaaaaagcaatatttttgttagtgggagttatagccccaacatgattactagtgggttcgtccctgatagtcagcataactatttaagggtaaatacaaaagatcggttgggtggttattaaatattatcctatgtgcataaaaatgaaatgtggggaatgttcacatttcatgagcagttgtaaatgatcagttcccaatgaaaataactgccaccctatacacttataaatagggacgaaattcaagaaaaaagggacagcaattagagagaaaagctaaattttacatttacttagaaaattgtattgtgtatccaaatcatcatccctaataagaagaattcgtgaaatatgtagattttaactataaaactacgtaaaaatatctagtgttcatttatt

SEQ ID NO: 394741 - DNA, 1124 bp, Cannabis indica
aatatcatatggaatattattaataactgaaaaaaatacgtagtgtagattttttttttatcaaagaagtataattcattgtaattcgttaattataaaaggttatttcgcagcatatttcaaattccactactttgatctaaccctaatagctagaatagtaaccctggaataaatatataacacaaacacacctctactactacaaaccagactctatatataaattttttaaatagtctatttagcaattaaaatcaacactaatgattccttattttgaattgatttttttttttttttttttgtgagatggatttctatgtgttttaatcttaaactttgacaacatgttaatgtccgaggttacgtggcatatcaggcattgtggtagagaaaacgttcaatcataatagaaaacaacaaaatatagataagcaattaatcctattatgaatcaattacatactattttaacacacaaaaagtgataaaataacacacaaaaagtgactttatcttaatagcaggaaaaataataataaaattaccatatattgatttaagctttttaacgaagaggaagacattgaatatgtcaaggaacaacatgatgttgagtaagtctgtttataccaaaaaataatgagattcaaagagagatcgctttaaccatgttggagagactcaatacaatcatagcctaaaaatatcatggacatgcaacaacaattgacactaaaacctgggcgaaccaatctacatatatctataatgcagttgtttagggtgatgatatgacagttgtttgattggtttgtgattcaaaaattgtgttttttaaaaatgtgttttggaaacaaaaatttaaattttgtaagtgaaaatttgtttttaaatatgtgattggttgtagtgtgatttaatgtttttgagttttaaaaaagtgaatatgtgattggttgggaatctcaaaataaaaaagtaagagaataattagagagtttttggattcaatgatttgaaaacacaaaaaacataaaaatggtgttttcattttttagcctaaaactcaaaatagtattcaaattttgtttttgaaaacactcaaccaatcaagaatt

SEQ ID NO: 394742 - DNA, 753 bp, Cannabis indica
gacacagttgataagccctgagatggaaacccatgtttgaattcatccaaggtatgatgaatattattaaccccttttagttacaaatttttgtggtttagcactatttttgggatctcacaatctgaacatttcttgcctccttcatgctgctaagtttttgagaaattgtattttgaaatctgtgattttcgacatttctgtactcaaattctgaggatgactctactcaaccaaagaataattcactgaaaacaagaaccaaaaaaaaaaaaatacaactctgtaatctgtatccaattactttagttataactcatactacaaattacaatcttaagtaaaccaaacttcacaaaaagaagattcatacatacatacatacatatacaaaagactaatggagttcaaaattcaaacatagggtttctcaaataaatttgtaactagagaaaaaaaaaacaataaaaaaagtttaatcttacagaaggagaaaaattgaggcgtcaacagcggagaaacccagaagcgcttcttcttctcggttccagatatctttgttagaggaattttgtagggttttggcttaaatcagaaaaacaacaaagtgtaattgaaaatcatgaggttggtggcgccaccgtcatggaaatggaaatggccggcggcggttagaataatagcggttggcgttggtttagagagggaagaagaaaaagaccatttaacttttaccttaaacttttttttttt

SEQ ID NO: 394743 - DNA, 1202 bp, Cannabis indica
actttatataactaattaattaacctactacaattaattttattattactaaattaattaataattgtaaataataaataataactaccccactaattggtagatcaactctatataaatggcatacaaaatctactactataatcactaacacaaactacctctctctctctatatatatatacattgatataagtatatacttattaagatctaaattatattacaatttatataactaaaaaaatatggatagacccaaaatttagggtaacaagcattatttatttttattaattattttttaattttattattttcagtttgtgaaggccgtacctctcttaaggttagtggtaattataattataataataataatcacattattaataataataataattatattatttcatctatgatgaagaaagttggtgaaattattattgggtcaaaatattcaaagaagaagaagatgaatatgatgatgagaaaagctcaacaagtgttacaagtaagcattgagaaacaaggtggtcatggaatagtttttgtgtctaaaagggttagtccaggtggacctgatcctcatcaccattaattaatcgtcataattataattagagcagtgctaattacaacattctattctaatctctctttctttatttccatccgaaaatacatgttagaatatatattttttcatggtggtgtacttcggtattgttacagtgtcatttttgtaaatttttgaaaaatttaaaattttttgaacacatgttgtggtaaattattggaatgtcggggattctgagaatttttttaaaaatttacagtaatgatgttataattattccatgaaaataaatattttgcatgtgtttttttttttttttgatgtggaggatgagaaaaagggttgaaattagccctcttcaattaaactatattaatcataattagtttcatcatcagtgtaattattatgattaaatatatataagtaataagaaaatatataaggttgtacttattatatatattgtaatgatcatctcaattttgttttgtttttgtttttgtttagatccatcatgtaatgtaatcaagagaagctttctcatttgaatataaatatatttttttatgaatgaatataaatatattaagagtaaattgcggtataagtacttaaa

SEQ ID NO: 394744 - DNA, 789 bp, Cannabis indica
gatggtcaagtcaaactcatacaggaagtcatgtatgtccctgaacttaagagaaatttactctctgttagtgaactgatatctaaaggctgcacagttaggatagacaattcattgaaagtgatgaaaggttctaggatagtaatgaagggagacataaagaatggtatttactatttacaaggaaagactgttgttggaaaaagaaatttagttgttaagaacagtgatagagacaatacaagattgtggcacatgaggttaggacatgtcagtggagaggtctctatgaatgggagaagcaggggattctcaaaggaaaactttgaaagaaattggggtttcgtgaagagtgtgtgtatggtaagcgcagcagagtgaagttcactccaagtttacatacaaccaagggcaaattggattatatgcactcagatctttggggtgcttcaaggactaagaccattggggtgctagctatttcacgagcattattgatgactacacgagaagggtttgggtgtttctactcaaaacaaaagatgaagcattcaaaacctttgtcaccttgaagaaattgatagaaaaccaaactagtaggagggttaagaagctaagaacaaataatgggttagagttttgctcagatcagtttataaaaattttctcaaacaatggcatagcaagacacaaggcagtgatcaagaccccataacagaatggaattcagaaagaatgaatgaaacttacttgaaaagggtgagatgtatgctgagaggtgttggccta

SEQ ID NO: 394745 - DNA, 1181 bp, Cannabis indica
attatggaattttattaatagcagttagccaaaataatagtctgcaacccaatgaagacatttttcatgttgaaaacacgaccaagattagaattagaaaaacgagtcaaatagtcagtcgcctaattttcaaatcatttgacaaaagaactaaaataaaatcagataaacaagattgcaacatcacaattaattttaagaacacatatatttagtttcatctatcgctcaaaagacacaacaatagaaactattgcaacaggttcattcaacctagtagcttgagcactcaactattgtgtaaagtaagtagatgcactaataacaaccccttcagtcgcagagaatttgttattcccaacaagtactaacaatgatttgatagctagcgacccatcgaagaacaaataagaaccaacaatgaaataaaacaaataaaataatgtcacacaaacaagactaaaacactcaaaatcatgtcacagagacaaggctaaaacacttaagaccatgtcacagagacaaggctaaaacacttaagaccatgtcacaaaaataagaatggtcacagtagcaaaaatagaatcgcaatagtaaaacactatcccgaccaagtcacacctatgaccagggaaggctgacgagcttgtccgaagaaaaaatacaacctcctatagctataaatttagaaacgaaaaaccataatttattttttagttaaataagtgtagagcactttatttattacaataaagaaaataaaaatgctaccgtcaaccttttattataactttttggctcaaaaatacatgacaaaatattttttttctatttttttatgggattgttcgttatagttataacattattcctgtaaatattttaaaaaaattcaaatagtttacagtgccaaaaataaatttgaatttttttaaacacgtgtgataaataactctattttcggtacactaaattattagaaatttttcaaatttttacatagtcgatattacaattataacgaatatcgttatgaaaatttttttataaaaaaatattccaacatgtactttcaaacataaaaaatcaaactaaaaaaattataattaactctagtgtgaaaatagcaaatatatcctcaatttttaatcttaggtaaatgaaaagaaaaaaaaaaaagt

SEQ ID NO: 394746 - DNA, 1293 bp, Cannabis indica
tttttagtctaatttttttctagttgtggacgttatacttatttaagacattctgcaaaattttaagaaacttaaaataatttgtgacagtcagtaattcctagattcataagaggaaatatcaagctatggaatcccacatcgcctcaaaaatgtcaagtataatgattctgagattgtgtaggtataggactatgcaattgaaagagaacttaaatgcaaattgattggtattgcctatatcaacaaagcgcgtcttgttttcttgtcccatcacgaaagaattccataattaagcgtgcttgacctaggataattttaaaataggtaactcttgggaagttttcttagaaagcgtgcgagtgcgaacaaagcatattggaaatacttgtgttggtctgtaggaccagttgtcagtgttacatgattcacaatataaaaatttaatgtccaaactatctattttacatgtgtataaaataaaaaagatgtgtgcaataaattctttgaatcttatttttggtatgttaaatttttttgaatttctcaaatttttataaaatgtcttaaataactataacgtatataactataaaaaaatttagattaaatttcttttctagatacctaaacaaataagggtgtatccaaagagggcattgtgtaaaattttcttatatataatcataaataatggtaaaatcaaacacaaaacaaatagcatcatgaaatgtgttaaagtacaaacagataaaaatatattttttttttcatcacaaatatttcttaagatgaaaagtaaattatttataaatggtatacgtataaaaaggattaatgttgatagatagtaagctagtggtggagagatttattttgatgaaaggttaagatttttatttaattgaaattaagtgcattgtaaataaatatttacaatttaatcagttaaggtgtatgatacattacacaatggtgcatatttaagttccatgatacactacaagaaatgtcatttttgccagcacatttttgtgctggcaaaagttagtattgcgctggtaaaatagaatttacttgtgatgtgttggcaaaaggaggttggcaaatcaatgttggtattagaacgtttgccatcataaaatgaaaagcactggtaaaagttagattttagccactgcaaatgtacgctggtaaaactttgacctctttgccagcgcagtttgcgaaatgcgctggtaaaagttacttttaccagtgcagtagcgaactgcgctggtaaaagtgacattt

SEQ ID NO: 394747 - DNA, 1296 bp, Cannabis indica
ggggggttaaatgcgcttgttgatggcaattgttttgtcatttatcttatagcgaactcctgattcatcatttctttgcacgtgacaaagacgcaacgtatattggtattgggcctcgtggtgatcgcctgttgcttcaatccgacaaggcacttgttacggaccccgccttgtgtgcttttgtcatcaagtactcacaagtgcgtactgtttattacaacttacaactgctctgcattttataaatagatttaattactacttcgtagtacatttaaactaaaactagctaattttgcgttaaggatgaggatgctttcttcggtgattatgcagaggctcatcttaaattctccgagttagggtaatatattttttttaaaaaaaatggatttggtatagttttcgctttcgattattaattttgattagaactcgaatggtacagatttgctgatgatgcttagaagttcggaggaggagttacctgctgtacaaggactacactacacataattcactgggaacatttaagtagcttttcattcaaaatatagaatatataatggatttttaggacatgagcaaaatattatttgttttgattttgatgctgatggttgtcagtatagagcggcccatgattcaaaacttatattttaggaaagatgaattggaacacatgatctggtaataattagtgaaaatatgtttggttagacttccttaacggatcgattaacttgaaaacatactggccagatgtatttgttcgtttcttctctatgcatatttggtaattctttcaggtacctatatactcagtagaatattaataaatgttctatagtatagcagttcacattacatatttaagtttttaattaatttatggtggatatttttataaaaaaattattaaaataatagtaaaatattaatttataaatttatcatctaataaaatataaaaaattaaaaattaaaaagaataaagaaaaaaaattgaaagtattataaatattgataattatatggatgtctaaattttttatttattactatttgttaattctatttttggcatatttatttgacaaaaatattttattatttcttattaattttcgttgaggtgttattattggttatcatattttatgtatctaaactttttgaaaaaaaagataaaaatagtaagataaaatggtattttctaatcttgtatgagtttcacattttcttagatcagatttcttgaagagaaaactggggctaaactttccttttctataa

SEQ ID NO: 394748 - DNA, 740 bp, Cannabis indica
acaacaaaaaaaaaaaaaataagtacactacgacaaaatgttaaacattataaacaaatcaatggcgtcgcccgggttcgaaccggagaccttcagtgtgttagactgacgtgataaccaactacaccacgacaccacgtttgttttaatggtacttatatatatataagattactattaataaaatgattcatcacaaaaacggcaccgttttaccttataattacttctagagctaaaagtagaagcttgacttaactcccaagcccattagtcacggcccatcaattcaatcgcaaaatataaacgtgttttttttttttctgaaaaagtttctttaaatgatatttatttgttcgataaataatttaaaaaatctgtatttaatatttgaaaatgtgttttcttaaacataattaattggttgcactgttatattgttatggagtttttaaaaataaatctttttattctttttttttattattatttcataatactaatacaattaggactaatggaattagtatatatatacaatccttcttcaacatttggtatttacttctcgtgacccttatacaaaaatttaaactttcataaactataaataaaccaaccctaattaattccttcctaatcaaaatcaaaatctaaactattaattccttagtttcctatttgaaaatcaatttcatccttcttagtttctaatcgttcataatttttattcttttctt

SEQ ID NO: 394749 - DNA, 1007 bp, Cannabis indica
gtgacactgcatgggagtaaaactcatttttagtctttccgctacttacatggacataaatgaagaaggactttctggaagtctcttctgagtctagaaggaacacctttccttccacgccgagcaggaagaggtggcatgcgtaacaaagcttccacgtagccttgctttgtgaaggatgtaacttttggggaggccctttacagaagcctgggcagaaggctctaatcagttgaggatcaattggactttctttattggattccacgtgtcatgtcctgtagaaattcatataatatttaccccctaaacttctggcacgctctactgtctaggggcttgtagtgttcccttattttttttcatgatttattcttgacacatgatggcagttgagatcactttgtttgacgtgaattatcatcagccaatctgtcactgattgtatcattagcatggtaaattagttgcgctctaaatgtagtttctaacaatacgtgcgtgcagggcccattccatgaaggaagctaatgtgatggtagagtgattgagcttacccttcatttaataagcactcttcatgagacatgccctaatggatgttacacgttttgcctaatacagtcttctcgactcccattcgtcaaatcaacaaatgctattttggtgaatgatctgggttgtttgcttcgcgtagaagggactcccttgggttttgtgccctaaattaaacacattttaatataatcaaattttacgaattaataaagatcagaatcgaattttatgttgcatggttcacatgacttatttcatgattatacttaatgtataaattctattaagtctagagcatatataaatatgtaaatattttctcatcattatagtgtcgtcagcacagtggaatataatcatgattacatgttcaaaattttaattcccattatttgtgagttcactagatttagactaacgtgataatcagcgataaggtatacttacac

SEQ ID NO: 394750 - DNA, 1388 bp, Cannabis indica
tgagctttcttctcagatcgatcgttgtgcggactatttcttcaggaattgctcttcaaatcatcacaccgagcagtcagtaagttcttcatccctttcttgcatgaatttcttttatgattttgaatctgtgttctgtaaaattttggttgaatgttcattgttcttagatgtgaatctttgcttttgtaacaccctgacccttaggaatgccacgtgtgtgcatttataaactaattgatgataataaactagcaatatagataaaatgtgatttaatataatttttctatctactctaaattataaattcatggcatattccttttttacagttggagatcccctattcgaaatattacaaaacatgacattacaattttaacataaaaaaaatatttttaaaagttcaaaacctttgaaatacaattcctaacaactctataccacttgccagataagctgatatgcacacttgatggaaaagattccttactcatggttgtccaaatgtctctgtctattacttgcaccacatagcacccatgagtcacaatgacttagcgagaaaagtaataataacaatcatataactcgccacacaatatcagcaagtaaactcatattatcataatcaaataatcataagttacttatatatttaaatttgggctaatacaaatattcaaacataatgaaagtaattataaaggtatacagttatacacaattaccagtccaaggataataactataactgttactttataaaataatcattctcgctattttcctagaaaagtaattctaatacctcacctggcatgctaacgtatttgtcgttatttaataaaatcaccctgatatttaaaactgataatcaaatgttactatcgttgtcaaattagacaacctaaaagtcatcctccaatattcataaatctcattgcctaataaggcaagacaatgccctaacctgacatccatatgtaatattgcccaataagataagtcagtgccttaacctggcacccatatatcatatttcctaatgagataagtcaatgccctaacttggcacccatatataacatcgactaataaggcaagttagtactttaacccggcacccatatgtctttgtcgttgcctagtaagacaaccgacaaataggaaacctaaccatagtttccgtttatagtcatgacatttgatacctaactcttcggtatctaaatatcattgcctaataagataatatttttattattgtctaataagataaccagagccgaccttgaaaaaaacgggcccaagacaattttagtaaactaagaaaaaatgggcccttttgtatatgtattttttttatgtatgtaattttaaat

SEQ ID NO: 394751 - DNA, 652 bp, Cannabis indica
gcacttgatccttggatacctggacaagatactttcactcccattcatttttctggtcctgcagatacaatggttagctgtttaattacagatgaacgagtttgaaatgtccccctccttcaacaatggttctcccctttggatgtggatcgcattttgacactgcctcttagctactttccgaattcaaatgctcttttatggcactataacagttcaggtacttacacggtacaatctgggtactatcttgcaacatctatagcagatgtggatgccaataattgctcaagttctaattctcaagcttcttggtggaagttattctagtccttgcaactcccccaaaaagtcaagattttcgcttagagggttatccacaatgctctaccagttgctacatctttagtgaggcgtaagatcatcacaaattccacctattcagtttgtaaaacagcgtgggagtctattgggcgtgctctatttggatgcaaatatgccaaagttgtatggcgcaacatggatctgaatcttgactggagtaaagcatctgcaatgtacaagggggactatttggtacatctctctgttagcccaagatatgtttccaagagggggggtgaattggaaatttatactaatttcggtaaat

SEQ ID NO: 394752 - DNA, 2467 bp, Cannabis indica
acacttttatcttgtctcgcagagatacattttgaggatgttatgcagaggaaagaaaagaagagagtgaccaattcggatgctgctttagatatcgaggtgcagcctcctaaaaggtcaaggaaaaccaccactaataaaaagaagaaagcctgtcagcccgttaacctcgagatccttaagactgaaactcaagatcaaattcctcctcgggcaccgcaaataccaacgagcctctccacaaagaacctcacaccttcgcctctttgagccaagccattgaaacacatttgcgaaggcaagaaagactggctcagagttcacccaagaattttgagctgcttgctggcgctagttcaaagatctccttccccgtgatggagatttggaaagaatgcttacgaggggtttgtctcataccctcttggtaagtttgtttgccgtaatctgcttacgtcttttatttcacttctccttcctcctggctttttatacatctttctttgcgaagctctaggcttcattcatctcttttgtcgcccaacggcgaggcttggaaaagaaaaaatatttggagagcaaggtccaaaacacactaagccaacgtgaggtcgtggtcaagaaatggaacgatgctcaactggaaattacgcgcctcaccaaagaagctgagaggatgaagaagagccttgaagatgccgagaaggagacaaaggccaaaaccgatgaatgcaagaagctcaaaggggtacttgaggggaaagaggccgaaaccaaagaacgatgcaacaaagttggccttcgtaccctttatcgagccttgatggcaaatctgacatggacacgagtttcatggaggaagatgaggaggaaattcttgcttttcgcaagaagaccaggaaggaggaagaagaggccgaggctaaagaagaagaagatccctccaagtctcctacaatgtaggttggtttttatttatcttttattttgtgtaggagtaactaactaattaggcatgttaatgtgatttttaatgtattgtgcagctcgttgctaatcaacgagattattgaaaaacatgattaattaaaattttcttatttaattaaaaaatattaaaaaaataaagtattacatttataaaatcccaggatcctattacaaaatacatttacaaaagtttgcaattcatctaaaaaagttttgtcgcctagtgattaatcagcaaaagccttgatgtcccaaagatcgtacgctctagacctaactgccctgacatgtacaatcttcacctgctcgctttcacggctcctcacctttagccatgcccttacctacacatggaaatggcactatgagtcgacagactcagtaagaaaagcataacataaaacatactaataacccgggttataagctggtgcccatacacccgatcataaccctatccctgtgtcccacacgatactaaatctagaatgttcatacgacaatactatcgactataatgtcagcctatactcaatatgctagtcatactctagccatattgatgtgacagcatcgattagtatttcagccaacatacatttaccagtaatcagtacaactctaagtatactatcattgttatcaatgtaatctaacaggcctaaacaacatgtatgttaaacatgtaacaacacatgcatgccattatactaatattacctcaattccagattcaggtgtgccggtcaacttgagtggaataattgcatggcgaattacaggctcctaaataacattgataacaacatgaataagtgacacgctaaatcacaaccgggacttaggttttaaaccaaaaccctatcttctgcaacttaatatggaaataccctaaactagtagggaattaaccaaccaaaaacctgaaactaacacgaatcgacaacctgaatttgtcaggaatcccagctgcaaaaaccggttaaccctgtaaaatcggttacctggtttttcctagaaaacccaaacaagttaatagctcaaccaaattgactccaaaccttccagacctgcataatataccccaataaacattttccaagcaataaaacaactacccaagctcagaattgaaaaacaccattaaagctccaagtttgagttctaaaactcaaaacttgattaaacctactaacatccactaaaacatgctttgttgacctcgcttttacccaaagacaatgagtctaatttgtaagcgaaaagtagtttaatacgagtgcaatattataaagtgaataaagacacaagaattttatagaggttcagccccgagcagtttggtaatagcctaatcctcataatttgtattgacttaagaacaaggagaatggttccttttcttagaagtcttacaataatacctctgaatatgaattcttagacaaaatgtttcgaccccttgcccattgaatat

SEQ ID NO: 394753 - DNA, 925 bp, Cannabis indica
ttagtgaacatggaatacaaaactagcagtttgattatctctgtaattgttttgaattgatgaaattttaacataaatattttgttcagggttgtcactgcagttttggtgtgacagaaaattctgatagtactaaaattactctttaacctttttgtttcacagaaatggaatagactcagaagatgaaatttaccgtgttacatattacgggaaggggagaatgccggtaatttttgctcttttttctttgaaaataatcaaatttaagattcagttactctgacaaaatgtattaccagcaagaagtcataaaggtaatttttatataatttgcagggttttggagaaaattgcacgcctaggggtcaatgtacatttggagctcgtttaaaggatgaagaaatcaaactgttagccgagtttgtcaaattacaagcaaatcaagactggcctaaaataaatggcgtggatgaagattgaattaagggtagaatccaaggtttcaaagttttcagtcacaactttacatttgtgcaaattcttcgcgtaggttaaatattttgtcaaatttcattttatttgtatgtgtcataaagatattatagcatgtcaattccatcctccagagaaatatctgcaaaatattgtacttggaaaaggactgagaattgagagaagttacaatccaacaaaacaataaaaccagttgagaattcagactacagtgcaagtgtttatttaagaactgttacaacagataaaagattagttaatgttattgggataaatttctccacctcagcgacgacttcactaaagagaatttgtgatatcgaaagtagcttgcaatattttatgtaaaactaggcaacataaccgcgcattatactaattaataaatatttttttgattttttttttt

SEQ ID NO: 394754 - DNA, 658 bp, Cannabis indica
cctatcctctataagcattgtgccgatcagattatcaaaagatgtgtgccagaagaggagatgttctctatattaactcattgccattgcttacagtgtggaggacattttggtggaaaccgaactgctgcaaaggtattcgaaagtgggtttttaaggcctactctatttaaagatgctcatcaatttatcaaggcatatgatcgttgtctgaaaactggaaatatctgaagaagaatgagatgcctttgacaggtatattggaagttgaattgtttaacgtgtggggtattgacttcatgggtcccttttccatcgtcatacaacaattcttacatattgatagttgtggattatgtatcaaaatcggtagaagtggaagcaacacactcaaatgactgtaaagcattgctgaatttcctttagaaaatatttttactcggtttggaactcctagagaaattattaatgatgaagggagcattttttgcaacaattagtttgtagccttacttgcaaggtacaaggttcgttatagaattgcatgaccttatcatcctcaaagcaatggccaagctaaagtttccaatcgggaaattaaattaaggctaattaggatttttgcccctaaactttgacatgtaccaagtcatgcccc

SEQ ID NO: 394755 - DNA, 1392 bp, Cannabis indica
gagagagagagagagaaatgtattatcttgattattctataattttggccaaaaagataaaacgtagttttattagacttaatctcagcattaacctatttctaacacattccactaaaggacaaaatcataaaatggcaaaagaccattttgccccttgcctaaaatagaaggccacttacacctaggggtatttttgtcattttaaatctcaaataaattctcgatattcccaatatctatctaagttaccccgctactacaaaaatactaaaatgtgattctaaaggccaaacactgcattctaatattgacagacataaaacatgcaaaaacataaaattttatatatggcataagtcatacatcctgaatttaaataaatctccataagatcataaatcagaaataataatctaacttcataattaagccctaagtatctgctaattcccaattaaaactaagtggtctttacactcgtccccttacacacttggactaaggtaaggtctcatcttcttctaggttacccaagcattttacatgttctatgtctatcccttttgttgcacctcattccaccattgtttcccctactgatccctccatgaactttactgagtcgttcccatccaagccttatggccctaagtcctcgacaaaaaggaaatcagtttcatgtagttctccttgcatccctatccctaagaaagccaaaagttttcaactaaatccatcatcaaaccctagtttgtccgagacaaacaaatcaaatacgcctttctattcgaatgacaagctacttaggttttaggataatgtctgttttgtcctttatggcctgaatatcgagttaaactgaagcattttcctgaaatctgtgagttaattgaaaaaagagggtggttattgtctgccactcatttgcaacagccaaatgagaatctagtcagggagttctatgctaaccttgatgatatcattttgaacaagaaaagtaaatttctatatcttgcttatattcggggaaattgatttcaatttgccccttccactattagttgtcttttgaaaatcaaaaccattcccaatcttgttttcaatgaggattataagccttcttttaaagaaatagggtctaagatcactaaaaattctgaatttgtctcgaatggaaaagagttacctgtcacagtcctcactgagttttttagagttctttaaaaaattgcactgtcaaactggtgggcaaattcacacacctctactatcaactatagcacatccaagtttttatttgcattgggcactggtgtcaatattgatcttttctcactcatgtatgatcagatagtgaactttgtgttggaatttattttaccaggatct

SEQ ID NO: 394756 - DNA, 1020 bp, Cannabis indica
ttgcgacttgactgcatagaagtataacacttctttcgaactcagaacctccaactctcagatcttgcacacgatgtaccatatgactagcaatttatatgattggggaataagttaaaagggtgcaattcccacgcccgcacaaaaattgacaaaatagcttcgcaatggaagatgtgatccacaaataatacgtacccaattccatgctccgaagccctcaccacactaggctggttactttcccatgaaagaaaatctgtgccggcatagtccccgaatgttgctgacaccgtggtgtttgtcgtatcgttagagcatgtcgtagctcctaaatttatttaggatttggtacatctcccagatggatgaattgtaaattactagggtgactttctttcggtgtttcttctttggagtggcttccaggaccacgtcctctttcgaatcctccttcgatagtcctgtcttgacttcttcctcagcgagatccaccatctctagcttgaacttatcatcggacatagtaatctcaactaaaagttgtcatcagatgaccggtcaggaatgcaagaataaacaatataaacccagatatttcatttcaaacccaaatgactctgaatgagggaatttaaatcgaatcacgagctaaaatacctagaattctacctacacttacactataatagctctacgacttcaaaattgcgtagacattacacactcattcctcacattcgcatgaaaacagttatcactaattaaaattcgagcatacatttatgtagaagtaagaaattatatagttcgaggaataaatggggctaacttgtaggatggagtgtggctggatcagtgggtggagactggcttaaaaatcgagtgccaagttgagaacccagtcaatgcctgcctgaacatctaacgacttcggcgactgggcttggctcactattgggttctgtaataccctgaaattaagaaatagattagcaaaaccctaattagataattatg

SEQ ID NO: 394757 - DNA, 677 bp, Cannabis indica
agaagagatgagaattttctaagtgatttattccaataggggatctcctatttatacacatacaagagtcaaatattaaaaaattaagataaaaaggaaactaagaaaaaggaaatgttgattacattaatggtaataaataaaagagttggacatccacataattaataatatttataacatttatttgtttcttactaattgtgtgagagcaggtgcgttgcacgtgtccgcccataactagtaatagataagttttctttatttcttttattaagattaaatgtagtagttaatgattaatttttattgcttatttattctacttttgtattaattttatataaattagatatatgtaaaattattaactctacttattcaataaattaagaatatattttttatcccactcaaaaattacattcttcttcttattattttctttctcaaatagatcaaatttgaatgattattactttgttaatcaattgataattataaataattaataattctaaataataaatatatagggacatgattttgtctcgtaattgtacttttacggaatgtattccgtgatgtacggcagccgttagatgagggagttatttgatctgagggctgagattgatctaggggtaattagggttaaaaaatagtaacgtaccctg

SEQ ID NO: 394758 - DNA, 640 bp, Cannabis indica
taaaagtaaaatcgtaaattattatacaataagctaaaatgaattgattagtaattttagtttaattgtatttatccaggattccaggtaatggctccaacacagtcaaatatgaacttttttcttaatttgaacaaatgacatgttatgactaagacggaagtagctccaatgccttttgaccgctaatgggtaagtttattgtgttatttcatagtttgcatatgtctagaatattaggttgaggctttgtacacatgaatcttaattttttaattttgtatgataccaaattaccaattttataatgttgaaagaattttttaattggtttttttttctggtgtcaaaaaccaataatagagaggacattttgttcggaatttgattcaaaaagttgttggattagcaccatatgataagaggattactgagcttctgaaagttggataggaaaagcgtgcacttaaagtagcaaagagaaaagctcggaacccacaagaggaagaagaagcgtgaggagtagtccaatgttcttggcaagatgaggtaacttcaaataaccttgattagtagaataatattgatgatttctcaactagtgttttttttaaaaaaaattgagtaggttttagcctta

SEQ ID NO: 394759 - DNA, 605 bp, Cannabis indica
ttttaccatcccttgcactattgggaggatataaggaatcaatgctctatgtgatttgggggcgagtatcaacctaatgcccttgtcagtgttcaagagattacaattggagcaagccaaagccaacaaccgtgactttgcaattagctgaccgttccttggctcatccaagggaggtaattgaagatgtccttgtcaaggtggacaagtttatttttccagaaaattttattgttcttgacatggaggaagtattaatgctcccattatccttgggagaccctttttggcaaccgactaagctttgatagatgttcagaatggtgagttgaagttgagagtgcaaggggaagaagtggttttcaatgttctcaaagggatgacttatcccaaggctagtgacaactatttttcagtagatgttgtgggaaatttagtagaaggaagacaattaattgaagatcctttagagttgagtttgattgaaggtgatgtgaacgaccaagatggaaaggaagcaatggagtatgagaaatggcttgattcatattggccattgaagaagaaatgtaacaccctaactagcataggcgtattacgtgatt

SEQ ID NO: 394760 - DNA, 940 bp, Cannabis indica
atatgactaaacaaaaagcattgacaaccaataaccacaaatttttccaatccggtataatataattatttaagcattgaaatatgatacggtttattgttgcctcaagtgttacttgtaatcattttcatgttgtgtatgagaaacccaaccatagttgagtgcaagaaatgtatatatatatataagaactttccaagtaaacgcatcaactatataagcttatcatctagattctgcataatttaagtggatgatttaattaaacgcttgtcatgtagtagtattagagttctagaacttatacaaggatacgttgttcatgttgttcatttccttccttcttttaattcaggaagagttgttaattagtgattctaagtaactactacagaatgtcatgtttagcattgacatctgttataaacatttggtaatgtgtgatattcaattgttttttttataatttaaaaaagaaaattaggtgatcacgaagatatcattcaattattacaacaatgtccacttttcatatttgacacaaacttttgtagtagagaaagagtaatgcaatacaatatacaatatatatatatatacaaattttatttaattattgaaaattaagtattcgtgtattacacgtaacatctacctagttaaaatatataatcttataattaaacaatatataaatattaaagaaattaataaattttttaaaatctaatcataatttaaaaaataaaataatcaatttttaaatttaaacctcataatatcataaaattaataataatctattaaaaatgaaatattattaatttaaaatttatatttaagtttaaatatattaaaaataatattttattttaaaattagggtttgaaaattacaaaaatttaaaattgggaaaaaaatcccacaaaattcggatttt

SEQ ID NO: 394761 - DNA, 917 bp, Cannabis indica
ttttacagtcatggaattcgaacacaccttgggggtgcttcctccagttggttgcataaaacataatgtcgatgcaagtatttctctttggatcgtcatgttggatgtagagtcgtggttcgagatcatactggtgttgttattgcgtcgacgacatcgccttttaatgcttacttattagctcttggggtagaggcgatggctgttttccagggatttctcttgtggtctcggttgggtcttgcaaatgttgagggggaatctgattgtcgacgtgtgtgtttggctttgactaataagactccccttgtagagaaatttgggtctataatttataataatatttatgtcatttctttttagcattgttttaggtccactaataccctagctagcacacaatcttgctcagtttgctctttctttagattgtgctaaggtttggtggttagcatgggcgaagccacattgagcctaagtagggtggatgccccacctgaaatatggcttggttcgatgtaatttaggatttatgtctaaataaattttttgagcatttatacaaatactagtctagtcgaaaattattaaataatattatttgatgtagtggtaaaatatttataaaatttaagtaggtaaaaggttcaaacctccatacatacactctgtttttttgtatgattgtcaggatttaaactgacatttaatataagatgtgattatcttaaaatttattttaacataattgtgtattattttatattttattatagtcaattttataatttttattaaaatgtttgagtctatgtaatataaaaatgatcattgttattaaattttatgatgtttagtattactactaggtagaaattacgtgcaatgcacgtattaattagttttatatatttaat

SEQ ID NO: 394762 - DNA, 996 bp, Cannabis indica
tgagaaaaggtgattagatctgtaaaccatcttatctatatgattaagttggtactcctaacaataataaaacttgatgaatttggtgagatctcttgtggtcacatatacattataccaacatcaatgccatacatatatatatttaatatatgagtgcatgtggacccaaaaagtttgaaattgattaaacacattcaaaatgtttgatctatcatcagtgttcattactgaaacaatatattgctgttgtgaccacttacacatgggcaatctaaattattacatttataattgttttgtacttatcaaaaactcatttacatttattattatcattgttcaaaagttgtacaaatctttaattaactatgtatttattcaataaaaattgttaaaaaatatggattaatatagtttccatgtaatagtaatatatatatatatatatatattttctttttttgcttattttgaaattttacttcccgaactaaactattaaattgtgtctccaaatttttttgttagttaaaattcactttgaattgtgattctttagtgactgatatggcattactacatcattctcaaatgtgtatttataattaatttttcttttaattatataactttaggtttatataattatttttagtaagaaaatagattttataagttttaaattattttttttttatgtaacattacacatttggaaatattgtgttttacttattgcctttcaagtttctcttatgttctcgattttattattccttaagtacaagtagggatgtttattgaaccacatccaatgtttttaggcctatccaaatccaatctaattatatattagatattagactttaccatccgatctgatccaattagtttcaatcatccaatcgatccaacatccattggatgttggattggatcggttctatccattggatgtattttatatatgtatattaattggtttaatttggg

SEQ ID NO: 394763 - DNA, 571 bp, Cannabis indica
gctaccaagtttgtcaggcttgcacctatatttgcaccttaggtagtgccacctaatatgagcagtttaagaaagaaaactcgtctgtgtttaagggtggtccagacacactaaaggcagaatagtggatgagtattattacttctatctttgactttatgcggttcgaggataatgacgggtacgatgtgttatttacatgttacatgatgatgcccggatatggtgggagattgtttctcaaggtcataatctgaatacaatgacttgggatgccttttgggtaatatattatgagagatattataatgattccattcgtgtcgctcaagctgaagaatttgcagggttagttcagggtagcatggctgtgactgaatatgctaccaagtttgtcaggcttgccaagtttgcttatgacgaagtggccactgaagttacaagaaaggttaagtttatcagaagccttgaagagtatatttgtaacgcttgatacttaggcaagctacaatgattttccaattaacgtgccacatttgctaatcaaagggttttctttgaaaatcttgtc

SEQ ID NO: 394764 - DNA, 1100 bp, Cannabis indica
agttatctaaaatatttaagaaattaattaaataattttttgtatcgagaacatagtttaaacaagaaattaatatttttgttccttgaacttttgatattatcaagttgtccttttcattaaagctgtaaatacgggttgagttttttaacacgatatataagaaatcagcataagcgtgagagttacgggaacgacttagaacaaaaaataaggagcttgggcacaacaagacacaatactgtaaattggaatgacattggcacaaaaaatgagctaattaacgacaagcttgaaggtacgacacatcaacacgaatagactagcccaaaaacacaacacatgtaaaattttaataataaaaataattataatattacaaatatatttactaataaatatataaattttaattattctagtttttttttttttggtaaatgagatatatattgcattagaaccaaaattcaagagtcatatacatcctgaacaaatcaattgagaattctcacttatcaaattaatttttttatatatatgattaagggtaaatactattttggatcatgtacgtgttttgtaaaaattattaattggaccctctctattgttgaatgacaaaatagatcatatattttttaaattggtaaaaataggaccataaactcaatttttaaaaagctcaaaatcccaaacaaaagtattcaatactcttcttttctcaaaaaatcgcttcagctcagccctgtggacggcggcggcacgttctagggttccattcgcaggcgacggtggtgcacagcccttcccttcgtagacgatggtggttttcggtcttcccctttgcgaacgacggtgattctcggggttcgtaggcaacggcgcatgaagcttcggtaggaatcgcaactatgatgtgacctctccattggtgcacctttcccagtcgcagacggaggcagcaaccactcagcgatctccgttggtgcacgtttttccccagtcttcgttggtgccgtaatctccgttggtgacgtcttcttcacagtcgcaggcaatttcttcctgcggttttcttatgaccggcttctccaact

SEQ ID NO: 394765 - DNA, 1754 bp, Cannabis indica
gttcgagaggcatgatttgatagatattaaataagtctaaggagtatagatttagtacatgaacaatcatgtacgtagtaaaagtgaataaaattagaaaaatatccttaaattcaacgatctcaatagttcagggaaaattttcaaaaaaaattcaagaatataatttggtacatatcaaagtttagacgacaaaaattttaattagcttaatatatatgatcgtccgcctatatatatgtataataataacactacaagaatgtcacttttgccagcatatttttgtgctggcaaaagttggtattgcgctggtaaaataaaatttacttgtgatgtgttggcaaaaaggagttggcaaatcaatgttggtattggaacttttgccagcataaaatgaaaagtgctagtaaaaatgacttttctcagcgcgtaaatgtggtggtaaaagttagattttagccactacaaatgtacacccaaaactttgacctctttgccacgtagtttacgaaatgcgcaggtaaaagttacttttatcagtgcagtagcgaactgtgctagtaaaaagtgacattttcttgtagtgtaataataattagtatacatgtgtgcatgggttataggagtgtgtgtatatatagttttggtgggttttggcacgtattgtcaagttttaaaaaggttttgaaatttaaggcattattggagtttagccagaaatggaaaactactgcatgcctactcattgacagcctaaaccgaatctttttatttatttattttattttatatatcactaataataataaaataataagtaataagagttcatgattttgatgcagtagtctcaagaatctcatatataaaaccctatatataaaatatatatgatcgatatagatcagtagaaggtgataaggtgcaaatgccctattcaaataaacacaatcacttttctcactttatatatttttgtttacttagtaattacaaaatattttctctcaaattacatctgtctgtaattatatgattaaatatgttaaattacttctaattgtactcaaattcaattccactataactttctaatcatgcttttattaaattaatcttggataattatataatgttaataaaaaataaaattgggtgattaatattttatcaattaactacgtattgattttaatattataaatcaattataattaataagtatattaattataatataatttattatatatcatatatatattaatttataatttattatagttatttgtattaaatgtgacattaaaatatatatttctaagccgacttgatcatgagtttgtgtgagatagagtaattaataattatataagtaagttcatgattttgatgcactagctagtctcagaatctcatatatatatatttatataaatattttgctgataagtgggtcgactgtaaattttttataaagcttaatcttcctcagttacattttgtcctcatgagtagtctcattctacaccctctcattcatcactcttcatcatcattaacatcaatttataattgaccctatattcactagaagaaatgtcacttttaccagcacagtttgttactgcactagtaaaagtaacttttaccagcacatttcacaaactgtgctggcaaagagatcaaagttttaccagcgtacatttacagtggctaaaatctaacttttaccagtacatttacgcgct

SEQ ID NO: 394766 - DNA, 1199 bp, Cannabis indica
atttaactcataagcaagatgtgaggcaataaaaagtaaaaatatttaaataagcaaagttggccatccaacaatgcaaaagtttttacaaaatgccacaaggggaaactattatcttggcctgatggccattttactgaataaaaaaaacataaagataaatgactaagtctacatggttggagacttagttggatcttcttcttctccattatcaacttcatcctctgcattgccgacttcctcctttttggtttgcttgcaataacctagcatctcccaagccttgtcacctagaaaatttaaattcatcccagaattggcaaactaagcttgatagatagatcgtttagcgattgtattgaccctagttttggcatcagccttggcctcctcaagttttttgttagcctcgactttggcctcttcaagttttctattagcttcagcctgggcagccttatttgcttcctcgagctcttggattttcttttgggatttttcaaggtcagtcttgagggtcttctgctgctcctcagcttcttttttaactttagagaccctaaactgcgagtcagtccattgtgaaattaatattgatattttgtgtgtgttatatatgatagtataataacatacatgtaatattaattaacataaaattattttaaagataattttatgggagttatatattaattttgtgtattaatatatgtttataaattatcatattaatatatgtactatatgatatgataattgagatgatgataagaaaaatgtgttcattctattattattactatgagactatattgattaaaaataattacttggaaataaaattctattttggtaaaaatcatctcattttatgagataaaaaaggtgagctatgagagttacagtttttgtattttttcttgacatagcaagaacaaagtgatcaaagtggatctaaattgtgaaataagcttataaaattggaagaaaaattttagactcaaagaaagtggatcattgtggattcaaataatgagataaaagattataaaattggagaagtaattttgaatcttaaaaagcaaagtggtgaaacaaaattgatgagaagtaattttgttaactttagactaatctcaatatgaggagataaccataaaatggaagaagcaattttattattatgagaattt

SEQ ID NO: 394767 - DNA, 890 bp, Cannabis indica
catttattaaaacaaacaacttgaaataaataataaaataagagacactacaactatcgataaaaatagacaaaaaaaaaaaaaacaaataaaataagtggttttcatagaattttacatattttaatctagtatcgagttatattgttatatagaaatttttgattgagtctcatagattttgattacataaaaagaaataataaagtattaaacactataaaaatgacatatcattattggcctaataagccatttagttccacagccacatattttgattaaataaataatataagaaactcctaatgcttacaatagctaatatgcatatagtaacatttttttttttgagagaaaacagaaataaccattaatatataggcaaatcatataaagtctatattacatgaagatatagctaaaagagcaaaattatcgagagtagacttatcaagccatttacagcaaaacggaagaaaactttaatatcaacctcaactaagaattcaataagccacaagcagtcaaacatcgaaaaaagtataaagtaaactggttttcgaaccaaatgaatatctaatatagtccacctaccaatgactataagctaatgtcttccaataaaaattgggacataataaccctaattaaatcacaaataagagaaataaaatcaccaaccaatgcttattcaaaaaagattcgagcacataataaagggtcaataaaaatctaaaaatctcctaaatctaacaccttagagcatcaccaaggaggcatcaaatttggtgatgcagtagaattaatcctccaacgtagctgcaaatattacactaaattgctgtgtgtgctacagtgcacggcatatatgccgtgcactgttcaca

SEQ ID NO: 394768 - DNA, 804 bp, Cannabis indica
tatataattaatgatattttggagtgattttagctcataaaaataaaaataaaaaaaatagagaatttaagagataataaattaaggtatatattttagataattatacaatatatctcttaaaataatgcactaataaattccttatatttttaagaaaattttcaagtagtcatgtatgttatagttattaagatattctgtaaaatttgtaaaatttagaaagatttaacaccctcaaaaatattgttcaaactgtgtgttgcacacgtgactatttattgtagaagaactttatattttatatcaatcaatattatgaacttaataaaaaaatttaaaaatgagaattaaagagaacatatagtgctatttagaaagattttaaagtgatatgatatcacctcatatctctagttatattatatatataaatgcatagattgattatctctcaattctaatgcaattcgctcaacatgattattttcaactttgtgttgttactgattggaatatttattttgttaaatgataaaatagactctatatttttcaaaatagtataaacaagaccttaagccttgagctcaattttcgataatattttttttagactaattaagatttttgcctcctgaactttgacatgtaccaaatcatgcccctgaacttttaatgttgttaaaaatgccccttgaactattgagatcgttggatttaaggacttttgtctaatttcattcaattttactatttcagtgattgtttatgtactacaccatgctccccagactttgatat

SEQ ID NO: 394769 - DNA, 656 bp, Cannabis indica
ataataaataaaataagaatatttttgtcaattcaattctaattataatgttcatatggtaataatatttctgttattatttttattatatacttctttactatttttattaccattattatttggtaaaccaatcaccacctaagtttctctaaaagaatgagataggttctccaagtattcatattatccgtaactaactattaagatttggtcagaccttgttttactatatatatatatgatgccaaaaactcagtgtgtcccgtccccatagtatttattacatttatgccaaatattaattttgttattaaatacttagccgatggccttttgtaacaacgacaacaaagcattaaatagtacatttgattgaatggttattattttatgtacttattttatttttattttaggatatttttaataatataatatacgatttttgggcagatgcctcaggtagatgctgaaggatttactaaagttcaggggaaaaaagataatgatgggtgaatctggggtacaagagcaagacttagatatgcataagacaaggtggggggggggggggggggggagaaccctctctgtctaatggataagctattatgttggaatattcggggagccaacagtcaacacaagcaaca

SEQ ID NO: 394770 - DNA, 845 bp, Cannabis indica
gtatctgtgtgtcagattctaacgttcaattacagagacgactccaacgtctagctccgatgacgataacaacttcgaccactttctggtgacttttccaaagactttttcggtgccggtgcaaactctgacgatttttccgtcatggtgtcaactatccggcgagttttttagtgtcagtacgccctgcgaatttttcgacgtcggtgccaactccgatgaccattgttcttcaaacatattattaaatattttatggtattttgttgaggttcccattatttttatttttttttctctaaaattatcatattttgtccatttagtttcatgcccataaatatgtaaactagttttttttctcttatttttttaaatagttctattcaaatttataattggcccaaattggaacataatttttttttataacaaattatagtttattcttaataaagtattcttaaatagagattttacggtatatatatatattaacttaaattttatatcataccatatatcaatttataatctattttgagtcaaaaaaaaatataatctatttttttctttatataatttaaatattatatgatcattcttaataaaatactcacacttttattcttatatttatttttcaaaactctataaaaatataataaagtaggtaaaataatttttcaattaagttttaatgaacgaccaaatctagaataacaaggctattgtagtcgtgtttatttttagaacattgtgggcatctcaattggcttaaaacacgtttgtgttagccacatgactatctttattcatggctaaagtattgttaaatttttatt

SEQ ID NO: 394771 - DNA, 982 bp, Cannabis indica
atataagtacaaagcatgactttgcaactgtcaaatagaaaaactaacaacaaataaaaatagaaaaaattaaaaacacacaaggtttttatatgtggtatcaataatccttacagattgttactaatctacgaggccacgcccagagataagattcattaatattgtttacggagattttcaaaaataaaatatttaagagctaaagaaataataacttgcacgaattaaaagaagaatttttttcttggttcagttgttaataaacctttgtccacgaatcagtttattagcttttaagggcggtattaatgtgtttacaatatttttgtataaatcctaaatctttactcttaaattcttttagctatgtattttaggctttaccccttttcatgataataaaagggtatttataggctaagtggcaggtatggacagactcatgactcgcctaagatttctgcttaaatcccactgtttcaataaattacatgcaatgtagagttgactggatattcccttgggtagcattatgtctgtgcatgtcgcaacttgataatagggaccatttcgtacaacttggacacgtatcactcaaaggtttaacctttaaaactaggggacgcatgtcactcaaagcttgtttctttacaattagaagtccgtaatgtccgtctggtaaaagggtggtggtggtgtgtgcactacctattgggttttgtgccctaaataaaacatattttaatataatcagatttacttgttatactcgaaattcggctccacttcagaagttgacacgtgtcctgtagtggaatatgaaccacctgatttaataaaaatacaagataaaataactcgttataaaggtttaatagaaaatattcacaactcgcttactatatagtcttaagcgagataagtataaaaagctatcaaaactgatattgacgagacacaagctgttgggttttatgcc

SEQ ID NO: 394772 - DNA, 705 bp, Cannabis indica
taagaaatgggttaaaaaatgaaaggatgttaagcttaaaaatattatttttgaactttatatagaaatagatatactaataaatcaaatgaaaaaccctaattgtatgtagttaataaaaaagaataaaatgatgtagttttcattgaaaaactggaaatgaagtgtagcataaccttaagtagaaagcatatatggagatgaagattttctcaaacctaaaaaaaatttgagagagagagagatgaagaaatcttaacctggaatagatgaagccatagatgagtttttggaatggaactgagtaaggaagacgagcgatccagagagagagaagaaaatgagaaaaaagtgatttaaatttttttaaaatcatgaaatatctatttttaaaatttatttaaatttgattttaaattaaaaaaaaaacaaaaataaaatcagttaccgaacattactttcaaacaatgtttttataattttaattaaaacaataaaaattcacttttaaaattgttaccgaacagagctagtcattttgtgaagtatgcttagccacttacaacatgtaaacaaaaaatatgcatttttaaaaagaataattaatatttttgtcgtttgaacttttgacactatctgattttgtcttttaaaatataccactagttaaaaaaatttccttaaatataacaattacataattat

SEQ ID NO: 394773 - DNA, 513 bp, Cannabis indica
gtacattgctgtacagtttcagcaacatttgcaacaacagatgtagaagaaaaatgggaagtctgaggaggttgtagctgatataacccttctttaacagttccctgaagaagaggcttcttcgtgatctgatccttgacagaacaacaatcaggggtaaattcaatggtaacatcattatccttagtaaatttagagatgctaatgagattcttggtgatggatgggacatgcaaaacatttttaaggtgcaaaggtctattagcagcaagaacactagaaccaacatttaaaataggaagtttagagccattaccaactataaccttttcgtttgcctttatagggaagtcttgtgagacatttgggtagggtcggatgtcatatggtttgtggcaccactatccatataccaggcagcatcttgaactgtggaggctgaggcaatatatgcctgagatttgggattcagtggggtttgttgtactgtcatcagggcccgaatagctaatg

SEQ ID NO: 394774 - DNA, 1436 bp, Cannabis indica
aagacataaaactgtgaagaacaaaaacataagaaaaggagaaaatggggacttacagcttcaaatgccctgctgatttgctgaagaagaccaatcaaagagtgactcaaaagaagacgtttcccagaaggataaaaccctttccttgaggcaacaattgtcgttggcttcccattacatactcggacctgcacatacagttacatactattttagtgttataacactacaataaaccaaaaataaagtcctcaatttgaatggtaataataacagtagaaaaaatctatagcacacattcaaatgggtgttttagtacatcacctatctatttcgacattttgagaattttttagtctaattagtcttcttaacattagtgtacgttatagttagttatgatatgagtaatttaaaaagtttagattgttgcttgaacccgaataaccacaacaaagtacacaatcatcaattttttttttttttgttctaaatgcataaatagactttctgtaagaataagaagcacagagcaaaattagctagcaagagaaaaccttacgtcaattttgaaaaagtcatcttctgtcttatcctcatgaaatggacgattagaccttcgaatatctaccaaaacaaacaacacaaaacatcaaatcaaaaaacacattctcctctccatacaaccatttccacaaacacttcgtacgccacctaaaaagaatcaatcataaacaacttctcaactcacagtgaagaggaggcgtgagatgagagaaagaaaagaaatcatagaactgtccaagcttcggaggcagacacatcgagatcgccggatctccacaatctcttcctccagtcttcgcctcattactcgaacttttctgaacaccaccggcgatggcgtttgttcccggattcatcagaggcggctgtgctggtgttactgcgattagaagttaatttttttttatttttctttttggtggaagaaagcaataggaagaagataggatgaaatttaggttatttggggcttcatttccttttttattttttttattttaattcatcaaaaaaatttatggaaattaaatttaagttagatatattagattaaaaaagttaagtttttaattttaattaaaaatttaaaaaaactaaggatttaatctgggccttacacgtgtacatctagtcacaactaacagagtagtagtaacggagaggcttacaatacaacgtttggtattaaatctgccaaaaaaaaagatatagtatttaagtgtataaaattaaaaacatataatgtttatgacgcaaatttccctaaaactaatatgcaactatttgcacaaaacttactatgtataactactatttcttagtccccgtcaaattaaattcctgcataatatataaactatcataaaacg

SEQ ID NO: 394775 - DNA, 1025 bp, Cannabis indica
caaactactgactatactttccatagcaggacaaaaaactcaaaccgtatcaaaagatacgacataattattttttgtgtttttttttagtacgtttgaaaggggtgttttagttttaataatttttggattttaagtgcaaagcttttactatactaaagccttgcccttccccaaattaaactacgtgagctttacaccctattgttattaagtttaacgttagcgcaaatgtcaaatcttgctactattaagtattaatgtcagcttcacgtaactgaagacaagtaaatagtaatcctatatatgattttacttctatgctttgttatggttatggaacaacacatgtatcaaattcataggttggctggccacaccgacaaaagcacaggtaacttattaagaaagagaggtaaaatgtgaaaacagatgaaccaaagatgaatatatttcagttttcaacattgtcatgtgacaccgatactgattcttgaaaggacaattatcttttaaaacaagccacgagaatgagagtcataatttgcaccaacaagaattgttttaactttggttgcattttttggaatgcctatgattatttttttcaattttattattctacttacattactcttcaccaaatataccccttagtccaaattagtattgtaagtttgtgtgtgacgtgctcgtataacccgtacttatctgtactttaaaaaataggtcgtgtcatgccatgctacaaaaaaatatgagtcgtgtcgtattgtaccaacatatttaaaaggtagacttggcacagcttgatattttcgtatcgtgttcggattcgtatcgtgccttgctcgtgttggctcgtatttcttaaacaagtcaacccgttttcatattcgaacttaaatttgtattttattttttcatatttttttccacaatgactaaagtacacatatatcttataattttagttatatttatataacttttcaataatattttatagataatcatataaaaaa

SEQ ID NO: 394776 - DNA, 615 bp, Cannabis indica
gacaccaagtgtaaaaatctctagactaatctagttgaggctagagacatttaggcttgtctggagaagttttgttcatggtctagacagtaagttaacaagctcaaatccatcatatttttaagcgaaaatatttttatatatttcaaaaaaaaaattatatacacaggtaatattttaatataaaaaataataatttaaaaatgtaatacacatatgatgtaaatatatttcaaaatttagtagttcagatatatatttcattattatttatatgaaaatatataatttaaaataaaattaaatatttctttatacatgtacaatttttttcattttcttttgaattcgttattttttattttagtttgttgttaaagacatgaaacaataatattttattttattttattattttttatgtgaagaaaaacatatttttttaataaataatttaatttaaaaagtaatgaatctaaaataatcgatctaatccgtatttttgcgaatttaattgaataagatttgagttattattcgaatgaaattagattcaaaatataaaatctgcacttagtgcgaattaaatacactataaataaaataatacaaatt

SEQ ID NO: 394777 - DNA, 1078 bp, Cannabis indica
attactaaaagtattattttattagtgcttagtattatttttttatgtcatactattaagaaaatactactaatcaatcatgaagcgtcacttataaaaagtgttagcatcacaggtgcccaataataatgctctaaaatatattatagcaatatgtcatttcttgtggtacttcatactttaaagtgtcctttaacatttctcttactttaatttcttggagcacttctattctattagtttttctactttgtcttttaaaatatctcattaaaatactaattttttttatttttcttaaatttttacataatatcatacatatttattttagaaagacataatattcatttaatttagtttgtatttattaatatagataatgtgaaagaaaaaaagaaaaaaaaaataataaataaaaagcctaaacattcttggattggttacatcaatagaaaagagatacaaactaatctagaaagaataaaaaaaaaaatagaagaggcacaaaaattattaggacattcccatattcaaaacaagttactttgccttcttcagcagattcatggttctaaatgcagcatcatctcggacaaaactccaccaaatgtaagttagtgggactgtggtggcatgccatagcgcatgggcgtcaacatatccttcatatggaggaaaatcacagattttcagaagcattgatagaccacctgccaccaccaccagccacaacttccaccgagatggatggcgagtgacacggccaaaaattgcccaaataagtagctgcagcacgcccatgaagacacaaacaatcatattccaccctgcaagttgaacacgttttaagactcaatatttgaggatggttaaaagcattaactttaaatatacagcatttcatactagctctgaaactcaaaggcattgaatacaaatattttgaagaagatataaggaattagagctcttctctcctcaaatataaatccaattcacaagaaagttactgcctctgtccacaatgaaaagctctttagcagagtcacttgtaattcttgagtacgtctatgag

SEQ ID NO: 394778 - DNA, 1405 bp, Cannabis indica
aaaataacatctaaataacaacaaaaaataacatacatgtaacaaaaaatcaacaacaaattaacatgaatataacataaaaagaccgtattttctgtaaataaaatcaaaaaattcataaaaatatttaaaattctgtgaaaccgtatttttgtatttttttttttttttgttatttgtgaaattatccctttaaattaagccaatttttatcctttttttattctatttaaactctaaatctaaccctaaagtcaccatataaatagaatatgacagttcttatttttataatactattgactcactttgttaggcaaaatagaaaataaaaggagctctcataatttcaaaatctcgtcttctacttcttgttaattttgaatcacttgagtgattgagtaattgcccatacatgtcaaggcaaaactcaagatagtgtgcaagactatgtagtctttttgttacctaaaggagaattcaggttcagatcttgatcatactctacaattaaaaggaacaagggttagagatccgaacggaaggagccatattattatgttaccatcaatgtaaggttttatatacctttatgtgtttaattcattatttttaagaaattcatatttaggatggtagactatagaattattatccaacatacatgttagtaaatttagatcttggtaaaatatttccaacataaataggacgttgacgatgcctcagtggaaacccacctgccctaggttgagtcccaggtcgcctcctattctcatttctgtgagaaggcttcggttgatcatttggttgttcatttttagggggaccctcagtttcctcaggttgttcttcttgagccgtctcttgcctcctggttcgtgagtcgcgaggcctacctcgtggtctactcactcctagatcaagttagttttgtgcattgttttcctgtgccaccctggctgcggctgcctcctattccaacttagcatttttttcagtttgcctctcccaggcgtcgcctgaggtgacgattttccaacttggcaatcggtacgtatcgcgtgggatcatatgcaccatcattcatgggttgagcaccaccaacacttatgttgggttcttcatttcctatttatgggttttggccaccttcacgttgagtccttcttgaacgtgtgggctgtgtattttggccaccttcatgatgttaggtccttcttgaatgcgtggaccgtgtagatcgtgaattgggaggcctccgtgagcccattggttcttttctaagatggtgagtagtctcctcaggatgagtatcaacattttctccgttatcagccatggagaaagatttttcttttagtttaggaggttttttctgagcttttttcacgtaagctctcaa

SEQ ID NO: 394779 - DNA, 913 bp, Cannabis indica
aaatatcactcaaacttttcagggcacagtacttattcctttccaatataccaagccaccaaaacttagataatattctatcaagttcactgcagagagtctgaggtacaaggaccattgacataaagtaatttagtatactttggacaattgaaccaatcaaaacagatcgccctacttgagccaaatggcgagccttccatccttcaagtctacccagaattttctccgtcaggaattggtaatcctcttttttgttagctgtgaagaagaaaggatttccaaggtatttttccttcagatttaagcaatttattcccattcttccttcgatatcctcacgacatctccgagaggtatttggcgagaaaatcagaccactcttttgcttattaaccctctgtccagaccagccctcatacttttggatacaattcatcatgttgtccacattcacaactgtggcttggcaaaagaagatggagtcatcagcataaaataagtgagatatatgtgttgcattcctagcaacacaaacaccagtaatctccccgtttctttcagctcttacaacaagcttggacaagacttcactacacagaatgaaaataaagggagctaacggagctccattaagcatgacagagaaactaaccatcgtaatacattgcataatcacgttgcaaacctttggactaaacccatttgcttgaagaacctgtcgaataaagtctcacagaagcagtaaccttgtcttcaaacagagtgttaaactcgctttcaatattgctcccttccgattcgaaaatctcacagaagtgtttattgaaatagttcctaatatcttcaccgctgagccaaactctaggtttctcttccacacttccagtgaagtttctgttggaattatttt

SEQ ID NO: 394780 - DNA, 1000 bp, Cannabis indica
acaagaaagagaaaataaagaagaagaagaagaagaagaagaagaagaagaaggatggcctttcttctcccagaataatgggccataagaagagaaagaagctggctttagccataagctatggtgagagcaaatgttcatttttgggacgagtcagtactcagtagacaccacacacctcaaaattaaacgatatagcactacagtactttattagatttggaaaaaaaaaaaaaaaggttttgtactggacaaaactatattgtgaaaatatatgggataatgttgtggataatataacgcgtcaataataatgacacatttccaacttacaagactcaatgttttgtactcgtagagatataaattccatgaattttactatttcaaaactataatatactttaacaataaatgtaaaacactcaaagaagaaaataaaatatttttattttatttttttagaagaattgatgacacataaggttattaggataaaaatttgacattatacgcttaaatgtggtatatgtgttaggatttataaaatacttaataaatatatataccacaaatctaaatatattcctaaaagtgctatattatagaaaaccctaaatcataagtctatagaatatttaccaaattaaagaagaagaagaagaagatgatgatgaaaggtaagcggaagcactaacctgaagccattgttagagattgcacagaaagttatgatcttccaagaatacactatcttttgaaaatattttctatgatgaggaatgagagaatacagaaaccttaggggctgtttggtatgcaggtttcatttcatgggaataaatttaacattgcttggttgacattggaatggaatgtgacaattatttttacaataatttttttttatatataaaatactaataattaatttttttttttcgttctaagtgttcaagataatttttatttattatttttcatataattttataaaaaa

SEQ ID NO: 394781 - DNA, 700 bp, Cannabis indica
tatattttaatatacaaaaaatataagaggtcttttttattttaaatttcaacaaaaatctatagaaattcttattacaactagagctgcaacaatttagaaacttaaaccataaattttttttttttaaaaaaaaaaacaaacagtattccccaaaatataattaaattagatttattttaattaagtttttgagaataacattcaataattaatttaatccaattaaaatctaatttttatcttccaatccaatcaaattgtaattagatattcaatttttcttaatttaattaaattagattcgttcagatgtttgcacccatagtatcattaacatgttaaaatccaatcttgattgtcaaaaactaatgtcttacttaatatcattggggtgttctgtggtaacagaagaagcagcaaatcccatcccctaagttaatcgacaacattagcttcaggtctgcaattgacattttccacaacgctaaggcagtgcgcctccgcagccaccacgataagtttctactcgccgatgaagatgaggaatcggtgatccaaggtcgaaacggatcctccaagaacgcccgatggactatcgagttcgtaactggatccgactccgttatccgacttaagagcaactacaacaagtacctcaccgcatccaaccatcctttcttgcttggtatgaccggtc

SEQ ID NO: 394782 - DNA, 1151 bp, Cannabis indica
tatatttagtatgtataatcatttaatttatttttaattcttttcttttatttaatactcttcagctcgtcatagtatacatttttcagttaatagtaatttatgattaatttcatttttaatttaatgtaatgcttattttaataatttaattaaattatataatcttactctatagtcttatccaatatttaaaatatctttcttattatttttttggtagataaaaatctttcttataaggtttttttttttcttccttaaaaggaagactttaatccaaaacaaaagtttagaacagattatatagcaacaagggtaataaactccttcaagttaggaaaaccagaaaccacaattcaaccttgcccaatttaaaggtcaaggacaagctgtcatttatgagtttgcccaattcaatctttcttataatttatgagctttttagtgctgtaatttaaaggttaaggacaagctgtcatttttaataactattaataaataaaaaaggtaatttagctaattgagatcttttttaagtatgtagaccaaaggtaattaacttatttgatatgtattgtcttaatgggaataggttcaaattttcagttgtggaaattacatacaaagaactatattttttcataagaattaccataataagatgtactattttattatttgtattaattgtaataattgaattcaaatataccacattttataaaacattggtattgttttaattttttgatttataaattattggtattttttttttgaatttatttttgataacctttttttttattgttgaatatttattcttgtattgagattttataaacgtgcattggtttatgatagtgaagttacatatgctaatccaattttattacttatgttttctatttataaatgttgatatggactgttgatattattgttgtatttaaccgtaattcttgttttctttttataatttcattacttatttcttttttagtattagattttcttgttttgtatttttaattattctcatttattgccttgatttttatgctatcatgtgggcttgttttgtgttattttgttggctatttggtgtcttttgggctagttagtgtaattttgttggctcatttttt

SEQ ID NO: 394783 - DNA, 762 bp, Cannabis indica
atcatttgatcatgttaaaatttaactctcaattttataactatacaacaaaaaaactaacacactaaaaatttaaagatcttatgtttagagatgtgagttcaaacatttaagtaaaaaaatgaatttttgttattaaacacaaatacataaacaacagaaaataactaacaactcgtaagacaatagttacccttttcacaagattatttttattggacactagtggtatgcaacactttttataagtaacgccttgtgattagttagtgatgttttctaaaagctattttcttaagttaaagacctgacatttaattataccaacaacgagaaaagtgctaaacaccagtgatatctttatgaattctttttttacaaaaaagtctcaagttcaaatgtacatatatttatatatacatatacaagttattgtcgcctttcttgatggttacagtcatagatcaactagtgtgcttaattggtataaataatttgtattttatagcttaaatgtataatatttgtaacattgtgtgtattctatcttaaaattaggaaaaataaacaatatatataaatacattattacctgtctcattgaacactaaccgatttccagcattggaagagttattactcccttcataagtatcactagcataataaggctcattagcatgctcagtaggcaaattcacagaaaccaacaccaattcccatcttgttgcaacctcaactcaaatctccctttcgaaaaca

SEQ ID NO: 394784 - DNA, 671 bp, Cannabis indica
tttgtgaattgttaatcttgtcatattgctaattgttttgttgatttaattctacacattagttataattttcccacaatattaaaaaatagatatatatttaaatgtcaatatttgtaacattattgtacatttttgttgtcaaattatatataaaaaatatttctttaggcattgactttgttcaaatttatttgaatactcaggaatatttttatattaccttcaataatggataatattttaaaatcaaacataaaattaagataattttgtatattagtttataaaattactaaaacattttgatagtaactatatcaacaatgtgtaaatagttatatgtgtaaatttttagagtaaaatgatatattttcttcattctagctatagcaaatttaaaattaagcgtaggtcataactatttggttactatatatgtgcttctgtacagtaaagttttgttactctatattttgacatcttgtattttaaatggtatttgatacattaaataaaattaaaataatcagtctactctcaatatataagttccaaatttaaatttaattactatctaagcactacaacaaacaccattaataggggcggaacagtccgctggtaataatgctaaaatccactggtaatatataatatatacaataaat

SEQ ID NO: 394785 - DNA, 1846 bp, Cannabis indica
aaagttgctcgaaaagttatgcgatacttttccctaactctaagattgaagaggttatacaattcaagacactagaccgaggacatgcggaggcatcactctaagagaccaaaagaggatggtgtgtttaggcaccctgcggatgcagaggagtggaagcagtttgacaggcgccacccatctttcgcacttgaacccataaatgtgaggttgggtttggccactgatggattccatctgtttggtaacatgagtaactcttacagtatgtggcctattatcttagtcctatataacttacccctttggaagtgcatgaaagcagagtcgttgatgttgtctctatttattccagggcgcactgtgcctggaaataacatggatattttcatgagaccattgattgatgaatggaaagagttatgggagtcaggtgtccaagctcaagatgcttacaacgggactgtgtttacaatgcgtgttgctaatttgtggaccattaatgacttcccagcgtatgctttgatgtctggttggagcacaaaagggtacaaggcctgccccacttgtaacaaacacaccccttctattggattgcacaacaagattggttatgttgggcatagaaaatttcttgaaatggacgacccaaggcaaagaagtaaaaaatacgctggaaaaattgagaaaagaccaccttcttcagaattgtcagggtcgatgttttagctcagctggagcagatacaatttcgtttgcctgaaaaatactaaaaatttggtggagtcaagcataaacgttatgtagttgagctaaatttgtcaaagaagagtatattctttgaacttgagtattagaaggacctgtctctcagacataatctcgacgtaatgcatatcaagaaaaatatgtgcgctaatgtacttgggactcttttaagtatcgagggcaagtgtaaggataccgacaaagcaagacttaatttggaagacctcaaaatacatcgtgagttgtggttgtatgaagaccacaatgagaattggaagaaactgtctgctacttaaacgcttagtcttcctaaacgacgtaaattttacatatttatcaagtttgtgcagttcccaaaaggatttgcttcaaatttagagaagaatgtgaatgagagtgaagacaagatttctggcctaaagtctcacgactgccatgtgctgttacaacgcttgatgccgggggcattcaaaaatttttgaagaaagaaattcaaaatacaataattgaactatgtgtgtttttctatgctcaaagacattgaatgttaaagacttgtagagcatgcaaaaaagcattttggacattctttgtaaattagaaaccattttccattgatatttttgacataattgttcaattggtgatgcatttacctaaagaagtgatacttgggggaccagtgcactataggtggatgtatccaattgaacaagccatatccatgtacaaacaatatgtacaaagttgattttgactagaaggatctatttgtgaagcttatgtagtaaacattaagcttttgttccatgtacttttgggaagttgaaactcggtttaaccgactagatcaaaatagtgatgtccttccaaataagcctaaaagggaattctctgtattcaagcatgttgagcgacccatcggtaagagggccatcgtttctttaccaatgcaagaaaagcttaaggcagagtggtgaacaattgtaatgaagtggagatgtatatcaagtaagatactttttgcattcttaatttagttttcttcactcacaaccttctcttacaaaaatctatt

SEQ ID NO: 394786 - DNA, 870 bp, Cannabis indica
cctaaaacttacactctctttggattgtcaatactataaaaataaataatctcttttatctcactcaaatgtcacactcaccaaccctcatttgcctttcctcacctttcaaaattatccccttaattaattacgatgttaaataatacaaatatatcatttacaacacattttaatgcaatgtcgcaatgtcaaaagtgatcgggattcaggataaaaacctactattaccaaaacttagcatttacacactttgtattatgaattaatttaaaacacataaaccaacaattaaaatgtatttctaagttaatactagattatacttagttactttacatgcttttattattgaaagcactacacataaacatataggccaatcttaatagattatattttacaaaaagatgtatgataataaactatgtgggattttcatgtatgcaatattattcattaatacataattatgttattaatcaactaaaaaacaaattacactttgcgtgtggttatatttattttggtaacattttatataatttatttttaataatagcacaactattctacatagttttcgttattaatatgttaaacctataattttctaattattttaaacttaataaataataacttttaattaacttatttattataaatatgtatcactaatattattaaatttttagttttcaaaattatatgaataaattaaattagaatctatctatctatatatctatactagtatattgttacgtgcgatacacgtatgctatgttttatattaagtattatattatgagttcggaaggaaataaatgaataaaaaataaataatatttaatttagagagatttg

SEQ ID NO: 394787 - DNA, 836 bp, Cannabis indica
attacctctcccagatgctctatctaatgtcttttggatgcataccatgctagatggatatcttggctaaatgagtcttctactcatcatccagacgaactaactttgcttatgggtccgattatatatctcatttgggcctacaagcgggcctaaaataattatactgtattcgttattggaattccatgtgcctccatccagaaacacagataacatttaccaccaagcttttagaactctaggggatgcggaagcttgcattcttcctcgcggatggacaggtgaaggctaaaagtgaaaacctttaagatatccatgttgatcttgttttgtgattgatagctctcaactttttaaaatagaacaacaaatgacattttatcattggttcgttgaggtgactttcaccgatgagacatgtgatgtgaagcttggtgaaatggcaattgataacatcagtgcgagtatcgacaagaatatcatcattagaaattttttgattcaaaactttgcatcaaatgctcgacaatcaattttcccagactgttggatatatcttgctttttgcttgagcataatcctagtcattgatctgggaatacgaagatcatcatttgtgtgtataaatatggcacaaacatgcatgttcaccactgttacccaaatttcaaactgttgggctttgtgccctaaataaaactctatttcaatgtaatcttttctattcaattatcaataaagaaacagatttaatttcattaattgtttaatgtgttatttggttcatgtgatcatttatttacttatttgattaataaattcatccaaatcct

SEQ ID NO: 394788 - DNA, 717 bp, Cannabis indica
actatttttgtaaaaatatgtgtcacagtaaaaataataaaataaaattatacagtatagggtgtaaatttttcatttttaattcagcctatttattctaaaacctaatcctagtatctccttataaattaaacataatgatatttgattctaagactcatgactctctcttgtctaacaaactgtatcaaaagaaaggcaattaattttatttattttttcaaaaattctcttgattttttttcacaaaaattcatgctccttagtgttgagagattccctcacaattcaaggtaatactgagaatagtgagaaaaattatgtagtctatttgttgtcagaaagagaattcaagttcagatcttgattatactctgctacaaataggaatcaagagttagagatctaaacagaaggagtcatatattccgatgcaaccatagtaaagttttctataacacgtgtatttattttgttatttcaggaattcacgttatacatgaatagtcaataagatcctagtaaaacaagtttccaacatcatgaactcctatctatgttattagtttctttgattcactcgttaaagtttctcagagaagatgattcttacaacttctgttttgggaatctaataatatggatgactgggaacatgatctacaatcatagaatcttgactttcttaatggactgactgtaggttccctttaaatg

SEQ ID NO: 394789 - DNA, 1730 bp, Cannabis indica
gcttatgatacgtatactatacagtatttaaaattaaaataaattaataaaaaaatataacggaataaataaaaaataattagaatcaatatttgtaatatgttatttactaaatctttttggaaatagaatagttatgatttatcttgtttattttattaagaaacgtaatccgaatacttaaattgattaaattacccttttaagttaaactatattatatggtatttattttgtaagatatattttaaaggataaaattatcattatatatttaatattttttaataaaataaaaataattaaaacttattacttttaatggcattccttataaaattaatagtaaaaattctccatttctctcatatttaattaaattcttcttttcttaattttaataatataataaataaatataaagaaatattaccattaatttttattacttattaagcatgttagtttaaatgatgtattgagaagttcgtgtgtaacacgtcattagagttttgtatataatgaaaggaaagaaaataggtacatgtataatatgatcaggtgggtttttttttgtgtttgatgttaataattaatcaaaataataataataaatgaaaaattgagacgataaaattcaaaaggaataagacccctaccctcaccccaatttattattgtatttaagtaatgagactccatttcttgtgtaaattccaagttccaactccactcgccggttgagcctctgttctaaattttttattcatttatttactttcatcaaacatttaataacttttcactgtaccaattcaatttcaaattttctttcattatttttttttattatgaataatgattaagatacacttaaattacacacattattatatttgataattaagtgtgtgcaattacagtgtttgtttgtctaacacagaaaatatgcattgatttccaggtaaattgaacgcaacttaatataatattagtccataatgataatattactgttggagaaatttggtaacaatttgaaaagtattcaaaactttagttttacctcaactttaaaattaaactaggtctgttgattaacgttgatgctgcactttttcatcatgagaactcatatgggttcggtatagttgcaagggatcatatgggcaaccttttggaagcaaagacaagctacaaggcaggttcttactcacctgaagttgtggaagcactgggaatcaaagaagctcttagctggattaagagtacaaaccggcacaacgtagagcttgagacagatagccttatcactgtccaagcaatccgaagcgggcagagaatgtccatccatttttggattggttatttaggattgttgtcatttactgtcttctttacctagtgttaaaataagatttattaaacgatcagccaatcgagttgctcatgctattgctaggcatgctcgattttcctctggttgtagcattttcgttcataatgcttgggccgatataaaggctctcttgtattcagaatgctattaattcaatgaagttgctatttcatttcaaaaaaaaaaaactaggtctgttgaaccgtgaaataaaaaattttttttataataataataagggatcattacgacaaaagtctctaaaaacttaaggttgatgcagattagtccttaacctcgaaaattggcgataatagtcctcaaagtcgcg

SEQ ID NO: 394790 - DNA, 1442 bp, Cannabis indica
cagctgatccagatgacagaggaccacatctcggttttgccattttcttggtcgaaatctcatcagctggcactgtaaaaacaacatacagtctaaagatcaagtactgaagctgaatatcgatctttggctaatgtcgtggctgaaattaaatggctggacaacctgtctctgagttaaaaatactatgcctcgaacaccgactgtgtggtgtgacaacatgagtaccattctgctcacagccaacccggttctgcatgcaagaaaaaagcacatagaacttgacctttactttgtcagagaaaaggtgcaagagtgcatcatattccagcagtagaacaaatagttgatggtcttacaaaagcaatttcaagtcagaggtttcgtactttcagagccaaacttacaattgaggatgcctcaattctaagtttgaggaggattgttaagataactgaagttagttaaattctgtttggcagttaagtggtggttagctgtctttgtttgactttgttagagagtctgttagagtttgttacttaattctgttattgactctcttcctttctctcagtctctttgtataaatagttgtacagctccattacaatcaatgagattactctttctctctctttctcatgtccttctctgtctttcaaatctttctctgctttcttcctttcttgttgatactcttcaatggccaagaagtttaacacacacaatatatttaaatatagtagaaaaattcgtaacaactaaaaaagacaactgatatatctttggtttactgatcatatatctataataatatataaataatagtatttaataaataataaataactttttattgtcatttaaacttaacaagtttattcatgaaatattctagtaattatatataattattataataatattattttagatgtttcgaggtttgtgaatattattatataatttattaaatattatttttataaatattattatgtattaatgttaaaaaaaattattttataatacattcttattaattacggtataatctctctctttgtaataggtttacaaaatggctaagagaatatagctacagtaaaatactattatgtctataaaaattattactttgaggtttaattttaacaatgttaaaaattatgaagttaaaaaataactttgtcatatatgagcatgacaatatcatattaaaagtgaaaggtcaaatccactaattgttctaatcttttttttttgataatgaaatagcaacttcattgaaatattagtattcagagtacataagagtttcaagatcaggccatacattatacttaaatatactacgacgagagagaaagtgagagtaccttgcaacaacatgggcaactcgatttgctgatcgtctaataaaatgtaaactcacaaaa

SEQ ID NO: 394791 - DNA, 1346 bp, Cannabis indica
aataggaatgaaattagtaatttcatattaccgaatggagttttgggttcagtcgcggactagagcctttcttttaagacatttgtagcactgctcaagattgtacaagatggcatagaaaaatcatgccatccttaggataaaattctgtctcgaactgccactctacagtagacgagatacaaaaaccaaaatatattaataccactgatggtagatcgaaaatcgttttatagaaatctatttctgtttatataagagatgtgtttctcttgttagttcatgagttgcactacatactgaatagacttagaaaaaataaatgggaaaaaatacattttaatcgaacatgtcattaaaacactacaagaaatgtcacatttgtcagcacatttttgtgctgacaaaagtttggattgcgctggtaaaatgaaatttactctgatgtgttggaaaaaggagttggcgaaccaacgttggattagaacttttgccagcacaaaatcaaaagcgatagcaaaaatgatttttcccggcgcgtaaatacgcgagggtaaaagttagattttagccactgcaaatgtgcgctagtaaaactttgacttttttgccaacgtaatttgcaaaatggattggtaaaagttacttttaccagcgcagtagtgaactgtgctggtaaaagtgacatttcttgtagtgaattgataataagactatgtaatggtaattagtttaattaaacacgttttcataatttaaataaataaataaaataataataataatttttttgtaaacttgaatcgaacggacaacaaagctcatgtgatgagtcaaggatgtgtcttgaccaattcacacaactgagtacccgttgggaccccaatccaagggctaaagtttctctttatatataccttgtaaataaaggctcatattgatgagtgacagctatctacataccacatactaaaatatacttttttttttttgaaaattcactaaccttttaaaaagtttgaacaagaacaaaagaaaaacttaacttttaagttgacccattcaagcacgtggtatgatatcatcaccaagacataatacaagtataatatagttctcccctataagtattattagggacaagaaaaacaatcatccctaattaaagggtacaaaagctcccatcattttctaatttttacttttagggttgaaaaatatgcaagttagaattttaagaaactcaatttaggtcaaacttgagaaagtttgtatattttttttttttgaaaaatcggagtcatggatggtcgagatagggtgtgtaccaggggttttgcgacgtg

SEQ ID NO: 394792 - DNA, 847 bp, Cannabis indica
tttaaagaatgataattcaaattataaccgacgaattaaatattatatacttggggactaatccagctcaatcaatgatactggtggtgggccggggcgataatgaataaattagaaaaattattattttattttatttattttaaaattatattttatacttattttattttatttattttaatttttacatcatattttatattttttaaaatatattcacttttatagataatatttatatattgggcaatttactacaaaaaaaaatataattttaaaaaaaaatatattttaataaaatataatataaaagtatttttaagtaataaatataaaaaaaaagtatttatcaatttatctcaaataaattttacttgacccacttcaaatttttggcttaatttctataagttatttttttagtttttttaattaaaagaggggaatttataaaacatattagaatttggcttaacttttataaaaatattgccatacaaatttttttcttaaaaatacactatcttttttataatacaatagtagaatacaaaacagaaacaattaaaaaaacaatagtgaaacaacagggaaaacttaatacagtacacatttaaaaaaaaaatccaccttataataataataaaaaaagagtaaaaaatttcagtatgtaatatggaaaactcaattaaaaaagtttttgtgtttggataaaaaatagggtaaataccattttggaccttgtgttttgtaaagttactaattggacattctattttgttaaataacaaaataaaccatgtattttctaaaatagtacaaatcggaccctgaattaattttt

SEQ ID NO: 394793 - DNA, 1010 bp, Cannabis indica
aaactacactgatttattcggttaacctgctgttaggtactgaaaaggagagaatatgatacatagaaagtcatcgcgtcaaccagaaatttaaagagctgtttggatgataccaaaatagattataatattaattaatttatctcaccctatttaagtaagatactcttaattaacacacagctgaacaggaacatgtttagttttttatttaattaattaaaaactgtttttaataattgcaagcaaccaaacaaagcgcagtttaaataataataataataaaataaaaaaaaaaaataagtattagaaagttatacttacctgaagtggagagatgtgagcattgaagaactgatcggcggtgagataatcctgattaagtttggtacagacatcggaatcagccaaacacgccctaatttttccccaattggcggagctggtgactcggtccctgagccaatcggagaagccgtcgaggcggtattctttgtaataacgaccggggacttggtagctgccgtcgcggcgcgtgacgacaaaggcgaagacgaggagaatgaggaggagagctatgaggatggccatacagaagaggtaaaaggcgaggagaccttgcttgttccagcaagcgccgacgaagccggcgagggagacgaggaggatgaggacgccgaggatgaccaccggccaccggaaggcgtggatgcactcgttgtcgggcttggatgctagccatgtcccggctgcgattatgggtatggaacagagaaaggcgatgaagttgagtacagcggttatgttgttgctcactcccatggtcgaaggagagaaaaaaaaagtgaagagagtggtaggtaatggtggtgagtggtgactaagaagagaagaagtttgtgtgctgtgacttttttatcttttatataagaactcgttttaaaacttctattattattagaataattagcttttttagtccctgtacttatgactctaatctaatgatg

SEQ ID NO: 394794 - DNA, 978 bp, Cannabis indica
tttttgaacacgcgtgataaacttaaatatcttaaattctgtttttactactataaactattcagaatttttttaaaaaaataaaaggaataatattgtatctataacgaatattattttgaaaaaaaaaattgaaaaaattatattggcatgtgattccgagcgtggagattgactattagtccccattagattattatcagtgaggttggaatatacactgtatacagttaattgacacaaagcaaccaaagtggtttttggtctattcctgtcctgcttaatgaaatatggctatcatttaaagattattcatcactaaattacctatcaattagggaatagggatatgtttaaggcaaattgctttttgtcaaatccatcaataatatgtatatcttgatttgtgtgggtgtgcctctttcggttctttacttctcttttttcagttgcagattcctaattataattattccattgttctttcaaactttacacaatcttcaattttggtgttaattccaatagctaagctagctatagtttatttatttttttcctcaatgttagagagctatggaattaattttagaacaattagtcatttatctattttgatgaaatagaaaatattagagcatctctaaataagtggtgtaaagttaaaatatagtttatttaataaaaaaaatgtgctccaatggtgtgtcaaaaaattatgtaaatttgacacatagtaaattttgtgttaaatttggcacaacatttattgtgatgtaaaatttatatcacaataaatgcactatttcttttatttacattaatatcgatcatttgtattattttattagtataattaattatagcattaaattatgaagcatttatattattattttattttcttacatattaaaataataataaaattaataataaagttaggggctatttcattttacacttcaaaacagtttt

SEQ ID NO: 394795 - DNA, 963 bp, Cannabis indica
accaacactttaattagtgtttattaggacaaaaacattggacaagagagttggaaacgtgctcaataaattcatgtatgtttatggacgttattttaaaattagctccagatgaaggagaacaactataaaacaacgcattatcaaccataaaacaattctttccagataactcaatattgagtttttgtaactcctctccgagttgaatctttctccaatattccaacacctatttaaatgatataaatgagtattgtaacagtttctaacagttagaaacttatcccattgattttataacttttatatgtaataactcacttaattacatataatcatatgtgatccttaggttaaaaaattattttcagattttgtaactactcttatgctaccaatcatgtgtattattaaacaatatattatataatttaatcactaaatacattaatcccatattaatatataatatataacatttaaatattttaatctatattatattatagcaaataatattacatttctcctctagattaaaatttgtgatacactattgcaacattattcaatcaattaaacatcacatatatctcccactttgattaaataaatcaaaaactttttagaaatcttgcttagatgcattatcacgatccgaattctaggcagtggcagatatgtaatattcataactcgggtggtcaaatgtcacactttgatccttgaggaagataatacttatatatgatcctttaatttatattacaaaatacttatttaaaaataatagattaactcctatgtctataagaaaatactagtaacaaaatcatgatcacttatcagtataaaagaacaataatatcctcatagttatgtagtcaccgaatagatagatttaatgagtcaataaaatatcaaaataatatctacaatccatcatttctcatttctaac

SEQ ID NO: 394796 - DNA, 617 bp, Cannabis indica
tgaggagagtgtattagaattagtcacattgctaatgtgtggtaataaaaaatcatatataagatgaatggactacttatttcattaccaatcgattttgagatggaacccatgtccttgttatacaatcctaaactctaacaaataggaaccggcccaactcaaaaaagaacttgagttgagagtagaggaggaagaactcccagaagtcagaacaaagctaggaagaaatagaagaaaaaagtattaaagaagtgggaaaaattgtcatcatcaaagcaacaacttgggaagactctcccaatttccaccttgaggaccaaggtgaaaatttggcagggggagaatgatacgcccacaattatatatacttatactaaaatgaataactacgtgtcctggtggaacggtagtatttgttctaatcatttataactcctatgtgtcctagttagtatttgtcaatacgggttctataaataggattagctttggggaagttgtaacgtccccgcttcaagcctccgttgggcccttacacccacggactaatggctcttatacacgagtacgccactctggttgcttcttggattgatgactgaccctacagacca

SEQ ID NO: 394797 - DNA, 590 bp, Cannabis indica
ggaataataatgaatgaaaaagaagagttaggaagattgtgatgatagaggaagttacacttggatggtcaaatgaaaactctttggtcattgatgagagcgacttgagcttacattaccttttcaagctaaccccaccactctctacttttctttaagtaatcttcttatatatatatatatatatacatataattgtgtgtgtatatatcatgtgtatgtgtgtggagatcattttggagacctacccttttaccctaaaccatgggctcatatttattggatatccttatcaaattccaaatacatatatgtatatatatttatatatggaagaggtttcaatggttacatttttattgtaaccatcatggttacatttttttaagccattggattactattaaatggttgtgattaatttggaaattaaataaaaataaattataaataacttgtaacctgaaagtaacctaatcatttatttccttataaaactttaattaagattaattatattttaaaattaaattatttataattattaattaattttttgcaatttaatactatataaggatcttttagca

SEQ ID NO: 394798 - DNA, 1000 bp, Cannabis indica
atccatcgataagtactgagactattttatatttaggttataattataaattatactgacgcatatattattaatttgtaaaaagaaaaggaaaaaaaaaaaaagaaaagaatcaaagtcttaaaatatattgttcctacatatttggaagtgccatattaataaagaaccttctacatcaagtttaagattttggtagtaacaattattattattagtctaattaattagatatggagactaagaaaagttatttttaacaagtactataatataaatatttatatatatatatatataagaaagattgtatatagaacattggtctcttatatccatatatagattaagaattgtacccctatagaatagaatacaattattaataaaattaaagacattagtttatatgatacaaattatatatacatatatttacgttttatatctcataaaagttagcaaccaaatgatagtttttgttccgttataaatttcaataagatatgtgtaaataaatatatatatatatatatatatatatattgatatacacgttcatgatcatataaataaagcctggaactatactaaattaattaatcctatattaatatagttaataatcggataaaggaaaccaaatgattatatagtcgaaaattcccactgccaagatctcatagcggcctaaacacaatatagtgtttcttctattttaagtagtattagtatatgcattaaatagaaaaaaaaatcatatatacaacaaacttgtgatagaaaaaggtacaaaaaatgggtctttttcttactaataatagttatttgagcagtcgatatataatatttatatatatatatatatatatattatacataatactcaagatcgtactgtgtaataaactggcaacttacacacacaaacacacccaataattatatattaatgttgggatcgagtatacaataagaagaaatgaaaaaaaaaaaaaaa

SEQ ID NO: 394799 - DNA, 642 bp, Cannabis indica
caaaaaaaaaaaaaaaaaaaaaaaaatacatgaaaaaatgttaaaaaaatatgaagaaaatatacatattcttatatatataactggttaccttaaggagatatttttttcgaataaaaggcatttttagattaatatcacaaaattaggagaaataatcattacataaaatattatctggtataacagaaaaatcgatcataccaattacattcttggcgaaagccctcttaactacattatagaaaataaataaaaaaattacgacttaacaaaaaattagagagatatttacgttgaaacacatagttaccaatacctcaactggaataagtttccttcagcgtattgataatcgtctcaaagtcactcttaatcaacacaaaagtatgcttcaaatagaccgctgattccaagactagtaaataggccgtaacttctctaattagaaagtcggagaagttaagcatgttggtagtttttagttgggtagcataaaggaaagtagttaatttaatttacttttcttatatttttagggagtaacttgcggtataacctccttaagtggtcaaatttttgcaacccccaaaaccccctaaactcgtgttctattagcaatttaatattttcatccatttt

SEQ ID NO: 394800 - DNA, 645 bp, Cannabis indica
tttttttttttttttttctgtagtagtaattgtaaagggttagtagtgtgagaagagatctttttatttagagttagagagagaatgataggggttactcggggtaggagacaaggagggaagagtttaggacacgtggcgtgatgtaattggattttgggaacctgtgagtggtggtgggaccctcgccgcatttattgggtgagtttggaggagagagaaagaaagaagggataagagaaaagagagtgatgtcttttgacttggtatggtatggaagaactatttgatgactagttaatctttttaattaattttttgaaaaattgaacgaagttgattttaaatgaataatttaaatatacttaattctagttaattatatttataccggttataatgtggttaaatgggtatttgcgtagtgttatattttgatataatattttaattgattaaataaatattacaagagtgtcaatacacattttaatctagtggggattgttatattatttttaggctaattagtaatttttctcctcgaactttgacatgtactaaatcgtgttctctgaacttttctggccgttagaaattctccccgaactattgagattattaaatttaaggacttttgtctaa

SEQ ID NO: 394801 - DNA, 979 bp, Cannabis indica
tatatatatatattcacttttttgtgttattagttttctgttttgtttaaaactgttttcttacaacttggtctgttatgtgaagtactattggttctgaaagctttttctttctttctctttctttctagaatagttcgggatggagggagaagtttgatttaggagccaaaatataagtattttttagggggctaaaattttttttttaaatgtaggaattaaaattttagactggaaaataattaatcacattttctattttgtgaaataacaaatcaaagtttgtattttctattctaaaatagtataaaataaaatctgagctcaattttcgtcattttttttatcataaccaacgaaacgagtttctagtacgaacagataccaaaaaaaaaaatctaatcagtttggtcataggcacctccaggcgagattattgtaaagttttattttgatgcaaattaagttcaagatactattttgtactattttaaaaattacgtcttttctcatttaacaaaatagaaagtctgatcgataagttttacaaaacacggagttcagaataaaatacattttaagaaatgaaaatacggctactatgttttgtgcaattatctattgggatattatattttagagtttttggcgactaaagcctcttaactataattccatttgcacttagccctctatactcaaattttggcggtaaaaccttccaaactataaaattgttagcaaatttaaggtgttatctatttacatagttaactgccaacataaattattgatgtgtacacatttatacatgtgatacatttatattggtacacctattattatttaaaagagttttttgcggctaaaccctttcaattatcatttcacttgtacttaaccctccaaactcaaattttagtggtaaaactctcaaaactaaagaaccattattaaatttaaggtgtcatctatt

SEQ ID NO: 394802 - DNA, 770 bp, Cannabis indica
atatttttttgattccaattccttttttctttgtttggaaggtaatcaacatgaaaatcctatatatacatattatatacattagatctaattaatgtataattgatccaccaaaataataaactcattattattcataggcgaagagccgaggagatttatgtttgatctttttttagggtttacaaaacaaatgacaactgattaaataataaaatatgataattaatttgaatttaatttatttatgagtagttttattttcacccacaaaatctctttttgaattaatttataaatttttttaaaatttttttactaaaaatctcttttcatatgtattagtttcgatagatatacatatgaagtttttggaagaaattttatcacaattcaaagttcaccaaaagtgagatttatttggcaaacgattttacattgtttccctataagatgaattttcgtggtaagaaaattcttattgacaagaataccctttctttccatatctttaaattgggatacccaaactcatactatcctcatgtacccgtactcgtacgctcatacaatataaaaacttgtgaagatactaaccaagtcgggtctgacccgtctattttacaggtgagttacaagtttaagggctcgtttggactgccgtattaggtcgtattgtattgtattgtattatattgaattgtattttatgcaatatttttatgtaaaactatgtgtggtaataacttttatggacacctaaatatata

SEQ ID NO: 394803 - DNA, 523 bp, Cannabis indica
gaagtagtttttcttaatgaaaggcttcttagatcactcttctagaattctaactttgtaccctggtttgttgagtgggcaatagcctttcaaatactttagaatgtggaaatcacatcctaagtatgacaactgcttaaaagatgtctggtctttgacaataaagggttccaaaatgtttcaggttactgctaaaatgaaacaattcaagagcaggcttaaggagataaacaggaagggcttttctgagctacagatagcagtcaacagggttaaaatggaattggatactttgtagagccaaattcagtagcatccacttgatcctaacttacatttagcaaaaaaaaaaaaaaaaaaaaaaaaaaaaaaaactaacattagacaagagaaggagacaagagagagataggtcgagagtaacaaatagactatgtctccttgtcaatagaagactaagtagctgtagttcaagatgggacgtgcgataatagtctcgtttcctatgctagtatctaagcga

SEQ ID NO: 394804 - DNA, 1271 bp, Cannabis indica
tttttaaaaaaaaaaatgaataacattcaacaggaaaagaaatgaaaagtcacgcgcgcaaacacaaatagcacatggagaattgttttcttcgcttaaatatcacatggacattgttgctaaatttaaatttatgtgccatgctagtaagtgcacaattcaataaataataatagtggttaagtgaccaatattatatcttaagtaattaaaataattaattatatcaaataataaaacctaatttattttatataagtaactaataatttttaatgattacattaaatgggtgattacatttatttttgttattgaattattattaaataatttgtgattaatttaaaaattaaataaaaataattaataaattacatctaacctactaacctcattttatttattttcttgtaaataaaaaataaaaatatttataaatattagttatgaaaaatatcttattaaatattttgattaaaaaattaatttattttaagtatatagttaattgtaattatttgagtctaaaaacaagatttttacctattagtgatctactataacagattatataaaaatatagtcaccatttttaataattcaataacagagtaaaataaaataagaacaaataaaaacaataaattaactagtaatttagtagagaaaaattaataataaaaaaattattaaagtttcaatttcactgtaatataaatacaaatttaaaatgtacttactttattctaatattttcaagaacataatacatcataaaaatatatatataagtgaccaattacatatatctctatacaattgttaaacctcacattcattcattaagtctcactccaaaaataatcctaaatattccatctgttgatttcacaatttaaaattactacgatacttagtaaatatttatctctcaatcttgcatcacctatgttaatctacccgatgtaattagattgtaaatttcacaattttaataataaccctaactataatcacataaagtaatatcatagatgcataatcatgacactactacaaaaaatattttttgtgtcggtcaacacgtctctctaaaatggttgaccgagaaaaaaaataagaggagattttttgcttgagtgtgtgattgaagctaaaaaataacgattagcgttgggttgtatcccgacgcaaaaattacaaccgaggtaaaatgtgacaatttaaacaattgtcttttacattttgcatcagtgcaaaattgaagc

SEQ ID NO: 394805 - DNA, 1002 bp, Cannabis indica
ccaaacagcccacaacacagccaagattgctgttctccactaacgagactgcacttactgtctcccaacttactcactatcatttggcatgacccattgaatttcaaattccaaaatcagcttaaaccatagattttgagcaaggctacagtttaggaacaagtgtgccacctcttccccactcttcttacaacaaacacaccaacccggtgataaataaaggaacagcctctttttttgcaacctctcatgaacattaattttgcctagagccaccagccacccaagaactttaactttcgatggaagtaagcttttccataaggtctttgtccaaaaatactcacctgaagtatgacctgatgtaaaccagccaaatgctgatttacacgaaaagaaaccccccgcaccaggtagccaaagcctgctgtcatctagaatggtaagcagtctgacatgttccaactgttgaagcagctccaataaacttggtatttctctgtccatcaagtttcttctaaactttagattccaacttcgcccacatcttcaattagctcctggatactctcatttttagctctagatatcacagctaagtccagaaatcggttcttcaaagatgattccccaatcccaacatcatcccaaaagcgaatactcgccccatttcctaccttgaacttcaccaacttccaatactcttcatagagacctgaaatatccttccaagtcctcttggggacaatctctcccctctttttgtatcccaaaaattgtctgcctgtccataacgacttttgataactttatgccatagtgaattaggttctaaagggaatcttcatagccatttcatgagcagcctcaagttcctcacatctaatcttccaatggcaagaccaccctcattttttggtctacacacattctcccatgccactaggtgatctccacccgctaagtcacccccttcctaaagaaagtctctcatcatttttt

SEQ ID NO: 394806 - DNA, 674 bp, Cannabis indica
attaagttagttaaattaagtattaacattaaaaatttaaatttatcttctattatttgttatgagatcaaaatctaaaaatttagtatttttaaaattttaaatttataattaaatatttttaataataatatccaatgaaaagtgtctctccttaaaaaaaaaacattaaaaaaaaccgaattactaatatgttaattacttgtacacaagtctagcttctttattagccaaataagactaggatattcaccgaaaaaaaaagtaggatgttttaaaccattttgggagggcttcctttgatacagatttgtacactatttttaaatgttagatcataatttgtctactgttcaattttttttaggggtctaggggtcaagtttaaaacacctattaaacacaattagttcatacttttaataataaaaaatcattaatattaaatatgtaatttaaaaaaattcagccacaaataaattctctcaaaaaatcttatagtcttccaccactatcgtgggtttatctaccattataattttaattgtcattgtcgctacttcaatattattgatgtttaaaaaatttgttaatttactattgttgtcatcgttacttattgattattgtttattattgcattctgtttgttgttgcgattatcgatggtgagt

SEQ ID NO: 394807 - DNA, 536 bp, Cannabis indica
aaaaaacaaaaaaacaaaaaaaagttagacaacaaattataaacagaaaagaaaatgaatatatacaatcggacccaccatcgtacctatattgtttcccaaattataaatagaatacaaaaaaaataatgaactatcggacaccaccaacgtaacctatcgtccctatattgtccaccaaattataaactaaaaacaaaagaaataatgaactatcaggcaccaccatcgttctttatcatccctaaatcgtcccccatattaaaaacagtaataaaaaaaataatgaactattagacaccacaatcataccctattgtccctatatcgtcccctaccaaataaacagaaaacaaaataaatagtagaatgtaatgaccgctttagtaatttgaattagaaaaggcaattagcactaatttttgttattttataattatttatgaattaattatttgtggaccccaatatttaaaaatgaatattagagttataatttctcaattgtggagattttattaaactctaggggtatt

SEQ ID NO: 394808 - DNA, 1031 bp, Cannabis indica
aaaatcccaatacaatactaatattcatgattctcacagatcacacagtataatatttgaaatttgtgggtttgccttctaagtgatagcataacataatgatgaggcttattcttatgaagttagcattttcatgcgtttactcaacaaagatgacttatttaatatttttaataacaagaggaaacttgatgattcttcacatgaaaaaaatttccagctatttgattgagacatagtgatcaattatataacttatattatggtttaaacattaataggaggaaatatatataaaataatttagagtgagaggttgacttgacttgacttgagtttatatatgaaaaatttaaaatttgaaaaaatgtattttttactttttactgtataaaatgtatttttataattttaaaactttataaaacttcctagcatatatataggctatatatggtagtattaatcaatgcacatgatcatatgctttcaattagttcttgttgtaacactatttttttatcaatccaaccacaaacaataattagttcagttttgtaatgttaagtgcccaaatattctcgatttgcttagcatgatgcccttaatttttttgagttgattgcaatggtggggtgatccgggatgtcggaggtgtggtctcggcgtgttggtcggtcagcattgagggtggtttctgggttgatgtgagcttttggcattgagggtcttttttgagccaagcaattggggtttaccatttctagagcagaggtggattctactattgtatgtaattgggtgaataatccaaagttaaatattgtctttaaactaattattgaggatgttatttctttattagttgtagttggtgaaggctcttcttatgctatttgggattatgggaatgacgtagttcacgcactaacaaagtctattactaattcttttggaggataaattcgtaacaaatgtttgttttcgtttcttttcaaaaaaaaaaatttgagaataatctttccaaattg

SEQ ID NO: 394809 - DNA, 1093 bp, Cannabis indica
ccctcgcactccataggaaaaggggaggatatttttaaaatgactctctcgagacaaaaaaagaacactatatactacttacataaaactctacaaaaattcctactaagcttcttcttattcaagaagaacgagaggaaaaaagagttttagtccattatatacaattcttctatatgaacaggggccgacctgaggtcagaggtgtgttggtcaagggtgttgttgaaagtgaaggcctacgcccctgtccaaacaaagaaaatgaagaaagtgaacgtgtgtggtcttaaagtcctcacagtacccatacgtctttataaaagctcagatctggccagccaactctttgaggagaaggtagaccgccagtatcctcaatccggagtcccccattgtccaataaggcatgaccacgcagaagcaacgaggtgtgagagatgttggggccaggtgaagaagctaagaccagttacgatgatgatgaataacttacgaagggttatcaaatataacaacctcatccagctcacgactttggtcccttaaacatgaatcccagcaccggtgttgcgctagggtcagatccattaccgacaactacttccactgccttttggctgagctgtgaagttgatcaaaaattgacattaggatcctataatgacgacacctgggagtttacctttagtatcaccaacatctgctaagtttctagacatgcttggttatggtgttgttggtaggaagtgtgttgttatggcaatcacttctggtgaaggttattgacaaggattcctgtcatttctatgtaactatcactattgaagttacatccaagaaagtaactcgagacaatataaaccagtcaagaaatatctatcagagtaacgcttactctgcttgtagtctgagtctttgccttgagaactactaggtaccttggggataccctgagtgacagactgcccaggaaatcctaggggaaactaagtcgtgcacgtctcctgaggctttccagagcgcgggaggcgcaggcacatggtttttcctatgtgaaagatcactcggggtatgacacgtcttcaaccct

SEQ ID NO: 394810 - DNA, 672 bp, Cannabis indica
gaaagaaaaaaaaaaaactcaaagaaattgttatgctacttgaagtttaatgtattcttacattttctgtcaatgcgttcacaaagttgttgattaattttttctctgcagtaggtgtcaagattattgtggttttttgtgcttttttcctgtttgtgtatgtccattgttgtatcaaatctcttaatgactccattagtgtagtgattggtagttctctagctgctaagtttgcttagtttagagattcagtaatgctagaagtcatagttgtatacatgctgtgtttgttatggtaacttgaccatttgtagtatccaacttattgtaaatagggtctaacacgcttgtccaagctgttaagctcactcatatggttaaaatttcttatctgtgtatgcttttgctactgtaaagaatagtttatcgagtttgcttgtattcttcttaaaggttgcttaataggtggtacacacagtagccatgagttatttctggaaatacattagaagctgccttaattatgctctcatgtatgtctgagatcaagcactattcttctctgaccccatatgcttcccttaattttgtaaaaaatcatcgccatgagttgttattttctgaatccacaataaaaaaagctagggggaaaatgtgtccatttgcatcttg

SEQ ID NO: 394811 - DNA, 510 bp, Cannabis indica
cttcacctcctatggaaaggtcccatgtgagcatacctctcaatgaccctctgatagctcatcctctcaagaggcaaagagaggatgactttgatgattgcgatgggtctagtactggcagtagtcggtacaattctaagaatcatcgagacccatgtgtgcctaaagcttccattccacctcatggatatggaggcaatgaatactaaccacctgcttagacatcgcaatcggttgaagacaatgaagaccaaccacttgctcaggcagagcaattagttgaagacgatgtagttcctccgtcgaagcaactaatggagatcccctaaaaggtcacacaagcaaagttagatagcttacacaaattggtgagataccttgctgacttgagaggttttgtagacaagagtctcaatagagttagactgtttccactctcaagaagggtcatgacatagatttcaccaggaaacagaaatatgtgagatgactgaatgccacaatcagtcg

SEQ ID NO: 394812 - DNA, 1300 bp, Cannabis indica
taaggatatattaggcaacccacccgtaaaagtgggtagatttcaaataaaatatgagggtatttttgattaatagatacaaaaaaaaatattcctcaacttatttcaaaaaaatttctattctaatcataacattaaaaattacactaaaattatatttttattattattatattatttcattaaattataaataaatacaaattatatacaaaaaaaaaaaagtttacttacaaatatattatttaaatattaaaaattaatttaaaaagagatttagtgtagtctataagtgtagttaaaataaattgaatataaaatctcatcaatattttaataaaattccgttggagttggccttacacctccaacaatttacatattatgtttgtaaaaaggaaaagtccacaaaaataaactacaccctaaaatttcttcaagaaaaaaaaaactagaccgtataatttattttagaaaaaaatatttcaacaaaaatatatacattttagttagtcaattttttttcaaggaattatcataaacaaacaaaaaaaaaataaagttattcaggtatttgtatgatggtaaagcttctccaaatttttaacaagaaataatttctaatctaaaaaggagttgtgatttttcttttagggtaaatactattttgaattttgtaatttacaaaaacttattaattgaaccttctattttgttaaatggcaaaatatatctaatattttccaaaataataaaaataaaacctgagtttaaaatagacaaataattcaattaataacttttgcataacaccaaattaaaaatggttatttactttttttttacttccatcatttatgaaaaactgttgttgttgttgttgttgttttttatttatgaatcacgggaacattatctgagaaaaaagtacttaataagagaataaaacactgtatatgcatttttcactcggaaaaaaaataaatataactactaatttatttattgttgaatatttagaaaaagtcgcgccaattgcgtgtattccctctcccttctcctcacgtttctataactgaaattaaaataaaaaataaaattttataaatttttttataattataagtggcgtttggtaacaattttgttttttaattttaaaaacagaaaaataaaagtaaattttttgtttttaaaaaacaaaaatgtgttctataactacttttgtttttaaattttaaaaacagaaaacaaaagtgtgttctgtaaccacttttgttttataattttaaaaacagaa

SEQ ID NO: 394813 - DNA, 1378 bp, Cannabis indica
tatatatatatatataaatgcacgccttgaaactgtactttgctacaaatattaattatgaacacattaaaaaatgaatgaactagatttaataattataatataactaagatccaattgcaaactacagcaaatcccatattgaattgccatttgctcgtttgagaaaaagatcacacgaaaaaagatgtaatacactaatattttgccttactttataaatactattttatgcataacttagaaagattaaaaacgatttgaaatacaatagtgtgttccaatatcggtaggccaagggtagaacagaaagtggttgaagaggatcaggatcaataggcacatgcaatgacacaaatggagaagaaggctaaaggtgagcagcagcttactgtagatctgccaaagaaatacaagacaccaccagtgaagcatagaccaccacatcaaaatttattatccacaaagactctgaaagaaaaagttggataagtaattttcaaaattccttggaataatattcaagaaactgcacattaacatttcctttgcagggacacttgagcagattccaacttactttaaatttatgaaggagattttagccaaaaaaaaggaagttagaggaatatgagacagtgacacttactaaggagtgcagtgcaatattgtagaagatactaccatccaagcttgaagatctaggtggttttaatatttcttgctcaattgggaattcggtggaaacaaaagccctatgtgacttaggggcgagttttaatttaatgcctctatcaatttttcaaaggctaaaactgggagcagctcatcctacaatagtctctctacaaatggcagaccactctattgctcacctttggagtataattgaagatgttttggtgaaggttggtaaatttattttcttgctaattttttaattcttaacatggaaaaagatgaaaacattcccatcatgttgggaagaccattcttgcccacagagagagcgttaatagatgtacaaaagggggaattaacattgcgagttcaagatgaagaaaatgagttttaatgtatttgttccaattgacattcctacttgatgtaaggttgaattagtgaagaattttcaagaagaaagggaagcgcaaagaacaattttgaactattcgatgtcgtataaaaagattgatgtgtggaaattgtaaaggtgaatcgagtcttgtgaatagcttcaacatcggaagagagttctcttcatttggtacaaggctgataggaatttcctatcatttcggtacacacaatagcaaagtagaaaaaatagagctgatatattgatattggaatgaaaaaaaacaagttgctgggtatt

SEQ ID NO: 394814 - DNA, 892 bp, Cannabis indica
gtcagcctctaaaacccaccagtgagtccaaaaaaagataatttgggccaagcccaaatcagataagaccttctaggaacgtactttagctccatctctagatgagcttctgccaaggacgacccgtatctagaagttgttccagtactgcaatcttggaggccaaacaacgagttcatggaatactagtctggtttctctttgtattcaagcgcactgcataaggaatttattctccttaaatctcaaatgaaagatcatatcaagctaaaaagaaaaactacataaaatgaagatcaagcaattaattcataagtaatcgtccacaatcaaagaaaatggtattgacagcttaatcatatccaattttcctagtcaacacatcaatccattcatgggctgggcctcacaaagacagacctactttgtgtattttcatgtagactccccattagaggaaaaataaaaactaagtataattcctgtaaacactataaatacccaacaatttattcgaattaagaattgaattctcttgcaatacttgctcaggcaaaaacagagaagttattgtattcccaaaggcttttctagcttaaacacataataacatcgactcgtggactaaggcttgttaatgccctaaccacgtaaaaactttgtgtttttgttctattttttcttttaattatttatttcttaaattctaattttttataaaaaaaatttctgaaaatctcggtaaacataatgaaattgagttttatttagggtataaaatccaaacaaaatcatataaattactattccaagaccacaatataaattaagataaatactattttggatcttgtgctttacaaaagtaattaattggaccctctattttgtt

SEQ ID NO: 394815 - DNA, 597 bp, Cannabis indica
gaggagatcaacatcccattggcgttcatcattgattagattagcaacaacagcattttgggaacccgtatagtgaaatggcatgaccaggaagccaatgatcagtcccacaattcacatgtcgaccctctccaattttccatctcaaaccaaccaataagagctctctaccgtattaccttgccaagatagtgatggagaatgaccatgaggggcatcttgaaaacaattgagaggaaaatatctactcttcaaaagtctgcatctcatcgagaatgggttttcaagtagtctccaagcttgtttcgttaataaagtttgattgaatttaaaatactcataaaaatattttaagaaaatttaaaatattatcaaaattactttttcgaattcaaaattaatattaatatctataataatttgaaaaactaaggaaaatctctcttcttttttttttttattttttgttattttctaaagtaacattttagtaattctcaaagagaaatttcactttttggctttaataatacaagctatatcaaaatttatactctcccttaatttgtacaatttagtccattgattacatgaact

SEQ ID NO: 394816 - DNA, 749 bp, Cannabis indica
ctctctctctctctctctctctctctctctctctctctctctctctctctctctctctctctctctctctctctccttctataggtaaaaaaaaattgagttattacaataaagtaaatgatatttttaaaaattattaaaaaaatatgtatatttttcaaaatgaattttttttatttaggcccataaaatgagttggccttaagcgcggacctagcctaccttagcctaggtcgggtctgaccttgaatgtatgcacaactactccatgaaatatcatgaaataggaatacttcaagaaaattagtaagtaaacttgtgaaaacatataatgatcttacatcagtgtaaacatagagaaagcaaagctcaatgccaaattacaatcaatcttaaagtgtgaaagtagaccaaacaacaaacagctactttagactcacatttataaaatctgcttgaatgattataacagtctctacaaaaatattataataaaaataagagttcagtaaattaaaatataaactaatattaataaatttaaattgatttaataaagaggaatagaaaaatttatctcatcaataggatctctgaatcttcattaaaattttagaattttttttataactaacaaaatttaactttaacaaaatacggaacaatagcaatatatataattacttttagtcatacaaatatataataatatataaataattatgattaatttaataaaaaaacattta

SEQ ID NO: 394817 - DNA, 586 bp, Cannabis indica
tttaaaattaattataatactatcataaattattaaagtataataaattatcaaatttataaaaaaaaataaataaattaaaagaagccttttactagcgcgaaattgtgccggaaaaacgtacccaaccataaaaaaaatatgtcgggtaagccttttgttagcgcataagtgcattagcataactaattcccgtcataatccaattggcggataaaactctgtgacggtttaacctttactcgtcaattggaaaaaatatgcgaactttttatcgacgcagatactattgcatatctatgctgacaaaagtaattatttttcccttcaatgggcgaatttaggaacttttttacactagcatttagttttttcttagcgcaactactaatttcgtcgaaaaaaactcttttaccgaccgagaatagcagacacgttttatcggtgcacttatgtgccgaccaaagtatgctggtgcattgtgcctgcttttaccggcataaatatgcgccgacaaagtgatatttcttgtagtggaaagagagagagggaaaaagagagatagagagggagttagtgggaggag

SEQ ID NO: 394818 - DNA, 1248 bp, Cannabis indica
aaaattaaaaaaatatattttaagatgatctgtgcactttacaactataagagttgctcccatttaagatgctctaatgtggcacccaaacactccaatggctagtatctttcaaggatcctgccacatcatcaagcaatttctaagcaccaccaaaagagatggtcttaggcatctcacacatgtatcattttataattaattagcgatttaaaatgcattaataataacaacattttatctcttatagtgattagccttttagagcatctctattggtaacattttttaagaatgttattttatttattttttttcaatgttatttttgatagtttttattttaaaatattctaatagtaaatatttttaaaaattattaaaataatattatattttttatatataaaattatactaaacacaatatttatccaattaatattatatatttttttggtgagttaaagtaagtatatatattccactagcaacaaattacaattcgcaatacctaagattaggcctgtatatttacaaattctcaaaccaatccatgtctatctttgaaacttttttaagcaatattcctttaatcctatattttatatcctttttaatctttttgatcattgcttctattgtgtacaatttttggttccaaagagcctcatttctacatagccaaatttcgtatactattacagcaagtgcatccgcatatacttgtcgttggaattttctttcttcgttggccagcaatttcattagcccatccaccgttgtatttttcactccccattccagccactgcttgatttcttttaaacatccatcactcacatggcaaacaaaaaacacatgatctttactttctctgtgagagccacacatgacacaattttcatcctggaccattggcttagagttatcaacaccccaaacttagaatcttgctcgtcctcgagcaatgacaacacaaaataaacaaaataaaatacaacaaaatttttttacacaaaaactcaacatacaagacaaatgagagatttcatagaaattaaagttggcctagcgaacattgatgctctcagaaaaaaaatggaataggaaattgcttgccgtaactttatatgctgcccttttaaagttttttgtcattggataacattaatatttcccaaaagtcacctaatcaacaatttatacaagtatatcccaccaacactttgaactttcctacaactac

SEQ ID NO: 394819 - DNA, 1079 bp, Cannabis indica
gtaagggcgcctcttttgcaacatctaatgcacatttactttatctagtgccactaattaacaaaacactttgacttttgacagaacattagcttttcagaagactttagtccaaaacaaatcattatggttctgatttgaagtgaaccaactgaaagctgatttacaagaaaaaatcccaccaggatctctggcttccacaatctactatcatccatcacattgagcaatctaagatgttctaactgttgtaacatctccaagagattgggaacttccttttccttcaagttccttctgaacttaaagttccaacttacaatactatttttatttgaagcaaggtccttagcaataatcttatacacgcatgttataagattgataggtctgtaatctttttccatgcagctattgagtttcttgggaataagacagatgaaagtttcgttgatactaccctcaactcttccatctctttcaaaagccttgaacacttccatgagatcatccttaatgaccaaccaattagactgaaaaactgccattctaaaatcgtctggacctagtgctttgttgccttcacaactgaaatttgtccttcttacctcatcatcttcgaagggtatctctaaatgtgtagctaaaaattctgggatttttgccactcaatgccatcgattcctctccctcgtctcctctcggatgtatataatcttgagacgaaagagtttaattcttcaactatttcttcctccttgtcaagtatagatccatcatctcttgggatttgtgtgttttgcagtgttacatgtttaacatacagggaactatcatctttatagataaacatttgggaaaatgacaatttcatataaaggatgtactaatttaaaatgccataagtgatgtttgagtgatgtaacaaaatttctctctcctccttgaatgctctctcctctctcctccctctgagagacgtctccatgcattccgggggttcccatggtccttctgatcatggatggcaccataaccctactggttttgggaagaaaaaaggtcattaccccactggt

SEQ ID NO: 394820 - DNA, 938 bp, Cannabis indica
actacttgtttttgtcctttaattttttttaatcctttaatttttttttaattttatatactatttttttagtaaatagtttttcctatttattattggtaccttaatgctcaatgtcatatcattaaaattagttagtaattttttttatcttttgttttaattagcaatttttttatttttatcttttctttgtaattttatatactatttcttttagtaaatgttttttcgttgtatttactattagtaccttaaggtactcaatggcatattgacgtagtacccagtaattagttagtaattttttgttcttttgttttaatcagcaatctttttttttttgtatcttttatgttttttatgttttttttttattgaataatttttgtactatttactattatttttttgtaaataattactaattagttaatcatttttttaataatctttatactattttttttaacttttatgtttttttttaatttttattattttacattgattttttcatactaactattgatactcttattgtacttaatgttatatcgatgtggtacataataattagttggaattttttttttctatcatttttttaattttattttttatgaatgatctctttactatttttttagtaaatgattttttgtactattattgttatgtgcagggacggacccattaagagtgatgtgggggctatagcccccacgaacaaaactattgtcttttgaaaaattaaatgtaaattttttaatttaataattataggttaaaatagtagaaaagcccccactaaattagataaatttagtaagagtgattataatgtagctataaatatatttttatgataaataagcccccacaaagtaaaaatcctgaatccgtcactggttatgtgataccttaagatgcttaat

SEQ ID NO: 394821 - DNA, 1144 bp, Cannabis indica
tcgattcattcaagcccagcacgatgaacagtcaattagtcgaggctctcaatacgagaggagaacgattgatccgattggtccgattcattcaaggtcagcacgatttggagtcgattggacgaggagagagggtcgaaactcctcaaccacagttcaattcgatacaattcatttggatcctttcactttttggtttttctgattcgattcgattcattttatttggatctattacttttggttttctgcctaacgattgacctttctattttccttattcaaaccaaatccaatccgcccataatgattggtagaccttctactgctcctcatcgatcattatgtggtcaatcggttgtttctttttgcttgtatgactgagtcctcgcgagaagacccgccctacacacaaacccattttggcttctcaattttgctaccttcttatatggtttccttggaaagaaagttaaaacgagtttttttttgtaattctagattttcttttttgtttattggacgatgctaagtcttaaggccttagactatgtagttaactttgcaaaaacatatttaaattaccttattatatttttgataaagtaacaagctttgcataattgaatttggaatcacttggattgttttagttttcatttttggtgttttgtaaagatttgcagggagtgtttctacaaggcatttgaggaggagattcatcaagtaattgttgagaatcagttgtttaagcacggtgaacgcatcatcattggtgcttctggtggaaaaagtgagggctttcttgtctcctactatcttttgctgcagagattatgtgaattttaattttttattttatttattttttaattaaaacaggcagtgtagtgctgcttatgagttaagtaaatttatggaattttcagaatgataatagatttcgaatcattgaatgcaaaaaataggcatatgaatttgattcttttaatttcatgagaggttcctggtgaatgatcattggtttgttctgttgtagtagagaacaatacaaaaaaatagagggaaaagtctgtggtgagaattgctatagccatgggcggctaataacctgtgcaacctgggcagttgcacagggccccaa

SEQ ID NO: 394822 - DNA, 546 bp, Cannabis indica
aaatgtgatagcattagtcttcactgtataaatattcaattgcaatataaattcacgcaagaaaatatttataattatttttagagcattactaaagcaccagtggtgcctagcaccttctcgacatgtcgcgttacgattggatactccccaaaaactattatattaaattatatgggtcccgatacttaattagaccaataacgatattgacacataggagggtgctataggcaccattagtgccatttagcatttttcttatttttaatagttcggtcataaatgtacttaatttcatttagggggtgggcatctgatccaatatacattttttttctcatccaatccaatctaacatttttctcctcatcctaattcaattaatagtaattggatttggaaaatcatcatccgtccaatccaattacacatcaaaatctaattcaattcaatttggatcggttttttaattagatatctaattacatacttaaattttaatattaacataaaaatatgaaaaaaaaaaataagtaaaaatta

SEQ ID NO: 394823 - DNA, 822 bp, Cannabis indica
aaaaactaaatcttaattaactagctataacagctagttaattcttacgtatgtgcatgcatagcacatgcatatcataaatagtttagtacgtaattatatgatggagacaacaataagtgccccgaaaaggactttaaatccggaggacacaatcccatgagcatcagatgagctagcagtaccattgttcacactaattttaagcttttgattgccattgagacagtgtccgggtttcccacaaatgtaccatttgtttccgggggttttgagctccactcggtcgttacctgtcgtcaatggtggttcaccgttcggggacgtggtattgcaactcatgaagccagcaccatcaactttgtatacattgtgactaccagatttgtagttgaacactatcaaatattaaccaaaaatacaataattagtactaattaaaaaatcaattaaattgacttcaaaaaaatagactcaaaatataaaaaaaaaattagggttttttttttcttccttagtatagtgtcttcttatcaaattaatttcaacatttcatagttcccaatagaaattttattactttatttattttttataattgcctaatttttgttaagaacaaaattatatactttttataaatattgtgatcaacatatgtaaatttatttatatatatggaagattttttaatgagtattatctattaatgattattaaataaatttaactataaatattaataaacctttaaattttaatgacgaataataaaagataaattttataatttatattcaatttaactacttatttaaaaaa

SEQ ID NO: 394824 - DNA, 678 bp, Cannabis indica
tttatccctatcacttcaagatattttccctgtgattctctaatgtcagggtattttgagtgcagtacatattaaaagagctatgtttcaattaaatgtaaattaaaggtagatttagttaattgataaataatagagatatttttcaatttacctcctaaatttgaatgaagtgaggcggaactgggccaattttgggccacttcaagatgagtttaggcctttcaaatttggactttattggaacaaagcccaacacttgaattgacagattttcattaaaaaaaaaggaacaactttgctgcaaatttaaaatacacaaaattggattaaatgaaatattattattaagtaatttttgtattaaaaatcataaaaacgaattatttaaatctaatgattcaataaaataatactttaaaatataatataactaaaaaaagcaataatgaatgaataagcgaataagacaacataatttatcaaattcataaaatgtaataatgacaaatatctctaattaagtgaggaagtgtttattcagaaaaaaaaaagtgaggaagtgtaggagaagtaacacacatattatataataataaaataaggactcgtttggaacgctgtattaggtcgtattgtattgtattgtattatattgaattggattatatatcatat

SEQ ID NO: 394825 - DNA, 1424 bp, Cannabis indica
aagaaggtttcgagagatcattcggctccaccgactcagccacgaatacatccaatgaggccaaagaagcaatctgtcaacgttacatttttcctgcaaagagacaagtattgcttggaccttcaaagattatgaaaaattagcttgctaagaaattaaagagatattatattaaaccagaagtgttcggaggagaaggccaagagtgttggatcagcgtagatgaggtggaagatgcgtgcgagctgcagaagattggaaatactgtaatgtctctttggtgcaggtataataattaataactaagttaatatctaaagctaaaaattatatttacagctgtttacattaataatctgttttgattttacttaattttgcaaaaaaaacacactttatcttagtgaattgagaaatacatactcatttaataaacatgcttcagtaacaactagagttggtaagctcgaacaacattcagagaatctatgtcaacgattgatggatatgcaacctaaacaatagttgatatgttcgtgaaatttagagtaagtaagtttttataataataaatgtaacgaactaatggatcgattagtgagttgactaaattaacatgttttaatctgtagtgatcactggatgacaattatgatccatgccaatactcaaagtattgcatatctcgactcaacgaatgactttatcccggctgatattatgaattgtatcaaaaagtaattgttataattttttaaatttagattatgttacaaatcaattcactaattaattttttttttatttagtgttgtggacattacaggatccaaaaaattttacgaaataagggtccagtaaacatcaattagtacatgtgtcgacaacatccggatggaatacaatgcggttattatgttatgaagattatccaaagttttatgatggttgttaatcttgcaatttttttgaaaaatcatgtaaacattaataattcttctttctttagtttttattttagttatacttttaatgtaataattaatattttctatcttttgttttacaatttaagtcagacgcttcccacagtaacgagaaaatcagtgcagtacggaatgagtgggatacagtttaagtcaaacgctctctacaacaaattttttgaaaaatcatgtcaacttgaaaaacggaatgtatataatgttacttgctgcaatgtagttcttttgttttaatgctgagatcaaattactttaatgtattataaacttagtttgtacatatttccttttaattgattaacaatattattgtatctaacgagtgtaaaaataaaatggaatacatatatatacacatgaaataaaatcgtaatttctatatatattagtattgttttgtttttgtggttgcatgatgat

SEQ ID NO: 394826 - DNA, 787 bp, Cannabis indica
accattaaaatccgctaccaaagtattgtgaacgacatcattaattacaagtgaaagataaatttatacaaatatgaaacatcttcattgatcatattcatattcatacatatacatatgtcactttcttgttcgttgttggagatactgtcaaattaagctatgactattattatgcatcacacgatgctcattttcttttatgaggctgcccttgaaattgcacagacggggagctcaccgtcgatgtgtagagtgaacatggttctgtaagttacttttttagtgtcatcagctaacttgaatcgaaaaaaacgaagaagggcaatggataatatcttcatctgccggtatgcgaagtccttaccaagacagatacgaaggcctccctgcaaaccattccaaaagatgaacaaacaatatttgtaatatattagtttgaagtactagaagcaagcaaggtgtcacatatgatgatgacaaacacacataatggtacgtacatgaaatgctataaatttgaatggcgattcgggctgaaaaattccattgacaagccatctttcaggtctaaattcttcagcatcttctccccaaagatgaggcattcttcccatagcataggaaatgtagtaaactccatctcccttttttactttaaagccatcaggaagagtatcatctatatctgcacatctcccattcttgaggatcgtaagggatgccacgtatatcacaattagtaaaaagaattcttaaaaaccaatattcatgtcttgaagtaaaa

SEQ ID NO: 394827 - DNA, 1370 bp, Cannabis indica
accagtcgactggttggtctccacgaaacctcactgaaccagaatcccagttgggaaaccagtctaccagttgaggcattttacggaacctgagtgtttttcgtttttgcaataattagagtatttccatgttattcatcgatagggaaactttttgtttcatgtttaagtccccaaaaagtgatttagcgtgtcactcaccaattctacgaataatgtgctttcggggcctataaatcgtcgagaagctgttccacttaggttggccagcacatttgaattttgtaacgatgtatgattagtataatgctatgcatatgtgttttcatttttaatgtacatgttatttatgcatgttaattacatcgataacaatatcagtatacacagagttatattggatactgatagatgtatgttggctcagatactgatcgacattatcatatcagtgtggctagagtatgactagcatactgagtatagactgatattatggtgcatagtattgtcttacaaacgttatagactcaataccgtgttggacaaggggacatggttgtggttgggtgtatgggtgcctgattataatctgggttattgttatgatattatttatgcttttcttactgagtctgtcgacttacagatattgttttcatgtgtaggtaagggcaaagcaaaggttgagtagatgtgagaggaagcaaatgaagattgtacatgtcagggtggttaagcttagagcgtacggtctttaggatagctgggcttattttgtatagtcgctcggcgacaaacttttgtattctccaccgtaaaacatttgtaaatattttgtaacagggttccagtgtaatataatttttttggtatttataattagttagataaagttttaattaaataatatttttaataaactcattgattaaaagcgagctgcacaattacgttaaaaatcacgttaacatgccaaaactagtagggtgttaaaaatagtagtgcaatattggcatcaattatgaaatgaagcaacaagaagactatttgcatctacagttattccattgattaccccaaccgacgcaaattgtttatatgtcacttaagaaccgaagtaaaacatttttgtagtagtggatgccatagggtttataaaaccctaatgacacctttgccttcctcactttatcttctccccaaactaaaataaccctagcccctcactgaaatcctcgcccaaccactgtcatccatcccccatttctctattttcatctatttttactcattttttataaatcttgcatttttcatacccaaaaacatatccctaaactttgatcatccttttttttttgtttttc

SEQ ID NO: 394828 - DNA, 932 bp, Cannabis indica
atctcgacatttatgacaattggtacgttcttagtgttttagttagctaaaaatactattagaagttctgtcatagaaaatcaaagtgttaaaatactcagcttgtaaaaacatattcctaaaaacaaataaaaaaaagtattttttttagagctcaagtttgtgtggttgtatctttggttctattgggtactttcgtgtgtgttctttggagattatttgctgtgtgtatgtgcgtgtatgtattcagatgattgtagatgtttctcaacataaataatgcttcctgatggtagggatggcatataggatcaaattataagagagatgaataaatgtaaaaaatgaagagggtgtatttattttttttaaaaaataatattaaggagacaaatagaaaaaaaacgaataaatatattgaaaagttcatatgtacataaaatgagaagttggagataagggtgtttataaaatgttcaatttaatttacgatttaattggattgaaatatttaacatgtacactaatcgaggatattagatgtggattcatacttaatccatacttatttatatacttataattaattttctttttaattatgtttagttaagtgatgttaagtgcaatacatgtacgttaaatttttctaattaggtaatgtatttttcttttttaatttttaaaatagggtttgagattttgatgttttcataatttttttttagctatattgcggctattttggtgtgatctttagatgtgattatatatatacgtattttatatatacaataaaagaatgaatttcattgttataggtattttatatttatctctctatgcataaggattatattagaaaatattttgacaaaatttgaatttgattagagaattaattatgtctaaatatatattttaaaaaataa

SEQ ID NO: 394829 - DNA, 552 bp, Cannabis indica
aaataataaaagaaatgataattctcaaaattatatttcaaaatatcttatattaagtctttctcaaatttctacaaaaatatctaacttatttaaatatttaaaaaaataattagcatttttaccccctaaacttaaaacactacaaaattatgtcccctaaaatatatgctatgttaaaaatttttccaaaaatataacaaatacgttattacagtccttacgttaagttctatttaattttataattataatgaaatttatcattctcttattggctcacaaataaatattttcaaaataattatttaaattcatataaaaatacgtttaaattaataaaataataaaatatacaaacaaataatagcttatcgtatttcttataaaaatatatattatataaaatgattatattgttaaaaccattataacctaaataaaagtataattaaaaaaaagattagaaaccattcttcttagtctctctctccaacctgtaaatcttcatcttcctttttcttgtttttttttcttcttctcaccttagat

SEQ ID NO: 394830 - DNA, 672 bp, Cannabis indica
atatataataacattattaattagtatgatttttaagggaatataatcaattgttagttaattaatttcttaattcatattagttaataattaaagattcatcataaattataagtagtttttcgtatgccatcatttcgtaattaattgaacatacttttatatatatatatataataaataatgtttattatacctggttgatgtttctgttatttagttgtttaattataaatgtttatttatttcttgaagagaagatatataattataaataatataaaagaaaatggacactgagttaggtgcagtaatgtatactgaatattggcactatctttttgttaagctagctcttaaaataaaagagatgactgcgaaaaatctgcagagttgattgggtatgtaggtacacaccatgtggataatattatgggtcaatggaggcaaattaatttaaagacctcaatttggtaactgtgatcattacgatcaatttaacaaaaagttttgccctaatgattagacatgtgcttattccacccattccaaaattgttatcattgattgatgaatattaaatactcattactatattaaaatttagggtaaataccattttggaccttgtgttttgcaaaagttacagattggaccctgtattttgttaaa

SEQ ID NO: 394831 - DNA, 600 bp, Cannabis indica
tttttttttttttaaagttaaatgtctagtattttatattatttagaaaattcaatattgaaatgcacaacttaatgatataccactacttcttgtgatacttgatataaatactaattgataatagtttgtgaatcatatataactaaggcttgtcatatatgcaagccaaagatttattttttaaaggtaatagcctttgaaaagcaccacctttaagtgaaccgctaaaaagaaaatgaaaagaaaataatttttattttatttattattgtttggttgcattttaaagtatattgaaatgttattctaatttctatcattttgatgaatgagtattctatttttgaagttcaataaaaagaaagaccattctaatgtaacaagagaaaaaatttaatgatttttttaatcaatttttgtatgcattttaaattttattctattctattgctattcatattctcattcttattcatattcttatatttttattcttcccaactaaacttcacttaggtggcgtttggttggaggtaataaaatagaatagaatggaaaatgaaacaatttttattctattcatttgtttggttacat

SEQ ID NO: 394832 - DNA, 747 bp, Cannabis indica
agggttacctcgtgagcctctgaacgaccctgagcgtcggtgactcggttaaaactcgcccgagtcaaaaccgagtcaattattttatatttttcaaaaaaaaaaaaacgagagggagacgaagaagaagatatataaatataaatataaatataaatataaatatttatatatacatgtatgcgaaccagagagagttagagagagaaaccaatccaaatttagagaaagagagagagagagacagagaaccaaagcttacgtatagaggaagataatatagtgagaaaatggcggattcgagtgattcggtttccgttgatatggatggagtttctctcgccggaaaggtattattattattattgtctacattttctttcagctttcttgattttctttcagcttagtgttaatggcggacgcagcggaagcttttttcagtttgcgtattttgattttttttttctgtttgattctgaaatttctaatattgcattggttatgattctttgagtgtaaatgagcaatgttaatggaagaaccttttagcttagttttaatggcggaggtggaagcttttttagttagcgtttttgaagaaattatttgttttctgcacttgaaattcccaatattgcattggttttgattctttgaggttaggaaaacttttacgttgaatacttcacctaatatatgtatatatatgtgtgtgtatagatgtgaatgtattttttttttttt

SEQ ID NO: 394833 - DNA, 711 bp, Cannabis indica
ttgatcaacttcttactttcttaaatgtttaaaaattaatatatacctcatgacattaagtgacagctatacaaatttccacattattcattacatcatgttgggtttctttccaataattggataatgccttatttaatatagggtttatttggaaaggcataggttttcttgggttgtttttttattgtattttacgcaatctttgactgtatatgaatttttattaattggtttaagaaaattgttggttgagctttggatagctggaacaattgttgaacaaattgtttacttttgttgccttaaagcaaatactcttttatttttcctgtttatttagttggctttttgtaattaaaattttatgatgtgtggtataaatattatatataacaaatatatatacacatgcacactcattttgaagatagtcaaacaatatacaataatatctctcatgtaaattttaaccgttaggttacagcattatattacttaattaaagtgtattgctatttaaacggcattatatttagagactataggcttcgaatattaaatattaactatgtgttaatcttcaatgcagattaatataacaaataatagtattaagcatatctatttctattttatataaagtgtgcctatataaccgaaattcttggtttaagagaaatttatgggtgactttttatttttatttaa

SEQ ID NO: 394834 - DNA, 1574 bp, Cannabis indica
cgttaaattttgttaaaatgaccataaaaaatatttcaacatgtagtttcaaacgtaaaagttgactaaaaaattgtaatatagaaagttgtaattaacactcctctttaaaatttactaataatcaatatcttactgaaaaggacaaatcagtgctttatatttattatttaatgatttctctaaaatggatcattttttgccaaattgttaagagttacaatagctcatacatagtatatattaatattatttatttatatatataaatgaacaaattatacacgaaatggtacctaaaatttacaaattgagaccaaatgtaaaatattaatttcttttatacattgaaattatatacctaaaaagatataaatcaaacaattctctaaaaatagatataggacaaaaatcaccatagaaataataatttaatctttattattattatcatgcattaaaaataaatagtacataaatggagcttaatttcttcattaatgaacaaaacaagaatatttgaaatttcataacttttacacacacatacatatatatgtatttaataccttgtatatataattatatatataaatcaaaaaattaattaatttgcaataataataaaattgcataagatcaaagtacaacaaaattgtataaattgtcacagctagcaaaatgggaaggtgggcacatctcatgatcataatttgactgactttggcaattttttttatttattatatatatattcatttattaattattactattataaatgtatatatatgtgctctgaaactagctagtacaatcattattttcattttccaatccatgtaataattaataatatatattataataaaaaaattaataagttctaaaccatatgcatatattgaggaccactttttggggaatctataatgatatataacacacactcaaactaccctttaattaattagattttttctttttcataatttttgtcagaattttttattgaaatattaattaattacttttcttttttttttttgtcctaagcttgttctttttttagattctggaaaagtgaacactaaatttagcttcattcactcaaataggtataaaaacaaattgacacattagcatatataaaaagaaagtcatcataagtttacatatatatatagtgaatatatattttagaatattacaaaaataaaattgtagaaataatgagactttttccttaacattcccttaatcatttaattatatttcacatttataatatacgtatttttctctttttattactcacttcaattcttttactatatttataatatacttatatatatatatgatttctatttttccccacttagtaatcccatgtttgtttttggtacctgaaaaattataatttaatttaatttttttaatatgatgatgtatattataattttttaaaataattttacaattttttatgatttttaatttaaataatttacaataataaaaactagactcgactatagtagcagagtgtttatttttggtacgtgaaaaaa

SEQ ID NO: 394835 - DNA, 794 bp, Cannabis indica
caatgtggttgtttcccataacttagaaggctttcttgatggttttatacccagcaaaattttctcctacaaatccaaccatcatcgatttttaatatctcacttggaacaggtacaatttcataatgcctaggatttatgcttcattatcagtgttaggttagttttaggtgcattttataaagtgatttagatgcgtgtttcaattgattatattcattttgtgcaaaattatgcttgttttctacttgtttcaggtttaaatagtaaaattcataatataaattaaaaatgataagaaacatgttaaatgagatgaatatgatgaattattatcatggaatttggagttctaagatataatggtgtgaaagattctaagttttggatgctcaacacgcttcgtttgtgatcgaaaatcaagtctgaagtttcaagccaatttttaggaaaaatatattgtgaataaaagctctagatctctctttcagctttccaaaatatcttgaatcgtcaaattctgagcaatatcgaaagtgttatggccaaaacattatcgatcatcgcaccaggaagcttgctatacccagaaagtgccaacccgcacaacatggtccagaccatattgcggcgcgctcccaaaaattctgtttttctgggatttcgtaaattggacacgagccacgacatgagttttattatgctgcagcccgcatgcttaaaagttgacccaattagggtttttaaaccctatttccaaaattcaaaggagcttttgattgggacttttggga

SEQ ID NO: 394836 - DNA, 1124 bp, Cannabis indica
attatcatcattatcaatcaatgaattatgagacgtgacacgtgaaccatacaagaggagcataatccagctgttctaagtttttttgaattaaaagttaaaaaaatattaaaaaataaacgaaaaaaggctagtttttgggtagggaataaaagtaaaagaggagacgttttttatgggagccgcccaattgggcccattaggtagatggattcacgcttcatttgcacacttgtacatagtgggccaagaccgaacaaatttatggggcccatgatcataaagtccacgtctagtatcattgggcccaagtacttacaagaattaatattaatatcattaattaattaattaaataaaaaggtggtgtgaatgaatatttgtctggttgcacaattgtgataaagatggttcgggtcgggttagatatttattttctattatgctttttactttcaattatataaattaatattaacaataataattcttccttggatcaaacacgttacctttaaagtgttcattttgtatagatataattagtactcataacattgaatgagaatttgaatctaataactttttttgattcattaataagtggtagcacaactctaagaattcattctctctttaattattagtggtaaatttttaatatatataaatagtattttttagaccaacttgaaactcttatcttgttaacattccattgttaaaaacaacttaaaattttgtattatttttttttagtggtagggtatcaataaggatctcaacaagttttttttttttaattaaaaaatcaagggcaggtattatcaatagattctgtcccatttgtataatatttacataatcagtaatgattcttgtataatgaaaatatacctgtattttacattttctattatctatattttctttccttaaagggttgatcttgtttaaataatttgtggatttcatatccaataatatatattcatttttggagttttatccgtacagtacactgtgggatacataaggggaaaaatgcttcattaggaatcggatccaagtgtggtacttttttaaaaagaacaatataattatgaaaatatttaattatttat

SEQ ID NO: 394837 - DNA, 527 bp, Cannabis indica
attatattttcactcgagaaaataattttgattccaatactcttttaaacaacaaaccaacatctaatttaatcatattactattgttattgttattccattatttacaattactattctcttacgaaaccaaagactatagctagatcaacatagaagagatgtataaggtaaaggtcaaattcacattgacaaaattacaattattgtatcttaagctagtgtcatttattttgtcattgattattttgaaatgtcaattaattatgggaagacttgtgtgctctcatttaattcatttgtataattgaggtgaatggaattagaatatattttacgggcaactcattccttcgtcagtaacatcatgatctagtttcattcatcgtctgactccatctctataatcaaattttgttccttaagtcttattcaattaagtcatataattaatatacatctttatgtcaagactcaaataaaagaaaaagactaatttagatttttacaccctgaattgacatgta

SEQ ID NO: 394838 - DNA, 1299 bp, Cannabis indica
attaagtttttttttgataaaaaattacttcgagatactattttgtaccattttaaaaaatataaggttaaatttatcatttaacaaaacagtgagttctatcaataattttcacaaaatttaaaattcaaaatatcatttaataaaatattgttgtatcaatttttaatagagaaataactatgtatttgtcgtcatttttttattaagtattttaatcctaattccttgctaaattttcacatttaaacataataaaataaaaatgtgtactttaatttcaaacaccctacaataatattttgacttgataagtaactctacaaaattatcccaaaaatttattagccaacttgaaactgatcaaatcttagaaaatttcatcacataaaagatttgaaatcataataaaataatatcttcttctttctttttttttttttttaattcacaagacctcattttattttgagaaaaaaaaaatagatattaagctatgacctttatttcattaatatatatacattttaatttttttttttattattattatgtataaaatgagacgttgacaaaatttcccctttttaaaaattaatataataattaataattggaatcgattataaactttttgtattttttttttattattgtgtcatcgtctctgtgttgtagcgtttggacatagaaatggtcaattaagtttatttttctcaaaggacttggtcagattttggtcgagtaattaattctcaatatacaataacttaatatataggtcataatgattgtgacatatgtttcataagagagtattatagttttcaagtcaatggtacataaaaaattgtcaacaaccctttggcatttctaatttttttttttttttttttgaacaattcaatttttaaaattttgaaaacttacaatgtgtatatatatagttcactataaatatgttaataattttattacaaattttgtgtattaattaatgtaacatggcatagcctataacatatagatatactaatacaatatctattgcatgtatttactaatttactaatcaaaatttataaataaaaatataaaatagtaataaaaaaagtcaatgtcattcatacatatatatgcactacaaattgagaactttatgaggaatataatttcatttactattattattgttgtgaatggtcacgtattaagattagggtgactttaaattttggtgattctgttacatgaaaagttatagggactaattagcaattgttagtattgcttagttag

SEQ ID NO: 394839 - DNA, 2136 bp, Cannabis indica
tgcattaagttacaaaagtatatacttgtagatggcacgtgcagttcttacctggtatataaaaattttgatattcttttttgctgaataatttgagcggtgaaaaattaatattaataattaagtttttttttctaaaaaatatgtaaaatgtgactataatatttttttagtcgataatgtgtgtctataattttgtattcttatataaacttgttgtgtacaggtatattatcagtttgtagaaattttgggttatgtttgtagaatttagatggccccgagatattgaatttcaagtcaaagaatttcgctctgattgtctttgttggttaactctgaataacgattccgtgtaccataatgagctataggtgtccttctttcgacattaaaatcttattcggtatctctctcacatgtcatatatatggatagacgatgagttttttcggatagaagagatcgttcctcttatctgcaatggtgacacttaattataattttctatctagtaaagtgatatgtataaaaaataataataatatataataataattttttaactaagtaataattataattaatttttttaaaataaatctttttataaggaaactaacgtacgtaaccatctacgggtatatatatttgatgtattaaggacagtataatacctaacatatgcacgtcaatatagtggaccattctttaactttctttattctaaagtttccaaattgatagcacacgacatgcatgattacatgaataaaacacactattaatcataattacactgcaaacatatataactagatagtgacataattataagttatcacttaccctcaaattttaagtatggcatatcaccgtgtaggtaaatgaacaaattaatagatgagtaataagctaaagctgtcatagggcagctctcctttggcaagtagtacaggatagtaacaagcttgtatacatgcattgctattgctagatatcaatcatatccgtaaatacgtgccaaatgagagaagccctataactggtttgcttaaagattataccacctctgttcttcatctccaactatgatctcagtgtgtgtttcatgcaacacattatggatccttatatagaatattattctagactcagtagaaagatcatggaataaacctaggaagcaatggcatatgcttagagtaggagttacatctatggatagacttctctctttaccactaatataattcttctccacttttaattggttgggtccgtatctaagcttttggtcgttttcaagaatatggagatttttgttcatatatattttcagttgagaaggggagaaaagcagctgtacaaggagaatgacaaatatatggtagtagcttattatgcaattgacaacaattaaaggtccttaattattagtggtatatccattcatatattgaaatattcctgtcctttcttttttctgtattataagcctttaatattttcatgtatatttcatcgtaggttataaggtttgtaaagtcttttttggcaagttagttgacaaaatattttttcttttatggtaagattctttgcatacatacccgatttcttaccttgtttttcggttttagttgctcttttccttgttaggaaagttgcacttttcagctggactttcctttgtttggaaacttcttgtaagagaagcaattctcttatggaaagttgtcttttttaaggaaactttgattattgccttttccttattgatttcgattgtatcttgatacaatcagaatatctaatctgtttttggcaggaatcaagcattgatagaggatcggacccgattatagcaagtttcccgtttctggtctgatctgctgcgtcagcatccgaatctgatgctgcagatcgtgttttcttaggaaagtttttgtacagctgtagattcgatcttgtgactgtctctaaggtttctatgttctataaatagagcctagagagcagccattcgaatcagctcttccattattcattttttgcacttatcttatttgagagaagagagtttctttgttttgtgagagcctagttgttcatctaggttctagttgtttattt

SEQ ID NO: 394840 - DNA, 470 bp, Cannabis indica
gtcactcaacaactttcaaatttaaaatttgaagagccaagccattatataatatttattttataaatgattaatgtggacattgaatttataaacacttttttagtttagatattatgaatatggagtacgtaataatatgtttgtactaatatgtattatgtatggactatgaagtatggagtatgtagtatggattataaactttagatttttattatcatgaacatgaagtttgatgaatgacttgtaataattgtttgtttgattttggtttcacttttgtactttagatttggagttaatactttttttttccttttaaagaatagattaagatgcatgcttaatctcatatataaataaagttgaaaaaaaaaattatatatctaatctatataaagtgtgtctatataactgaaattcttgatttataagaaattcatgggtgactttttatttttatttaa

SEQ ID NO: 394841 - DNA, 579 bp, Cannabis indica
gtatggtagtttttaatattttttactaattttttacattttatttacataaatacagttctttaatgtatttttatgttatactcttgttattttgttgttaatttttttattatttgtatattatttttaaaatatttacattaaaaaatacaaatacctaaaaactattacccccccccccccaatacctttacaaggctactcttacattttttatctttcatattgttttaatcacactaatatctcttacacgtgttataccaacttcacacattatctatttctctaataaaataatagaattataataccaaatattgtatataaagaatgtgttagatatcatattaagttattcaaaatcaggatttattactcttttattgataattaaaaattaacttttaactttgtaagatttactttttagctaaattaagccttttcatggatcagtagttgttgtagttttctagtacacagtaaattttcgtacatgcacattttctattatttttttttataattattgacaacaaaattatgagagattaaaatacaaacaaaacaaaa

SEQ ID NO: 394842 - DNA, 1223 bp, Cannabis indica
agataatttatacttgataccaagaattttatttcttgtgttgttataatttgtgataaattattttaattaattaatattatttaattgtaacttgatatatctttatttagtatattatttaaataagtaaaaaaaattgatataaactaaatatatatcaaaataatataaaaataatgagaaaattatactacatacctctttcaaattaatgcctttaattttttaagacatttttttaaaatctattatgtttacttattttttcaatcattttacaaattttacccttattatttcacgatagtctttatttttctctaaccaaaattttattttaactttttcataaacttgcacatccatctccagttatgtgaggttgtgagggtaatttggatcattatgtgggagttaattgttattaaatttttttaggtactttatttaattttataggagcttttgcatccgatctccaattcttgttcacctccttttcactctcgacattcgcttgaaacaggcttgatgtatggtgcactgcaattattttttgtgctataattatcaaataaaaaaaatatttaatttttttaatataattttttttactgaggaatataaccccacactcttaagagtgtgtctgtggctggtaccatactcataaaaaaaatgtacatttaaattaaattttatttgaataatatacaagtattcaccatacaacatacttattactggttacaaatggtgagaatactaagatctggggagacccctggattccgcatcgtaaaggcttttgcccgaaaccaattgggagcctaaacaccaacattacaaatgtggcagacttattacttgaaaatcgccaatgggatgtggccaaactgcgacgctgtttcgataaagaaacggtctctgacattcttaaaggagggcatccctccggagatggtatggataaatgggtttggacgctagaaagtactgggcgtttctcgtctagatctgcgtacttgactcaggccctggaacgagctcctcattgtgaggtggctccaaagctttggaacaagttatggaatagcaaaatcttggaacgtcataaagtcctgtggtggtgtattctatcttgtgccctccctgttagagcagtgatcggacgtcgtttccaaattgaggactctagctgtcccttatgtggacggggg

SEQ ID NO: 394843 - DNA, 446 bp, Cannabis indica
gtaaaacaaaaagaaagaaataatgaggagagagagaggcctatgtgccattgtagttcatgtaaaacaaaaagaaagaaacaacgagaagagagagttttgtactgagagaaacaaagagatagaagaagagatttaccagatagagtttgtgattggaatccaaggcttgtaccggcgattcgccattattgatagcggaaactcaagctttctctgaggcgagcttgacagagacgtagcccatttttagggtgtgagctgatccgagatcaatttttgtgtcgattatcaatctctgtttgtatttctttctctaatctttcactacaagaaatgtcacttttgccagcacatttttgtgatggcaaaagttggtattgcgctggtaaaatagaatttacttgtgatgtgttggcaaaaggagttggcaaatcaatgttggt

SEQ ID NO: 394844 - DNA, 1230 bp, Cannabis indica
ttcatacaaacatataaacatattagatcaataatacaatatttaaataactcaagataatcaaattaaaataaataatacaagtacctcaaattctttaacatgtaggctaagagtattccaagagcaattgaaattcgaaagaaaattcaacatatcaatataccactctgcatcataatctctacaatcctcataaatcgccatttttccactcaacaaattagatgactctatcgatatgattgtatcaatagtaccttcataacaaaagtattctaattccggagctgattcaattgtaaccttggcctcccttgagtaacaattcttaaaatagaaacttttcaagtgttgactcgagattttgagatgacactcgtcgtagtaacaaggtacattcatgatgctcaaagtcaaattctcaagaagaggattattagaaataagagagttcaacgccatcaccccaacatgcgttattgatagatcattcatcgaaagaactttaattttgttacaagttgagagatttatattcgcgaaagaattactaaatatcgaagaattactagtaagtaccaaagattcaagatttatagcatcaatttgtaagtctttcacatatgtatacaccaattccaagttcttgaggcttaagcttcgcaaccggtgcataccatcaatttgtaacaaaccatgccaacataaccgaaatttctcaagagaaggacaacccaacaaaaacttgaataccacattgggatcatatttcacagtatatgatgtcttaatattttccaatgacaaagtttttagtaatgggaaattaaatgaatgagatttatccaacattactccacataactccaaattagtcaaaaattttgtattgtttaagaatactttaggtaagcagtggtaatagtaacctctattgcttttgcctatggatagagagatttccttaatcttgttcttcttgactataaaagctaaccatttatttatgaggtgagcattacttatttgatagaaacctttcatttcaagcttaaaactagttatgcatgaagaaccaagaacacgatgcatacctttcttgcgttgtttaaaatatttttcgacgtaattgtagaacttttcttgctcattttcccattcaattccgaaaacaatattcttattggagaaaaagattgtgggaactgaataccagatgagtttcca

SEQ ID NO: 394845 - DNA, 763 bp, Cannabis indica
aaatatatatatatatatatatatatatagatataatgaaaaaattatcccaaaacccaacccgtcttgattaaatgtaatttgctgtcaatggtttggttaatctaaaaccatttacaattacttaattggtcacgaatttattaaaattctaactagtaattcaaaccagactaatttatatattctcttattatatattcttattgtataattttttgaatgaaatataaatatttgagaacaatttttagaatattttttattgttatttatatattataaacttataaatgtaaaaattatgaataattacttaaaaaataaaacaactacaaaatacaatttatgattataaacaaaagcatttatttataaatggattagtaattaatttggtttgagcatttaattaattttattttattttaaatatacttttaaaaaaggtttggctcaaaaaattttttttaagtctcatgtactattatataaatataataaatcagttacaccttatttatgtaaaaaaaaggaaagtacatatacaagatagaaaaactatggtgactgagtatatatggccaagtagacttggccgctggacaagctaaattgtttctcattttcaggttgaaaatttaattctatatgtatgaattaacctcaataaaaaatttaaataaagaaaagttaaatcaaaatagataaatcaagaacaaaacccgcaaacacgtatcaaatcaaaaacataaacacatga

SEQ ID NO: 394846 - DNA, 1043 bp, Cannabis indica
aatttgttcattagtttataaaaagttaccaaaatatactttaaataattataagatatataatatgatctaaatgtaactaatttggcatattaagattttcaaaataaattttagaaataatcaaaaatgtatctcaaataatataacataaaataagtttttataattgataaaaaaattttgactacctatcctacatagcttttttgctaaataaattatatatgataactgtctgaattatataagtatctctgttatcctatattgtaatttattggtttctaagtttgaaaataatacaaaaattagctaaaatataaatttaagtttcaattaattaattaaaataaagttgcttgtataaatgtaattgtactattttattgatataataggtaattaattggtttattttgattttagaaataatgacaaaatatatattttacaaaggtagatcatgaaggtgtcattgagctcaaataataagtaatgttgtcagaatttatttttgaagttttaagaagtgagaaaatatcatgatagcttgtttaaggaaacaaacaaacactaaatcagggatataattaactttattcaggtatataatagttaacgtgttgccgtaattgtataattttaaatttgtacggtattattgtaattgatttaattattatgtatagatataaaaatttcccaaaaaaaaagtagttgtcaatttatcaattaaaaaacgacacaataacattaataacggtacaaaaaatattgcgaccttattattaataataaaatacaatttacctttgtaaatgtaaatttccctaaattttactgtggtataattgaaaagcaatcatgtaatacatatatgaaataatgggtaatactcatattaatacttattaaataaatttaattataactattaattttaaaattattaaaccattaaattttaatttaatgatgaataataaaatagaaatttaactatcttttttgtttgtcgaaaaacttttttttttaatttt

SEQ ID NO: 394847 - DNA, 979 bp, Cannabis indica
acttcaaaaagcattttttatatatatttttacagaaataaacataacaacttaaattgcaactaaaatccacatggtaactcacataaaaattattaaagaactcaaaccataaatttcttttttttttaaaaaaaaataatatatagaataattaaaaaaaatccatgttaatattaatctttgaattaatatatacaagcttatttgttttacttggtttaaataaacttatttgttttactctatttttttctttattattctttcgctatatgtatacggccaagtcatatcgcataggtatatattgttttaatcaaaattaaaataatcaatttttttaatggaatgaaaaaagaaaaattgcgcatgcaacacgctatattataaatttgtatacaaatttaatttaatttatgtaataaaacttgatataaaaaaaaaaggacaaattaaagtatatgtatatacaggttcagtttggaggcatatatatacatgcatatataatggtttttttttttaacattattaatatttaattaattatataagtagaacaaatccctcaaaatcagcttttataatatattttaactaacaaagatatattagtcaaatatgataatttaccgtcattatagttgagacttacttctcctgttaggttaatctattcaaattataacccactcacacatagatattattctacttaataactttctttttcaatattttaataaggttcactttataaaatcacatagaacaaaaattttagtggagcattatatgtttgctcttattttggagaaaccttttgttttaattagcactaataaatattataacggaaatttacaaaaatactgaaatttaagtaaatttttacaaaaatactatcacacggaaattttttcaaaaatactctgtttttataaaacatcagtaaaacacaaagcataacaactca

SEQ ID NO: 394848 - DNA, 540 bp, Cannabis indica
tacgtggggcgcttcaataaagagaaagtgttcattaccaattgcaaccagcacacagccatcttagccttccgtaaaggacttcgctacggcttagatttatacaaagaactcaccaagtaccactgtaagactatgaaagacgtcctcgctaaggcatgggcccaaatcaagtgggaagaagatgaagtcaactactacagatcctctccaagaaaagagactcgcagagattctagagtagacagatgacacaacaacaaatggtctgagccatacccaacttctaacaagctagagaatcgaagaagggattacaaccgacccactaacacatattctcgaaatggaccaaagatgctcgagtacaacctgtccatctcatctgtcgaggttgtacaagtacttaaggggattaaaagtaaagtaaagtggcctgagaagatgagaactccagctgaccagagggacaaaagcaagtggtgggagtgttgggattttatgccctaaataaaatccattacaatacaatctgatttg

SEQ ID NO: 394849 - DNA, 859 bp, Cannabis indica
aaaatataaggtccattttatcaacatctaatcgataacttttgtaatacacaaggtctaagatgatgtttaccttatttataatcacccatacttgttttatcaagctatttgcaaaaaataaaatgttagaaattttattacaaaagataaatcaagatattataattcaattataaaataatacaaggaataaatattaattatatcaattttataagaacatatctttatatattaaaagtgattatttaataatattttttggtttaacaattttttttaacgttattttttatatagggaaggttaacgtttgatgtttgatgaaagggtcaacgttttagaaagagaattgtaataaaatttatattttgaagtccttgtatatcttagagtggccagttgaataaaataaacacacctatataaaatatataaaatttaaataacacactaattaaaaatattaaattaaaatgagactttttaaatgttgaaaaacatttcaaaatattattttataaaaaaatttatacatgtggaacggatcgtatgtcactgctatttcacattattcttagtataaatccaaaataaatcgccatatatggtaccaaataaggcacaccaagcacataaacatattaccatacaaagtacaaaataagtcacaacttacatacaaacaaactactaaattcatagtacaaaataatcttcaagagatattataagataaataataaataatcaattacaacttctttaaggaaaaaagaaaagctacattagagcaaaagaaaagtaatgtctatgttatataacaaaaatagttagttattttttaaaaaattaa

SEQ ID NO: 394850 - DNA, 1013 bp, Cannabis indica
gaggtagatttgtctttaatcttctgtacattcactctaagataagatgaatcatgttccatatcaaaactaattggcaaatcttatatatatcacaaattatttttatacattaacaatgtgagactaataagtgtaatagaagtgtttctattaatccaaatgtgataagttgcagctgccaaaatctcagctttcatccctttcttgaagctttcaatccaacgcagtcattcctcatatttacacccaatacaactttgcagaagctgacccacgcgcttcgaatagatacagtcaaaaaacaaatgacagtgatcttcctcagtcatcccacaaaatgagcaaagacaattctcaacagggatatctagcatcttagcaggtgatctgtgtagtaagtaaatagaaatttacaacctaccataacacaaaacaatgttttggaatatcaatctattccacacaaatttctgaatatggtcaatttattctcttcaagcaagcaaatatacaatctgcctataaaaaaaaattccaaaagccctagcgaactcaatgtcttccttagaaaacaattgacgaatatggcatagcttgtgtccgacgaaagttaattgcgataaataaaattgcttaaagaattgtataaccaattttttttacataagcaattaagtgcaataaatgaaactagattaagaacgaatgcgtttggtaatacttttttaataaatattttattttttaaattaaaacataaaaatattttccaaaaacatgttttataaaaatgtttttactttttcaattgtttaattgagaattaaaatttttaaaaaaaaaaatcacttttaaaatttttttaaatagatttttttaattaatattttggactccgaccctaactttaaccttaggacccggactccaacctcagctacagttccagactcggacaatgatcccaactgcagtcccgaattctagacctaacttaaataaaataaaaa

SEQ ID NO: 394851 - DNA, 780 bp, Cannabis indica
agttcgagtactaactgttttaattgacagttaataagttgtcttgacatgtggtcaaattacaacaaatgacccaccttggtcatatgtcaagtttttattccattgagtggtgactgatcctagtcttagtaatctcagcagcttagtatatttagcaagtttatacaaagtattaattgcgtggacaaataagagtataccatgtgtacacttgttcacttgtgcaatacactatgtaaatctaatatggcagttaacactcaaaaatgaatggaaatggtaatttgctaacagaaaacgggtttggggggttttactgctaaaaaataagtttgagaagttaattgctagtaagataatacttctgaggattttgctgcaattcactcaattttaaataattaatcactaaattcgagaattgtgcaaaatgctagactaagggcattcatggtttatacatcatatttaaaccccaatttcatttatatatctttaagttacatattttagagacaatttgaaaataaccaacaacatcatatatgtatattttatcagtaacacatatatattcaagattaataaccagtaaatgatatactaactttattaacgatacataataaaaattaatgaccaataataatcaacaacatcggtgctaagtttatcaagaagacatgttcaagatcaataactgataatatttagtaactttcaaatttttcaataatatatatttaagatcaataactaataacaattaataatttt

SEQ ID NO: 394852 - DNA, 669 bp, Cannabis indica
ataactaatcctattcttcaacacattagtatgttagtagcagacatgagtttgtttggtctaattttgacactgcttgaagaaaaaagaaaaaaaaagagtgagaatagttaaaaaaaaaaaactggtagttcaaagtgtccgggttcttcttgagaactgtaaacttgtcagtcagtatgtaatttcgttcaccaggcattaattccattctcgttgaataaggtaactttgactgcccagtagatattacaccttccattatatataaatataatatatatatatgtgtacgttatatatttacatttccagtgtgagatcaggtatatatacatcaaaacccttaatataatcatgatgtttaatttttgtatttgctgaatccaagtgtatacatattgttgatgaattaccagttcttttattctagttattataatattataacgtggtataaatttcataattaattatgaaagaaagtcgctctcctaacaaaaatataaaaatgagatccaaacatttggaattatataggcaactagcttctaccataaacaatattggaattatttggcaaaaacaacaaaacaaaattataaaaatgtgattgtactaaattttaaatatttttaccattttgtataattttatttatgaaaaata

SEQ ID NO: 394853 - DNA, 820 bp, Cannabis indica
aattataggacaagctgacttaagtccttcagtatcaccctctggaatgagtatagcagtggcatcattcgagaataaaggtggatgggatggtgagattgaagatctaaagacagacattattgttatgaatgtagaagagccttgttgtcgcagagtagttataaataatggaggttggccgagttggggaagtgactttgtcatatttttccatcgtaaggttggaaaatattggggtgtattcagaactgaccttagtagaggagaatgcattcgtgtcacccctgagtacacgaatgcaatgactcccgcggctattaatgcgaccactgtggccgttgcagttattcgtggagatcatcgacacattgtagttttttgactctactcaaagaatgcaacccaatcaaatcactttgtacatagcaccagaggctgaccattttaacccttttgtcattgatggtggaaaacgcattggttatcatcgtgctaagacaaactttctacaggtacacttcagaaaaaattgtgattaagtttcgctttcaattacaactaaaatttgtctgtaatttaaaaatagtacttataaataatttgtgatttttttcactaatatatacattaaatcacaattttttttagtgataacattagttttacaaaaaagaaaaaatatttactataaaattactaaaactttgtgctttattgcataaaaaaatggatgtaaaatttaccaaagtgttactttttctttcattagttttgtttgtgcaacaatttttttttatatatacaaggtgattgttac

SEQ ID NO: 394854 - DNA, 1080 bp, Cannabis indica
tttagtttagtataatacataatagtaatgataatatatagtaatgaattaagataagatagtaatggaatatattactatgtttgattcaaataagtaataaaccacttgagctagtgtgtgagtgttggaggtcctgggttcgagtcccaagtaaaacatgttgtaatatataaacgacttaaaaaaaaaaaaaaattcaaataagtactaagaatggggctttgaaatttctttctatcccttgcaatcattttcctattattgattgtgttatgtgacatttatgtcttcggatttttatactgtcaaaagtggatattaaaaaccattggttcattggagattagcgaagtttcaagtttcgatgctatgaactaaaatttagtaattaaatattccggcaaaagtgatatttttttttttgtgtggaaaggtgttaaaaattggttgcttacattttatagtttttatactaatttagaaaatagatagtaaaaatataaaaaataaataaataatattaatagggttttttttttaccaaatttggtaaattattataagtacataaattatatatgcacgatgatttgctgatcaatctctgacgatatgatccaaaaaagattcccatattaatttcatttaattaataatattgtctcatctaataatcaaagattatcaacttaattaaatactactaattaatctatgaaattataatatatattacattaattaatcgttaatgaaatgatttatgatctccatctaataattgattttgtgctgtcaaagtttttaataatatataattagataacaaagaataatttaggtatgtgaaaacgtggttaagtatataattataatactaacactattattatttatatatataaatgttaaatattatactattaacactatataattatttagattatcaaataatccttattattttatattatacggatattggcgatcacaataagatcatatacgtattattaaatatttattagctaaaattgtattgactgaccatgttctctagttataaattataga

SEQ ID NO: 394855 - DNA, 1588 bp, Cannabis indica
gagagaataaaagttgaatgtagagaaacgataccaaatagtgacaaaagaacaatcctatcaataaaaatatagagctctacctctttctaatctttgagatagaaaatgtgaaatacgttggaatcctacttaatggactagtgaggatacaacttacaatactagaaaactaaacttacccaaaagtatttttagtaaaactttaaaaatgtattattttagtctatttatagtaaggatatatatgtaactaattttcagtataataaaaaaatgggccttacttataaagtttgtcgtgtgatcatgaatataatgctcctatatctaagggcattcttgattgaaaaaaaaagaagaggaaaataaaggtatctatatgcataatctatcaagtttcctattaatttaagagtaatttgtggcataaatatataagcttaatttttaattataaataaatacttaaatttattttatgatcgtattaataagtaaattatatttttgaaattctaacctgcctgttgaatattaagtaattatttatgtgttattttttattggtttatttaaacagtttttttaaataaaaatttaatgacttgaaccaattaagaattgccacgtagcaatttacttaacacttaacagcgagatacttacaaatatttcaaagttataacttagtattattaccgttaaaaattaaatttaaatatttatttgcaacgaaaacttaaatttaagtatttatacttcatattactcttaatttaaagaattcttataacgtcgcaccactaacaccctagaatatgattgatataattacaatttaattgtgagtctattatattttaacttaaattggaatatatgaaaattgatatttatttgcactagtaatagtattaatgtttatggacattgttccatatagaataaatagtagagaattgagtcatatataagaatatagcgtactccactcattaccaattggttttgagatggaaccccatgattctcaacatgttatcagagccatatcccttgtgggcaagtaatcttatccgatccgcacctatacagatagcgaccatgtccactctgatacggttcaagattgatgagcaaaaaatagccatcatcttgagggagaatattgtggacattgtctcacatagaataaatggtagagaattgtgccatatagaagaacatgggctactccactcattgccaattagttttgagatggaacctcatgattctcaacaatattgagcattaggaatagggatacatattttccctacgggaatgggccctacggggattcgtccctaatggggcgagaattttcctgtctaaatggggaacgggacggagacggtgattactttatgtcccgaatgttaaacgaggcaggaacggggatcacactccccgtcccgacggggacccgtttagtattttattttatctttctagtaatattttataatttctaatttatgtttgtattttttagtatattagtattttttttttatgaattttaagttgtattttgaataat

SEQ ID NO: 394856 - DNA, 720 bp, Cannabis indica
aataaattattttaataattattattagtatggtaaatatagtagtatctgcaaaagtaatagaatattaaatgtgtgttaatctcaattttttttatatatatataacgtaagaaaaaaaaaaaactaaagtagattcttttagagaagagaagtttgctcgaaggattttcaattactgagatagttgtaaaaagagagagttaggagaattgtgagtggtacataattacaatgtctacaatattatacatatttcaaatattgtctattatatatttgggtttgatatagtgacatcctgataaaaatattaaaatttttgatccaataatcagaatcttactacatttgatcaattagtgttatgtaaattattaaaaattgtacttaattctaacccaatacatatgtgatttatcgaaatgagaaaaacatgcatagttagtgtaagtaatacatgagagaagctttgaaagataaatttttcgaaatacaaatttaaaattctatattttcaataatttataacatttactatcaaataatttaaaattatacatatttataattaaaataataatttaattaatataactttattggtctcaattatatataattaactatttacgtaacaaaatttgaattaaattcaataaaacacaaaataccaaatgagtacttattttcactttttttttttatcttcttaagaaa

SEQ ID NO: 394857 - DNA, 1019 bp, Cannabis indica
gtttctttgttcattatgtagacgaaatatagtttagggatgagaagatcataagaaatgtgagtatccattcaagcaattgtattaattttttttttttttttttttctatttttccccaaatttattggagtatagctgttctttgtgggaacctctaagttgagggcttaaacgattttgatttcccattttaagagacattatagtacgatattctttctgttatatattcagtcatgactcgtgtggtatattgaattaaacgcattatgatgtaattcagtaaaagcatttttttcttgagagagatagaaaaaacatctttgtggagtttaaagtagctcagaataattaggtttggtgtgtttgtttaattaagtagttgtaccataattttataattacaggtaataataagagtgtcccgtgagatccaaatgagaatagtgtaattataaaatattattatatttaaataattaacttttagaatgttaattcttttgtttactcattaactcttttgccaaatataaatacatgtaacagtaattactactcagtatacaaacacattttggtcaagcatggatgccttttgttttcatatacacctttaataaaatccttaatcctttaagttggatttcgtttggtaaagaaaatgtagaaaaagaaatggaaaataagataaaaaacaagtctcatgtttgctattggaattaaaaatattatggaaaaaaatattcaacaaaaattttcaaattgattttatttaactctttgcacttatttgtttttttgtttttttacttttttctttccacaccaaaattttacttccaaacatagtgccattattgaaatattacaaaaactaaattttatgtacttttatcttcccaaacaaaattaataacaaattttacatcattggtaacgtgtaatgttaggtaacgtttggttagaaataatgaaaacataaaaaaaaattaaaaatgagaatatgaatagaa

SEQ ID NO: 394858 - DNA, 1863 bp, Cannabis indica
ttatcgtgctatagcctttgatttcagaggctacggactctcagatcagccattagagcctgagaaagccacattccaagatcttatagatgatgtcgttggcctattggattccctcgccatcaacaaggtttatcgtttttttttttgataataattaaaaaaaattatgtaaagatatacttttcacgcttttaactaatctattgctactgaattgtgttgaataaaaaaacaggcttttttagtgggaaaagattttggagcttttccggcgtacttagtagcggcagttcacccagaaagagtatcaggagttgtaacactaggcattccttacattcttccaggtaccaattctatccaaaaccatctccttcctgaaggcttctatgtcgcaagatggcaggtaatttcttcttttttgttgtcaaagataaacaatgatgactaacacaactgcctctttttttttttttttccatgttctctgttttcatcaattattcgcttatatctttacttagaattaattggtcattatgaattagataccgggtcgagcagaagcagattttgggcgctttgatgtgaaatctgtggtaaggaacatctacacactcttctcaagaagtgagattccagtagctaatgaaaaccaggaaataatggatttgtttgatccatctactcctctaccatcttggttctctgaagaagatctctcagtctatgcttccctctacgaaaaatcgggttttcgttatgctttgcaggttccatacaggcaagaaaattctccaaaagaacttgtatacataatatatgtatgattaattgtttgtgatattttactagttaattttgtgcaggagtttgtcagtggatattggtataagtgatccgaaagttaatgctccagcattactgatcatgggagagaaggactattgcttgaaatttccagggatggaagactacataaggagtgggacagtgaagcaactggtgcctgatctggatatcatattcttggaagaaggatgccattttgtgcatgaacaactaccacacttggctaatcagctcatcataactttccttgacaaacacagtactgcggcctcataaaccatgtcttttctttctttaaacgtgtatgtccgagaccatgaaccaaaagataatgatttgcctttttactatgtcacgatgtatgcaaataagctgtgcttcacattctgaagcactaaaatgaatggccaaagttaatttacacatttcaacttcatttttgtctcataaaacatattgatctatgtggtatagtttctctaaatgaagaaggtctccaaaagtcattcctgaaaagttttttgtctgccaaaagtatgttcccaaaaagctaacttctccagtccgaaaggaatctcatgaaatgatagttgccatccgaaagggagttcttggatggctatcatgtccaggtataggcttcaggaaagctaatcctcctcctgaaaggagtttcgaatgagtagttgttcctcttggaagagagccccgaataatcgactcgagctggttctttcctatccgggaagtcccttcaacgagtgccttgttttgtgatttcggaagctctcatactcgctagcggatgcacttagacttatgctaacgttgagatctcactcaaaggagagttgcgtaagttggttattgctcaactaacttaacaaccttgcttcttgcagccatcaattttaaaatcttggtcgtaaggcctataactaccacatacacttgtctattcagaaaatggttcagattgagattgagaggtatatatatatatatata

SEQ ID NO: 394859 - DNA, 754 bp, Cannabis indica
ttgacaagccaagacataaccatgtgttacaacgaatccaagaagggaggagaggattaccagtagctgggcgaggcagcgagccgtcaatgaaggcagatttgtcttggcagtaagagccattgtgattcctcgcttccaggactgataattggctccattaagaacggtagagaccaagactaatccgaggtgatctgcggtgctgagaaaaaaaggacttgagacatcttcgtgagctaatcgatcaagagatgaggttcgacgagtcgaaacagggggattagtgattggatctgggaaagattgagctggttcgtcatggtcattgtggcttcgagttcttgaattccgtcgaggtgcaacagcggtgtcaacgacaagttgggcggaagctgcatcaggattggactccgaaggattggtctcgtgtgtagatggaggaccaccatcttgagaacgagttgtgggtcgcgccattgatgcagaggcaattgtttctgctgataccatttgaggaaaatacagagcaagacagagcaatacaaagcttgaatagctttggagtaaatcttttattatctgataaaattgtcttacagtacaaaggaaaagaaggctatatatatatgaagtaagggctgagttagttacaactaactcagcatataacagaaaaaataacgaacccagaaggttctggtacagagaatggtaatatcgtgataatattacagttctcttacacccgtta

SEQ ID NO: 394860 - DNA, 1512 bp, Cannabis indica
tttcttttaaaattatattctttaatttcggtatgtgtggaatatatgtaaggtacaatttttggagtccgtgtttttttaataaaaattcttattataaaagaaccaacttttaagcactcataacaaaaaattaggttataaaaaaaatgcagttatttatttatttttttattatttttttttaaaaaaatactcgaatataaatgttgttaataattgtacaagagtgtagggtacctcttgttattggtatttactctcatgggtcattcatgtttttcaaaaatccaaaactttgaaaaaataaaaaaagaaaaagaaaaagtaatagtaaagtttttaaaaaattctacccactaataatggactatctattttggtatttggtagttatttaaaatattaagaaattttaaaaaatttaatacactgaaaataagattcaaacaatatattttacaggcatataaaataaaaaatctcgcgtgcaataaaattatttaaactctattttcgacgtgttaaatatttttaaatcttttaaaattttacaatatattttaaacaataaaaaaattaaactacaaaattttctaaaataccaaaacatataaataatatgtaaatagtgattttttggagtgaatgaataatgatataagtatcaaagttttaatatcataactttgaaaactttaccaaatttaccaacttttttggtttgtaataaatatatataaaattataattatttattatatatatacaaagaaaccaaccttttctcatgccttatgtactactgattcaaaaaaaatgaaaagattcaatctttttcttcccttactactaactctacttaccttttcttgttttcacttctctaatgccaaaaaccctaagaacccatttgccattaacactcttagacctctttcaagccaccatggaagctcaagctctcatgggtttccatctcaggtctttaatgtagatgattttggggccaaaggtgatggaacagatgacagaaaggtaactcttttatttgtttatttttcattttttttttggggataatattagttaatattttgacaatgaaattgattggtacatttacataggcatttaacaagacttggaataaggcttgttcatccaaagggggtgttttttggtcccaaagaaaaggacttatcttcttgggccaatgaatttcactggtccttgcaaatttcctctgcttactttcaaggtcagttacttatttgttactaccattagtatatatatttgagttaataatttatattagggggataagtacttagtaaaattgtaaattttcactaggctacattttaaatttattaaaagaatatttagaagtaactcatactacatgtttttgtctagatccaatgatctagattctgggtcttatatgtgtcatatttaagacaacgatgatattaaaaaaaattacagttttacaaatatttggta

SEQ ID NO: 394861 - DNA, 1105 bp, Cannabis indica
ctggacttttaaaatcgttaaaagtttctcctgaatcattgagattgatagatttgaggatttttgtccaatttagtaagaaaagtctaatatagatgaaagttcaagtggcttgatttgttatatgtcaaaattcaagagacatgatttggtagatatcaaagtctctggagcatgatttagtacacgaacaatcacaaaattagtaaaattgaatgaaattagataaatgtccttgaatccaacaatctcaatagtcattaggaatttttaacagctaaaacagtttaggagacatgatttggtacatttcaaaatttaagaggcaaaaatcctaattattattattattattgttgtttttgttattggtttagttccaatcaacttgacttttagtcatcatggaaaaaaattttgacttttaagtggcgtttggtaatatttttatttttaaaagttttaatcacaaaaagtaaaatttttatttttataattttattattgaaaaaaaaaatatgttctataaccacttttatttttaaattttaataagaaaaaaaaaaagttattttttttttttattaaattttatttttatttttatctttttatttcatttaagtcgggttcaggtccggagcaggggcaggagtcagagctaggtccgagtccgagtacagggttggggctggggtccaagtctaggtccggagtcgagtgcaggtttgggatgcagggcaagggcaggggacgaggacggggtccgggtctggggtcggggtcggggtgtgggtccgggtaatagtttgggtctagggtcgaggtccggttcgactcaaggtctgagtttggggtcggggttcgactccagggtccgaggtcggggttcgactctaggttcgggctgaggacagggtttgggtccaagtttgggcggggtcgaggttcgggtctggtgtttgaatctatggccgggtctagggtacgggtccagggttggggtcggggtctgggttcggggtacggggtaggggcaagggtacttgtaacgtccctgcttcaagcctccattgggttacacccacggaatgaatggctctta

SEQ ID NO: 394862 - DNA, 1009 bp, Cannabis indica
taataaataacaatatagaggagagagagaggcaatagccaatagtaaagagaagttgaaaactcactcaaagtaagtagctatgagttgagttactataattcattcattccaaataatatcaaagccaaactcatctcaccctcacgtgctctaaccttatttgttcctttatttgtatttttttcttatttactttatttgtgtatattttatttaattatttgcggctatggctgctttaaagtttattattattattattattattaatattatatatatataacagaaacagaagagagcagcccaagttgaagggttgggccccactcaaccatcttggcatcttgtcttgtggaacgttttaatttatgaaacaacaacatatagcaatattatttgtccacttacttacaacttcgatcttgtcattatcttaataatgttactatatacaaaatcaccatccaatgtgttaatatatatgttattttcactatatattacaacaaaatgattaatgtacattaagaagattattattattattattttgtattgctctctacttgtcaattctatatcaatttgatcagggtattaagagatattttagtgttttttttgacaaaatgttttagttttagtatatgtaaatggaaatattaaatataataataggctctataataataataataataatataaaagagggtgagatgagattatgttgcaaattagatattcattaagtcaaattaaaattctgagaaaactgaaaaatagtattagatatatattttcttttaaaaaaaagtataatttttgtggattattatataaatatatcatcatattttgattttaatatattttttaggagtgctactgtcaacttcttagttaacatctacgcctgaaaatacacgtcgaaatacttttttttaaaaaaaatttcacgggatgttcgttatgcttacaacatcatcccttaaaaaattttt

SEQ ID NO: 394863 - DNA, 714 bp, Cannabis indica
catctttttcattccttctgacaagaagagctcagcttcgagatgaagaagatctttctcgccatagctgacaactttggctcgtcaccaattcagatagttctcgaagacgaggacccaaccttcctcaagtaagctgtggatcttgaagctttgaatttaactaagctcttcacggattagatggttcttgagagggttagggtgtgtagagaaagaaaaaggaaaggaggaagaaggagaacaatgaaccatgatgttgtcgatggttcaaagggacaaaaatgtaattatttatttatttttatttttttttaaaatggttttacaatttcaaaataatttttattatatttaaataattaacattatatagctgctaaaaatctgtcacatatatatttatgtatattgtggcatatccaacatgacacttaacagaattgttggatagaatagtaaatagcaaaatagaagaaaggttgggagagttttacccctaaaaatcagtttattgggataagtgtcacaaactgtatagttcacgtatcttcgctgccaatactcttataataaaatactcaattcaacaaaattttccatatcaaacttgaaaatttaatttagtttttggttctccacacttttatttttatttgttgttattatatatatatttctattgtaaggtttatattttttgttatatggtat

SEQ ID NO: 394864 - DNA, 509 bp, Cannabis indica
ttcatgcggctgctgatccgtgaatgtcgcctgctagggattggaaagttgtttggcttttgttgctactctggcgttggatacgttacatctgcatgttgctgaagctatggcgattcaccatggattgttgctttattcctctcttggttttcagaatgtgaaattaattgtcaacgtgttacaaacatcctgcaaaaaaaagaattgttgttggctaactttagttcgattctccaaaacatttatgttatttgtgatcatgtcaaagtgtttaattttttattattattataatcgttttataaattttattgctcataattaattttattaaatttgctttatcttttgataaggcgagagtgtggtacccgagttcattggatcttttgtgagtccttgtggcttggttttttggtcatcgtctgaaaaattcattctattcaaaaaagaaaaaaaaaaaaacaaaaatttattttttttattatttttcgaaataaatttta

SEQ ID NO: 394865 - DNA, 658 bp, Cannabis indica
agaaaaaaaaaagaatcagatctttcagagcgcaaatcacaaattcatgaaatacaaaaccgaagaaccctaaatcctaaaagaaaactatattaaaaggaaaggatcaaactaacctctgtatcttctcagacgacatgcgagagagaaaaaacccttatgcgattcaaactagagccgcttattccttggcttccgattttgtgagtttttttcttttctggattttgttagtgtcgttttggtttttgggtttttctttttcctttttttccggtttattagaagagagatatagagaaagtagtttatagcttttgaaagaatccagatatcgcgagtgaactctgatagatatttatagccttctctagatatttctgatattttcattatctctttattttacattaaaatattgaggacagcaatgacgtggctccctccagttaggcgtggcgtttcgtatgccgtaacttttgacacgtgtcactcgaaccttcccgaatcgctcatcgcagatggcacctatcgctttcttggtgttgaagtaaatataataataggcaagtttcagtcaataaatttaataaaggtaaccttttcattaaaaaaaaatagagtttttttttgcggtaaatccttctaattgttattt

SEQ ID NO: 394866 - DNA, 2264 bp, Cannabis indica
cacctctttatctctccatttagtgaacaaatgcctttgctcttcaaatgcaaggttcactgcagcacgaagatcttcttggtcatgatgtagagtattagtatgaccttgcatgagtccaagagcagcacgcaggttctggatctcaatgtcatctctaacggttgtttgaacatttgttgctggcaaaactctagtgttcggaatcccctgattggctactgaagtggtatctccagtctcttgcataccaaggtggattccattcagaggagacgtcacaccatgacctacggtcagaggttgttcaggattcgtggctagtggaacccctgcatttcctagattctgcagtgcgggatccactaccggtggattttctgaattgatcacgcctctacgagtttgtacgaccatcgtgtttatgattaaatttgaggacaagagcgaatttatgattcaatctctcaatgaaagtaccaaaatgttgacctcgcttttagccaacgacaatgtgtcttaattgtaagtgataattgatatatatatcatatgataagaaacggtaaataaagaacacagagtttttaaagaggtttgaccctgagcagttcggtaataggctactccccttgatttgtattgacttaagaacaaagaatacagttattcttctcttagagctcttacaatgatatctctgagtatactctcttagataaattctctccaccccctgcccagtgagaatagatcactatttatagggctatgagcttgagggacagtttcccttttgtttacagtgtctataattggtaagattacacattaaatatagaatacactgattgagggatttggatagcttgccatatctctgtgatatgatcccagagttatagggattgcctctatgattcacgatacaagtgttgaagttgctaagtgttggtatgttgttcgaattgtccactgctcggctaggaggacttcgtccgtgcaggtatgtgtggtgttctattcggaacatctttttcttgggcagattatggggattcgattccacgtgtcaccatcctgtgatgccacgatagagtgccataattgggataacaaagtcatatagggctggtcggcttaacatgatgttaaaagctgaagggacatctatcaccaagaactgagccattaccattatcctcttcagaggttgtccaactgtaagtggtaggaaaatttgtccaagtggtgctacactctggccgtagaatccatagaccaattgggtataaggaattaagtgtttaagccgaagccccattttttcatatgttgtcttgaatgaaatatttaaggaagctctgttgtccaccatagtccgtgccaccattttgttcgcaattcgcacctcgacgaccaagggtcgttatgtggaaaaaggacatcgatggcatctacttcggtgaatgttatcactagttctcctacacatggtgctttgagttttctctcctccacatcaaggatgacatattttattcatacagcaaggctcatgcatacttttctttagctttgcccaagtctccaacaaggtgcgggcccctaatgattacctaaagatgctcgtccactggtggaggcattagttagttttggttattatctatgtgggtggccctttgttcttggtcgaccttgataaatttttgtaagtgcgggttactttttctgatcaaaaactcaatctctcgctttcaaattgttacattcatttatgtcatggttgtagtctgcatgaaaacaacagaacttagttgtatgtcttttgctcatgtcctttttcatgggagtgggtttcttgtatggcatcatagactacgagtcacatagattgtttctatatcatctgttaggactgagaaagcagtaaattttgaaacattctcccagggatgttgttcggagttaccattgaacttgcttttcttccaattaccctgtctattaccttgtttgacctctttccattttgatttgaacttctaggatgttgtgagttctagatggatgcagcgactatagttgtaacgccctaactattaggaacgctacccaaaacacttaagaaaccctaatcccctatacgggattactaataaaattagcgcggaaattaaactttaattacaaatggaaggaaagtaaacttataataagttaaactttataaaattttcatgtatcgggatcccaaaaat

SEQ ID NO: 394867 - DNA, 1073 bp, Cannabis indica
aatttatttatatatatggaagattttttaataagtattatctattaatgattattaaataaatttaactataaatattaattttaaacatattaaacctttaaattttaatgacgaataataaaagataaattttattttttatattcaatttaaatacttatttaaaaaaaataaaaaaatacatatttttgcactacatcaaaaatatgtttatataatttaagttacattcaatgtttttttaaacttttttcgcctaatttttttttttagctgaaaaaatgagagattttttctaattagataaaaaaaattaagttttgccattgatagacaatacccattaaagtacattttatgtatatatattacaaaggtagctttaactttattttctatatatatatatatgtatatataaaaaatattaaaaaataatattaattttgtaaaataaaatatatataaacaaagttatttaattaattattacctagaacatcaccaactgtaaaatttttatccttagcccaagcttgataatcaaaattatcattggtccatcctttgtcatctccaacaatataatcagttgcaatagcaatagttggaagaacaattgctacaacaacaattacattcaaaaatctattagaaaaagccattatattaaaataaatcttaattaatattggaaaataatagctttgaaaaatttatattaattgatcaaagctaggtagtagtacatatgaactatgaccatatgagtctctatttaaatgaaaattttcaaaagtgttaaaatcattgaaaacttcgaataataattaattaaaccgtccatggtcggcttgctgagtatataaatgtgattaattatttaattaaggaaaatcaaataaattataaataatatcatcaatatgaatattttatatatttaaaataatattttaatataataactaattaataacaaaatttataagctgaatgttaccaagctatctagcaaatggacgagtatatctttatatattaaaagtgcctatctaacggcatttctt

SEQ ID NO: 394868 - DNA, 676 bp, Cannabis indica
agagagagagagtgagtttggaaagagaaaatgtgatttgtctaatttaaataaaatgaaatatttaaatgtttttctaactgaaactaattgaatactattatattatattacttaatttagtcccacaaaaggacaaaaacccaaatgacaaaaagactattttgcctatgcctaagccaaaaggcaaccttaccacctaggggtaatttagtcatttccaaaatctcaaatatttctaacattcccaatatctatctatattgccccactattaataaaataataaatcatagaaaaatgtgattctaacggccaaacgtcgcgttccaattttgttgggcataaaatatgaaaaatatgaaatttcatatatagcataaataatacacctagaattcaaataaatttcactaaattcataaatcataattaataatctaatttcataatcaagccctaaattatatactaaatctatattaaaattaagcggtcttaaaaattatccccccattgaaaggattttgtcctcaaaatctaacctgaacaactctggatgttaagctctcatgtcagactccaactccaaggtggcttcctccaacttactatttctccagacgcactttgacccaaagctatgatctgtttccaaggactttatccttctgtc

SEQ ID NO: 394869 - DNA, 879 bp, Cannabis indica
acctagattagggatggccaaccatggccagttacctaattcagagctggcttgccaaagctagttacctaatctagggctggccggcatggacacaccctcacccaggacatggtcggccaaggtcggccaaggtctggccaaccaagggctttagcccagccaagaaaaaggccactcactcaagttcctactgcatcaaatccttttgtgcaagcacaactagattaaataagagatataataaagggcctacctagctcaaaactgtcaaaactatcatgttgtgaaaattatgtacatgcaagtgcacatagtcaaataagtaatagagtgataagtaagatcatctccacaggaattgcaaacaaaatacaatgtaaaacaaactaattacaacttaaagcaaagaaaaaaaaaatgagaatggttgagcaatgattcaaaatttaaatgattgtaattaaacttgctaaaattaatgctactgttgctagaaaatttcttacaagaaatgtagtatggtgaaaagtggcttgaatagctaatccccccatagtcaggtttttcccagttgttacagcatagctttagtattacttcagtatttttgcacagagataacagaaattcttctattcttatgagaattttccaaaactcacaaattaagttctaccacttcgctcaatatattcctatatcaaactagattgcagaatactatttaaacatcaattcttaagttatgcaaggtaaatgaaatattcctattcaacttacaaagaaaaacataaatctaggatttctcttgctccatccaagtttaactactagatctatctagcttaacaaattgttacttatggccaacaaata

SEQ ID NO: 394870 - DNA, 841 bp, Cannabis indica
gtttttagtttctcgttccaggctctaggtgcctgttttaagccataaatggctttgttcggcttacaaacatgagtcggcttttgcttatcttcgaaccctgggggttgaaccatgaacaccgtctctgttaatgtgccattgagaaaggcatttgacacatctaactgagttactttccattggtatgacactgcaatggtaagaattattcgaatggtggctggttttacagcgtggctaaacgtttctgaataatctataccaggggtttgatgatatccttttgcaactaaacgtgatttgcacttggctagagtgccatcagcattcaatttgaccctatgaacccacttgtttcctacaacatgcatgccattttgatatgggactagagtccaggtcccatttcgaactaaagccacaaactcatcagtcatagcaccattccacttagggtcggctaatgcttgtttaagtgaggttggttctttgggtagaagggattcgggtagaggatatttggtagctagataggctttgggtttgtggatgcctgatttggccctggtttgcatagaatgtaagttggttgttggtgtaggtggaagtggtggattaggataggtgggacatatttctggggaggtgtttggttctgaaacaggtgctgagactggtgctgagacagatggcaagatggttgtaggagcaggtatagattgagagctggaggttgattgatgtcgtggctcttcagataacacgacagcaggttgttcctcagtgacacaatgagacaaaggattaggtgctgtgttaaatgttgcagtagcataaa

SEQ ID NO: 394871 - DNA, 567 bp, Cannabis indica
gtgacaatgccaattttgacgacctttctaatactggcaactacttcggtaatttttctgacgccgacaacaaatttaaaataattcatcggaattagcatagtcgtcggaaaaataccaagaattagtttcttcatcaagaaatttttccagtaatttttccgatgacaataccaattctgacgatttttaggcgtaggcagcaacttcgacgactttttcgacactggcagctatttcggtaacttttccgatactgacagcaaactccaaaaatttgtcgaaattggcattgtcactgaaaaaatcaccaagaaacaggtttattcatgaagaaacttgaaaaatcactaagaaactggtttcttcagtttcttggtattttttcggtgatttttctggtgataatgtcaatttcaatgacttttccggtgtcggcagtaacttcaacgactttcccggcaccggcagcaactctggcaattttccattatcgacagcaaactcggtgccttttccggcgctagtgacaattatggcgatcattgtagtttcatttgttttatt

SEQ ID NO: 394872 - DNA, 513 bp, Cannabis indica
tttttttatttatttataaacaatataagaaaaccatgctaaaaaaatatataaacaacattatacacaaaacaaaaaataaaattatgtattagaaaagaaagtaaaaatgaaggactaaatcatatcaaataattactatattaattaaataattaaaattatttttggcatgtaattacacaatataattagagttagagagtaattgaagcctcttaataatctctaattatataattaatgtggaatgaccttcaatcataccaaactatataattatcttcacttatatctaattccaattctcaaaggcttttcaaacaagctccaaataaaatattatagtaaagtaatttgtatatatttttttcatgaaaaaaatgaattgtcatgattttcattattttcaaatttacccatgatcctaatgaaagggacgattcctaaagcagaagctattatatacattgaaatgaaacgaagagaaaaagaatttaggtggcgtttggt

SEQ ID NO: 394873 - DNA, 1202 bp, Cannabis indica
atttatttttatttttgtgattgggtgaactgacttaatttagtttatgtataaatgtggtctccattttaaaaatatttacaattaaatttaattttatttttttattcaacattaaatttaaatttattgtgggtaaaaaatatatacaatttatatgtatatttttattagcattacttatatatatatatacatagtactaattactggttgttcaccaagctcatctcatacaaaatatatgcaattagtggttgttataagctcttaaataaagtatctatatcgtaccttaacaaaaaaaaaaagcatatatcgtgatgaaggttaaaattattgctcgagtatattatatggttaatattaataattaaatgctcatgcacttgaatagctaaaaaatgacaaaattattgatatgcaacaaactaaattaagatcttgatactaaagtttgagaagacacattgtctttaagcatgaagtcaattttaaaataatatatgcagaagcactagctacttatagttgttaattaattagcacaaaatatttttagtgtggtggcttaattagtagttctagatttggttccacatttatattttattgtttgttataattgatcttgctgagggtaagagtggtagacaaggtggtgagagttgatctaaattatatggtggcgcatcacttgataatgtatgctaattaatgtttattaattgcttcataattttcaatttaatagaaaacttattaagattatatatagatatagaaacttaataaactatgtttgactagtttgagctctttatggtagggaagacggaagacactctctttggactaatcttcaaccactataaataaataaagatatgactataaagaagataaattttgtatgattaaatgtgattttttattataataaaaaattatttttaattaaaatataatatttaaatacaagatgatattaatttaattttagtcacaatgaattataatttttatagctaattttttttttattttacacttcaaaataatttttttttacatttttacggaattttacatagaaattcctattgaaactagcgctgcaatctaaattgtaacaaaaaatcgtatagaaacccctactgcaactagcgctgcaaccactttagaaactcaaaccgtaaatt

SEQ ID NO: 394874 - DNA, 1857 bp, Cannabis indica
tttctttgtggtctttttcgttttttaggcgtgtgacagttctacctaaattttctattatgatagctttgggtgggctttgataggcatgcatgcatgcatcaacgttttgtctccacttctctcacttttcatcatcatgatatagcttagctactcaactttctaacactattatctgtccatattagaattagttagaactaatttgacagcattggttatcaccaccccaatgtatattatttatataagagttggatttagttggcagtaggaagaataagttattttgcattcatattctttctctatatacgttaaggaatctaaattaaaaaaaaaaaggtgatgtaggtttttaggcaaatatattgttatacactcttttcattcaaatcacaacactaaaaattataactaaaaaaatattattatattagtttctactatcccataaatcaattcttaaactttatatacataaataatataattagttgaataaaaaagattttagggataataagtgccactacataaatgtagtccactgcatatatattggacgaatagtgttgggttggagtagaaattagactattctcaaatttgatgctacgttggagatggccttaggaccataaaataatttaaatcatcggtggtgatagcataataaaaactgggattgtttattagaccacatctaatgttatttttagacatatctagatctaatttaattatacattgaggtctcgtttaatatactgtattgtattgtaatgtattatattgtattagtaatatttaatacaatactatctttagtatttacttgtattaatagattgtgtaaaattatactatatttttaatacactcgaccccaacaccgactacgggtcaggtcccgagttcaggttcaggtcccgagtctgggtctcaggtccaggatcgaggttcgggtcccgtgttcgggttcgggttgggctccgggtcccgagtccgagttgagtttcgggaccgagatcgggttcgggtccgtatcgggatccgagtcccgattctgggttgaggtccgggttcagatccgagtctgggtccgggttcaggtttgggtctgggtttcaggttcggttatgggtcccaacccgggcccgaggtctgggtcccaagtcttaggtccgagtccgggtccaggtccaggtccaggtctgggtttggttcttgggtctaggtccgggtaggggttcgaactgagtcccgggtccgaattgaagattggggttgaccccgaattcttagtaaatattatagtacaagctaatactgaccatttgttatgtattaaagaatataacttaccttgtattaaaaaattgtggtcgtaataattaatacaatacattgctttatccaaatataatattatttattatttaatacaattatacagcgtaccaaacgagccataaatgttagattttaccatgcgatttgatccaattaatttcagttatccaattgatccaacttccattggatgttaggtttaatcggttctatctattgaatgtattttatatatatttattgatttaattttggtttattcaatattttagacctaattttttttatcagatctaatccatccaatattttaagtccagtactatatattagattggtttggatccatgtaatccatgaaaaaaagagaaaaattttaatgttaattttcacatatacacatatatatatttttggacaatataacaatataaaatctaattactcatcaaaactaactgaaaatactaattagtttgattagatgttggatgtatt

SEQ ID NO: 394875 - DNA, 1420 bp, Cannabis indica
aaatttttgtataaactcacaatcaactctcattttttaaaaaaaaataactaattaacatcaaattttcaaatccaaactaactaatttttttccacatttttcttcatagagtactactactagctagtgaatttaatataatttagaaaatccgaataatatcaagctattttattgttaagtgacggtttcaagtttcaacttgcaagaaataattctaggctctagctactatagtctatatattcctatttttgttttttcataatacaaaacaaataaataataataataaaaaaacataacattttccaagctaatacggaggatactccttttgtattaagtcatctccttcttttattaattgtaatttttttagtgttaacagaacttgtaattttattgcccataatgtggttaaataggcttttttccactagttgtacggtgccattttgatctcctccgtaccaaaggaatttttttgtaatgaccgagaggtttaacagtttcctgaatatgcttattttaaaaaaaaatagtaaatatataaaaaagattatcagaacttaataggaagattagcaagagaaggaaaatttaattagaatttggcttgtttgggaattactttaggacaagagatttaatctttctttttaaatatattagaaaccattttataaaaaatatatatattcaaaacaaattgggtcagatccgatccatacaaaaattaagcagggcagagtgaatttgatccaagatccaataagtatctgaaggtttcggatcagatcactgatccaacccgaataattggatctttttgccatgcctagtattattttgagcattgttattgggcatcagtagtgtctagcatcttctaaacgtgttagtttacgattggctagtgatactcattgaaatttattacattaaactataaaggactcgatacttagttagaccaatagcgatattgacatctaggagggtgttaggcatcaagggtgccttttagcaattctcttatctccaatagtaaaactcatatttagtgttaaatcaacacattgtattgtatagtattatatcgaattatattttatgtaatatttttatgtaaaactatatgtaatattgacttttattagcatataaatatatattattttagtatcatatacttttttttaaaaaaaattaaaatatacttacataaaaatatgatatataacctaatttaatataatctataacctatataaaagtgagaatggctattttcaaaaatatgagaaaaattattaaggttatgataaatatggcataaagagtaaatgccactaactatggcattatctaaccaatcaaactaaaaatatggtttttttttttcttaaaaaaa

SEQ ID NO: 394876 - DNA, 869 bp, Cannabis indica
agagagagagaggagggggggggggcgatcaggcttttagaggaagaagaaacaaaaaaagaaaagaaaaagaaaaaaaaaagaaaagaaaaagaaaaaggaagaaggaaaaaagagaaaagaaaaaaaaaattatttttttaaattgtaaatttttttttaattatatatttaaattattattaatattagatagactaaaaaaatatttgacatatgtacacttatgacagtttatcttagcacttaatagatcaaagtggacgaaaaagtagagacaaaaataaaatcgaattgtttggggagttttacccctaaaaattcaagaaggggggattgatcgtgtcaaactcaaaaatttatgaaatttgaccgtaaagtacctttaatattataggtattagtggtatccaacaccactatattttatttattttgattaattttctaagcaccatttccatagtttagggttcttcattaaaaatctctaatgactgaattggattttgaaactaataaactaaattttcagctaacattgaacttttatttgggttagattggttatagattaaaaaattagatcaaatatgataatgttgctattctcaccaataatactatcaaaatttctatatattgaatatatatagggtaaattgcggcataaatacctaataatgtttcagattttatacacttaaatacctattgtttatttttggaggcaaaaatacctaatgtttcaattctcttacactgttactaccactttcgttaactcataaatatggacaagtgaagggttcagatgccactttcgttaactcataaatatggacaagtgaagggttcagatgcattac

SEQ ID NO: 394877 - DNA, 948 bp, Cannabis indica
gcatagttggaagtatcatgtatatcttatggtctgtacaagaccagatctatgctatagtgtgagtagagtgagcaaatttatgggaaaacctagtctagaacattggaatgctacaaaatcgatacttaggtatctcagaggtactatagatgttggtctcatatatggcaaaagtaaagaaaataccaatgtggttggatttgtagactcgaattatgctagtgatcatatagacacaaagaggtctcaaacagggtatgtattttagctaaatcaatgcacaatcagctggaaatcaaatctctaaacagttgcgttgcattgtctacaatagaggctgaatatatagcatgtacagaagtagtcaaagaggctctatggctcaaaggaattaccaggaaaatggaaatagatcaaaggagtatacaggttcattgtgatagccagagtgctttacacttaataaaaaattaggtattccatgaaaggaccaaacatatcgatgtgaggttacactttattagggacattcttgcaagtgatagagtgaagttgttcaaggtttctatagaagacaatgttgcagacatgttgacaaaatctcttcctgcaacaaaatttgatcactgcctctgcccactgaatattgatagaagattgtgtgcctaaatcttgtaattacaaaggtaaagtggagaattgtatttgtatgcctttgcaattagtctaggatgacacttactataaactgtcaaagatttagttaactaaatgagttaattaattcggttgtatcctagtgtagtgtacttaggggtatgttatctataaatacttgtatttttcctttattcaacttatgctcataatatactaaacattacaagttcaataaagtttcagttttgttatttttatgttatattatttataataatataatat

SEQ ID NO: 394878 - DNA, 1384 bp, Cannabis indica
gtatttgcataggtatttatagaagagaagtaataatgtagagtagctagagagagtagatagataggaaagatgatgagagtataggataaagcgcggaaaagtgtagagagactacctagcatgggaatatgttaatatttgtggtgcaaaatttgacgtatgtaataattataataaaaataataataataatactatacattttttttttttaaaaaaaaaaaaaactatgtcagatcaataattttttgagatttttttaagtagatgaagagtgggactgagccaacccatatgtggggcaaagcataattaattttggttttattttgcatattttgtgtctaattgtatcaattaatacacttggtaattagtcattatgctatataatataagaataacgtatttgtataattattatatacacatatatatacaaaactcattcatgctgcttattaataattatcagtccttgaagattatttagataataattaatgtaataaataattcattacaattaatttgttaattgtagtaatcaagaatgttatcgagctagctatagctagtttagtcgtaatcgtgcatgaaaaattaatactgagcttttaatcaataatcaatgcatgcatataatagaagatatataagagaattaaattaaaggaagaaaaaaaaatattagtgaaggaaattctttaagataagatgaagcttctagctcccaataatggattctactctatgtatatatatcgaaatatctcactaaagtcataataatatccattgagactatctacacgttttggaataacatacactattgatcagtttcacattctccacgtaggtacgttttgtcaaaactaacttgatataataaattaaagataattaatatatatatgatgaggatatatatgggaagaattatgacgaagaagatagatcatacacatcatgattcttttcttttctttttctttctatcgatcttctatatttgtataatagctatgtagttatttcaagagtacttttcaatattttaagatgtctaaattacctattttacttcactataaatatcaaaactaataatataaatgtaataacctgtttgaaagtttattaaatacataattatatgttagtgttatatcatcattttattcatttaacacattatatatcaagtgcagtagaatgagtaaagcatatacaactgggatatttatcttcatttaatttattgaagacacaatttattttcaaaattattgagaatatttggacaatataattttgggctaaatgtatttgtagaattaccccatatactattttttaacctttttttttaaaaaaa

SEQ ID NO: 394879 - DNA, 852 bp, Cannabis indica
aagttaacgtagaaatctaaaaaaatatcattaaactagaaattacattttatacagaataaatatcaatttgcatatttattttccaatattacatgtatattcatttttacaaaattaaaaattttcactatattttaatattttctaattgatgtataaaaaatatggattatataaaatttaactaattaaaagaaaagaaaaaaagtacttcaaagcacaactctctaatacaactattcgtggactaggattattttaagacgtgaaccatattgtaaaatcatgtgtatattatcttctactccaacttctttgatttcttttttatttcttaagttaagttacggaaaattttaatcaacagtttctatatagggtttacctcctagtaattagaccttcggaaagaaattaattattgggtcctatctctaaggatatgtgaaaatttttaaaattactattttttatttattatttttaaggactgagatgaaaaatagtcttaaatttaaaaattaagagaatagtcaaatataataaattaattaataaagattataaaaatatatttactatatattatttttttaaaaaatatataataattaaattaagttatataattttttaatattgcatattattatattagaacaaaaatgaataattatattagatcattaaatatatacaatagtatttgatatatcttaccattgaaaattaatataccgtagcaataaattatataccacaaagaaattataacaataataaattaatactcaaaaaatatttatgtcatgctaacaaaattatatatactactattaaaatatgtat

SEQ ID NO: 394880 - DNA, 833 bp, Cannabis indica
tttaatacagattatatacctcaaattgtgtaccaagtatctttatcctcttgttcttcttttctcacccatatatgtatttattttacatttattccctctcttttgtttacaagaatctaatatttcaatgtgaattgataaagtaatggaaaatgtagttgttactttacttttataatcacatgcatgcatcacctcaataattaatgatagaaacattcacacattacaaaaataatttattaaaaaattataaaataatgatatagattatacaatattaatgctttatttaattttgacattatttgcaatagtgtagctaaagttttaagttagtaattagtataaactcaatatgatttttttaaagcgaaataagtatttaatattagtaaaattgtaatttttatctaatttcgttaatacaaactctgttagtattttaaataagacatatataatggttggattctatattattagatatggacgtaaaagcttagatacttctgaattttctttcaacaaattcaaaactaagttagagtacaactttaagacacttatggagttcatattaacaaaattggacggaaattacaattttattaacattataagtactcgtgctactttgagatgaaaatttggaagattgcttggaagcttcaagttcctccgaaagttcaccaacttatgtggtgtgctttgacaggctgtttggctactaaagttcaacttaataccaagcacatccctctggatcaaatatgtcccatgtgtcaccaagcgactgagacaatcatccatttattggttctatgtcc

SEQ ID NO: 394881 - DNA, 955 bp, Cannabis indica
tgtgtatgtatgttatctacatattgttaaatgattcatatgctaccaacactagtatagtagcaatactgagtgcatgtagtgtagcacatgatgtttaagagtacaatctgatgttaccaatactagtacaattatatacgtagtgcatgtgataaaacacttagtggtatacgggatacggttcaaaccctaccagcactagtattgaagtggtacgtagtgcatgtggtacatggattataccttcgttatgaatgttgttaaacatctattaagccttgtggataggtgtatgggcacctaaatacaagttgataatatattgtatgttttatgcttttcttatggagtctgtcgactcacatttattgctagcatgtgtaggtaaaggaaaggctaagagtgagcagttttgagtccagagctcggggaagattatacatgtctggacaaaaggacttggagagtttggtgtcaggacgacttgggttcattttgttgtcgctgtgtgacatgtttattaagtttaatttggttatataagtttaaatatgggatcttgaccctttcgtaaaagtgtatatagttatgattataaaagtataaggttttcaaatgtttaaatttgtcgcaattatttgtaaaacccttttattagtaatggtgtgcactataagttaaaaattaatgtagcatgcctaatcattaaggtgttacaagttgaggattcgaaaagaggatattgctaaaactgcttttcatactcaatatgggcactatgagtttcttgtaatgtccttcagcttactaatacattagtagcattcatggacttgatgaatcaagtgtttaaggactttttcgataactttgcaattgtgtttatcgatgaaattctagtttatttgaatcgaaagaaagctcatgagcaacacctccatatggtattaca

SEQ ID NO: 394882 - DNA, 946 bp, Cannabis indica
attttatagttttcaaacacaatttcgaagaaaagcttgaattttgatgtggaatttggtggattcttttacttggagcttgagaaacattggctaacttgatttaatctattttactttctttaatttcttattttcaagctttataatcttgttctttatgttcttatatttgtggatgcattttgatgagattaggggagattataatgattattgtgtagtggtgctattaggtttgtgtttaatgcatttagattgttttggatgattgtggaatgaaattttggtgtttaattttttggtaaaacacttgaaattctaggaatttctttgaatgctttgaaggttgagtttcaatgtttaaggagtttggtgtaattgtgattttgtgtggcatgtccaatttgtgtgttttggttttgattttgagctatgtgttgtgctcaatttgaataccaatgttatatgggtttggtgttgattaaagatttgtttttgtgcatggttttgaatgagttttggtgtaaatttggttaaattttgaaagtataaaaaaatatgattttgtgtggtttcaagggctgtcattgtggccacggtttggctcgccgcggcgagctccaccagattgtggcctccgtagcgagggctttggtcgccacggcgagggccttattttcccagttttttgttttctcgtttttgccataacttttgactcagaattctgttttggacgttcttcatatcattagaaagctcatttcgggttctatgtgttaatctgtagttgaagtttaaattatttatttatgagaaaatgaatttgggattgttggaattatattttaccaggacctggatttactaacaagtatgtttttaacatcctaaatatgaatttctaaaacaatgaaacttaaacatatataaagtttgagaa

SEQ ID NO: 394883 - DNA, 776 bp, Cannabis indica
tgatgtagatatttgtatgtaagggactggttataagtagaatttactcaataaatatgctttaatgtactttacatttattagtgacttcacgtgttattaaacaatttgaattttttatgtctaatatttggaaattcattaactatgaattttaagttacaatatttatcaatggtgtgtattgagaagaagaaaaaaacatgataatatatttatctatttttatgtatacacatatatatataaatattctctgcctttgaatttattaattttagtaatgttacaaccgtttttaggtgtgtagtagacaaaaattgaaggatcaattaacaactattttggcttctcatggaactggtttatagttaattaattaactactttattttttttgttcaatgatttctcgtgaaattagtttgaatgctttattttaaaattggttttcgaatgcatatttatctctaatatattttaatgttcaattgtgatttactctttaagtattttatatatttttttagggtgtataataatgagaagtgtatgaagaaatccactcgtaaagaagaaaagatgatgactttgaacttgtgaaaacagtttttgaagttgttcatcttattggtaaaaaagaaaatctagtagtatggatggtggtttatcgaaaaaaagagtagggcaaaaggcaaaggatttaaagattgtatgtttataaatttatgattgatcgtatatatactttttatttgttttttttgtctttttta

SEQ ID NO: 394884 - DNA, 637 bp, Cannabis indica
ttgggttaccatcttttgttgagagaaaaggagttgtttgatgtaatcaaaaatagagtttggagtaagattcgaggttggaaggcatctctattctctgtcactggaaaagaggtgttgataaaggctattttgcaagctatcccgacatacacaatgagttgtctagctacacatatttggtgttgaatcggattacaaagaagttgtccagctggtatacaatatggatatgagttgtagggagtatgagagattgttgttgtacattaggagtttactgcaatgtcctactgtcacaggactatcttttatgtatagagaatgttataaagtagctcatatattaaccaaatatgctttgaaatgtcaaggtagtgctatgtggattggagttatacccctgttcatcttgctattaagaaaaattttccatttccttataacatttaactgctttaatgaattctgtttccaaaaaaaacttatcataataataattgtatgattttttttcggtaataataataataagaaaaagaataattaattattagagtcggtatatataatatgaagaatatgagcaacactaaatatatagaagcatttaagaatatatatatatatgtatgtg

SEQ ID NO: 394885 - DNA, 784 bp, Cannabis indica
gctttgttgtatttctagctctcagaggggaaagacatgctttatgtggctctccgggggctcactccatgaagtacacttgcctgtctatatgtgacttagctaattttttagtgaggtgtccttttgatccacgtgtcatacgcagtcgcggccacgtatttcgggaaaaatcaaaggcaacatttaccccccaagtctcatttagtaactggtacatgagacttgtacacggcctccggtctctaatgaatgcagtggcacgtgccctaggcgcgtgggtcatatttttgattgtcatcattgatttttatttccttttgcaggcaacgattcgcttcccgtctattgataaatcttttcattaatgccggtgtcagagaggtactcaaacgttttaaccgtgtgttctcctcgttacgcctgttcaccatatccattggatcgcaaaatttgaatcaatacaaattcttaccgtacgatggtatctaatcacaccagccttgtactccttctggcctataaaagccaacacctttcctttgttgggttactttcaccacttcgcgattttcgacccaaccaacatattcgaaaaattctagaaatctttgactttgttgagtctaattaataaattagataaatgacaatttttttaaataattaattataattattaaataaatagttttgatatttacagcattgaaattgaaaaatatgacattattgaaagaaaagataaatagttgaaataaagtggtaaaattgtaactagtga

SEQ ID NO: 394886 - DNA, 836 bp, Cannabis indica
ttttaaaataaattaacgaatcaattaagttaggaactaacagactaacgaaaatggtgaccttaaggactattatcgccaatttttgaggttgaagattaatctgcatcaactctaagttttttgagacttttgctgcaattatccctagatataatgagtttctatagagggatttttttttctttttttttgcctttttggccttcgagagaaatttttttatattttggtataaaaattataattaatttatttatataataacatgtatattgtaagtatttaagatattttactaaattttttaaaaaattataataatttatggtgtcggaaatacgtttcaaaataaactcatgaattcatgtttgcacatgaaagacccaagtttttatggttaccgagtttaattatcaattatgattttatttgttgattcaattcgattatagtatttagatagtaaagatataaagttaaaagcaatataaacacagtcgaatttactaaaaataaattctaattgagtattgtttgggcaaacaaaaagtaacttataatttacaagtttacaacaatcagatcgtacaagttgcaaatttccttacaataagcaattaccccgtgcctagtgggggtaaaaaggatgccctacgtcacgggccgcctatttggacaccccaagtaggtggaacgtgcggcacttgctggcacaccgagctagcaagtcagcctaaacgcgcctgcaggcaaacaagttcaaagattaggcacgatacatgtctcgcacatgttgagtgcaaacaagaagcatgagcaagcaaacacaaagc

SEQ ID NO: 394887 - DNA, 551 bp, Cannabis indica
gatctaattagtaagggtcgaaaatggtattaagcttttatgcatttgtgaaataatcccaataagttttctacggtgaaaactatagggttcatagttgcttactcactagcacatatagcatagaaacccaattctctcagactctcacacccaaaaccctataaacccttgattgaattttggtcatcaaaacactctctcacccattcacaattatctcctctcctttcgtcgccggcggctgtcactctctcttgccgttttcctaactcgaggtatagttcttatgtctcgtaccctttttttcatgattcaattaagaatacatatgatgatttagtttagatgagaagtattcattgtcaccattgcttttgaatggttgtgttgaacacatatatgggtgtatgaaaatctttttctttatctaaaagccgctcttttaagtttgctattggatcttgagtatgattttgtggaaagtaactattttcttttttttttagcagagtagggttttgggaggttttttaatttgggtatttggg

SEQ ID NO: 394888 - DNA, 969 bp, Cannabis indica
ctgctatgcatgcatgacacaaacttaccaatcaaaaactttctctgactacatacaaatattaaccaaactttggttgtataacagtaaatagtatagtgcatgtgcatgcaatctcaaatttcttagcatgcataatccattccatacattaaatagtatgtacacccaatatatatttatttatatatatataaaagctacaaataaaatttaggtttgacaattatttattttatattgaaatgctaaaaagttatttatttatgaagtatgtaagttaatattagatctcacttattttattttcaataataattatattcaataattttttataagacactacttcataataatgctaaataccatagtactaaaaaacaatgcttattttatattttttatattacgtggatttcaaaatttaataaaatttatagagataactataataaaatataaataatacatgttaaaataaattttagattaatcacaatttacattaattaataggttatatccgaacaatcatactaaaaaacaaaataaaagtatagatttttatacttataattccctgacttttaaatatacttttatcattacactaaataatacaattgaataatattttactagaatctagattagaatttgtgtaaagcaccaaattttttttatttaagtataagttttaaataacttagaaccgagtcaaatctcaaaagaggcgaacgccttacttacgtaccttgactctatgtggcttcgcctatatatatattatatatccacattgatggatattttatgaaaatatggctatttagagcacctccaaggaggcagcaaaaattgaaaaatggagtagttaatgctccaaggaggcagcatctaccactgcaaaatggggatttgtctacagtgcacggcttatatgccgtgcactgtagcgacggcatt

SEQ ID NO: 394889 - DNA, 1605 bp, Cannabis indica
ttgagaaaaaggagtttaaagactttgaataaagaaaaacaaaaataaatcaaagtgcaatttagcaatgattaaaatttagggtgattaatttcaattgaatctactttatattatttagtataatataattctcaaattttagttttcatgtgatagcggatttactaaagaaatttatatttgggctagacatataaatatcaacctatatgtaaactttctactctcgtgataaatttaaacacataggaggcattaagcataaaagtcttaaattctacacaaactatataggtactctcatcttatatcaaaatctgtgtctatttcactatagcatagtcaatactcactttctagattttgtacctattgatatcataaacagttaattgatagccaaacaattaaaagaaattaagtacgaatgaaataaatacacatagaaaatttgaggaagaactaaatcatattaaaactataataaagaataaaacaatctccattaataccctaattaagagtctagctactcatattcattgtaaatagctgacaacaattaattaagaacatgagaaaagagtaaaagaaaagaactcgtcgaaaaatgttaataaaatctccagaattgctttttgcttctaattttcgtccctaatgattgttgttttgaaaagtgccaaaatggtcctttatatagcttttcaataaggttaaatccgtaaaattcgtcactgaaagcaggcaagccacgacattgaccctccatgtcgcagcccctaaaggctatttttgggcaacaagctctttggtgcgacgattgataatgtttttgtcataattcttttaatattgctcagaattggacgattcaacatgttttggaaaactgaaagagagatatataaattttgttgacaatatttttcctcaaagtgaccacatcatagtcagaaattggtttgaaactttagacttgattttcgatcacaaacggagcatgttgagcatccaaaacttagaattttttaccaattatatcctagaactcaaaatttcatgacaatttatcatattcatctcatttaacatgtttcttcttattttaaattcatattatgaattttaacatttaaacgtgaaataagtagaaaacaaacgtaattctgcacaaaatgaatataatcaattgaaacacacctctaaaatatttataaaatgaacctaaaactagcatatcaaactcccctaactttagcctttactcaccctcgagtaaagatcgacacttaactaataacaaacgaacacaaagcaagtcttacttcatttcacaccacaccaccgatattcgtaacattaaactgttataaaactagatttataatctaattactcccaatgctaactttagcattcaacttcgaaaaagagaatataacttacaaatgaaaaaaattattggaacttaatatacatgcccagaacgcacacagtgatctggtgtggagaggtaaaagttcatctgcttctgaggtggtgcttgttggaaatattttaccaggatctagatttactaccaagtatgtttcattaaca

SEQ ID NO: 394890 - DNA, 640 bp, Cannabis indica
tgtccatgatcataaaaatcagtactcaatgaaaattgaacagagaaaagctttcatgcaacataaaaattctacttggaaataggaaattgagcttccgaccttgtttaagggcacaagttcaaaagcctttcctccaaaacaccaatgatggccagccgattgcaaatgatggatctataggatctccaatgcaattaactttatcaaagacaaactataattaagagactaggacaagatcatatatataacccaataaaacagtctcaaccacatccattataaaatcatatataatcattagatctcattaacagtcaaccatccattataaaattgttagactataatataatatgaaaataaagcatatatgaacgatatgtaatgctaaataactacagacatatcgaaatagaatatgcgatgaaaagaccgaaatactttcagccattgatgtttgagcttcaatccttgcaatagcttcggtatgcaaatttgggcttcctcgctctctcaactctctttagatggaattctgttgtttacacagaatgagtgaaaagctcgggaactgagacctatatatgattagataggtgagatactccatcagtatctgcgccacattaattgt

SEQ ID NO: 394891 - DNA, 1231 bp, Cannabis indica
cttcttagggtaaccagagattctaacatcaccctcaatgtatccaccagtttttctaccagcaagcacatccatcaaagtggtcttaccagctccactaactcccatcagtgctgtcaacacaccatagataagattatgccacatacattagcaagataactgaaaaattgacagaatataacataatactgtttacgggttaaaaatcaaacttagaagcaaaaggcccaataaaacaaaaacgctaaaaggctcgcaaatgatgaatgcataaaggaccaaagacatagagggcggcccaacccgatgcggtccagttattgatccttaaggggacgctacggccgacaaaaagaaagggaaacgctaaacgacaaggacaataagaaaaacaccgacggaagcagaagaaagaacggaacggaataattgactggcgggataaaaaatcgactataggaggaactacaaacgagaacccaatgaggcacccaagtaacctgccgactggggaagtacctgaaacacaacaaagggagaacgccgagatagtaaaactcggacctccttagataggagctccgacagaaaaagaagatcttgggcacaaagtgaaaaattaatactttcaagggtacgatgccgacggatacgacactgtcggatttagggaaaatgatagcgtcaatttcagcttatagcgtcaattttaagaacgaacatatattttattgacaaaaatctagaaagcagttgtatcaagtttataattgacgcaattggctaattgtgtcgatttaaaaccatctaattaaaggggtgtaaatcagtgttttctcatttgcattagtttatcaaactgatacaaaagaaataaataaaatagaatacattttagatttcaaatttagattccaaaataaatattataattcaaactccaaataaaatcttgagccaccattggccaacctataacttttactataaaaattattattcttgatgatctttaaaatatttttttaggactgtcgctaaaaaattgagtgtttaaaatcgtctaaaaaaattgggtattccggacggtttaaaacactcatgaaatattcccgacgatttttaaatgtgtcttaaaaattgtaatttttttctttcttaaagggaatttaccgacggttttaaaccgtaccctatactataggcgacagtttaaaaccgtcaccta

SEQ ID NO: 394892 - DNA, 1027 bp, Cannabis indica
aatagtttgatttgtcaccaacttatagagagccccaccaatatctttaaataaaactgcctctagtctctcatgtaatgtccaagaatcatacatcagattttagtgtcaagtttagacagagagtccaagatcacattgagtgtgtatggagggatgtaatgggagtatcactcttgaagtgatttctctcattgtgagatatttcttgtaatttttcattgtgttagttgtattcttagacaaatctcattgtgtactacgtactattcaattaataaaggttcatgattcattcattctcgagctaagtttattttttgtctaatttcatctatgttctaatttttaattttgtaaattgttctagtttgaaatgtgtttgttgaatattgttactattgtaacaaatactgtatatataacatatctgtattatataattatttattgaaatttttggaaattaaataattcgagcttcagaaagaagtaatatataaataataaataaataattatttatataattaatgttttatattcattcttgcattatttttacaataaaattgtaggtttttgatttattgtatgttttatatatatatatatcttacttgttctataaatatttatgtaaatttttttgtcgtgcaattattttattgtgttttaatagaatatatctataggatgtttctacaatacacccaatcaaaatgggtgtactgatgtcaaattctaatcgtttcggtatctattcttttttatagtcgtgtacgttatagttatttaagacatcctgcaaaatttggagaaatttagaataatttacaatatcgaaattattgtttaaaccatctattttatacacgtaaaaataaaaaagtcacgagtgcaataaactctttgaacacagtttttaacgtgttaaactttttctaaatttctcaatattttgccagatgtcttaaataactataatgtatatgaccataaaaaaaattggaccaattagtttttt

SEQ ID NO: 394893 - DNA, 798 bp, Cannabis indica
aaaaatctaatatgtatagaaagtttaggaatacgacttggtagatattaaagtttagaagtataatgttgtacatcataatcatcatattaataaaattgaatgaaattggacaaaaatctttaaattcaacaatctcaaaaatttagagaaaatttttaattattttaaaaattcagggacatgatttagtacaaataaaatttaaaaggtaaaaacttaatttttttttttgccaattagtgtctaagattctgaaagaattaattatgttacataattcacaaaataatcgtcttgattaagcatcaaatgttttaatgataaaacaatacaagttttgggaatttcatgaactacacttaactattttctcttctcattttaaaatcatattctatgagttactatatgattttttcatatgattaatttgataattatatttgtaattgagaaaaagaccaacgaataattcattttaagttataattaggattttttttttccgaactttaatatgtaccaaattatgactcatgaacttttttgaccgttaaaattttttcctaaactattgagattgctaaatttaaagacttttgtccaatttaatacatgtcaaagtttaggaaaaaaattgtaattaaccttcattttataaacgtttatttttcaaaaaaaatatgttcattgtatataataataaggtggacggctctaaatgatttgtaattatattaataataaaaaatatattaagtaattcgtcatgtttttttttttaattattaatta

SEQ ID NO: 394894 - DNA, 1601 bp, Cannabis indica
gatgctttcatgttttgaatccccggtcttgcccatttttttctatgtgtgtctacattttattcattaagaaaaattaaaaaagtataaggttcaaaatagatttgaatttatgactactaaagtaagaggatattgctaaatcatcattccacttaaatttagcttttaaattattattttgtattatattaaatgtataactaagcccaccttaaaattaaatcctagtataacattataataaaattatcacattttccatatatatgtatagcatgtagaggaaatgcaatccactaatacatttcactaaagttttcatttgatttatctcttatacatgtataaatatatatatttttaaaaaagaaacatttttatgtatatatataattttattggtaaataattgttttagacaataattatatttgctgtagaaacattatgtaaataatttatattttaaaattaatataaattaccaataatatgtagaccattaagagtaggagagcattaaaagaaactaatgagaaaactattcgtctaattagaaaatacactaactttattttactaattaagttattagtgaaattgtcatgttcaatgatttttttttttggtaagtagtaagaaattttgttgcttccaaaccaaatacaaaaatttcaaaatggttttattgcaaataatttcaaagcatattattaagtaggttgacattcatgaaagcttcttaaaatatatattttttaaatagggtaaatagttattcaatattttgtattttttattaaaatataaatttagtccattctattttaataatacacatttaaattattttttctttagaaaagactattatattaattttttaaaaaaattacataacagtcataagtggatgtggaaaatcttccaaccaataacaaacagtattatccactgtaagggcaaatttagccataacatgggcataagtattagcagatcttaaaacggtagatctgtgctcgtgaaaaattgaacactagagagttgacatcattcaaaatagcatgaaaagtagaattgaataaatgagaagattttaatccttgaaccaccaggagtgcatcattttcaatataatctgttgtcaaattaagtgataacagccactgtagacttattgccatacttaatgtttccatttcttctagtttaaagcagccacttagagatttggataaggcagcaactactgaactagcagaatttcttaaaatcgcaccaatgccaacaattctcttagatttgttaatggctgcatctgtattgagctttgatttacctggaggtagagctaaccaattttgctttgtctttaaaccagaaaaagagtttgaatgcgacgtagatgttgcatgtgctggttttgtttattgattctttccacaggctgtttgaaatttgttgaggtataagttttaaatttaaatttcaaaacataggatttctaagcttaacaggtcgtcactttgtagcttaattttgaccccaataaagttaaaattacgataaatctatttctacataattgatagatc

SEQ ID NO: 394895 - DNA, 1189 bp, Cannabis indica
tagaactaaaaaaaaattaaaataaaaaaattatacgaaaatttttaagaaaaaaataaaaagtatatatacatgagttagaaaaaattatgaaaataaaatcaaaatgagtattgaaattaacataaaataatgtgaggacaaattttgaaaaaaaatattaagagtaattttttaaaaattatttaagtttatatttttttttttaatattggggtgtatttatcatttgatggggtgcaaataaaactccccaaaagtaaaacaagtgatgaaaaattgtaggggtacaagaaaggctgtcttgccccttttatgaaataaagaaaaaaaaaaaagaattcattctgaaaactctgtataaaagatgcagattttggagcatgaccataaaagaataatcatttcttgaagaaaataatattataataaaacctataaatctactgtcataataactagtagccatagccatgctcaaatgcatgaatttgttcccttgtttatatcaattctattcactttgaaattgctgcctgtttctcaatttagagacattgcatgtgcagtgcaggccatttaatacctattttactttcacttctttattatatttattgtatggctattaccttagtggcttcatagaaaggaaaaacctattgtataatgtaactattaagaactccttcggtagttgtataagagtattattattttaattaagtaatatgtttaaataagtattatatgactgctccgaacctgaattcagacctaaactcaaattctgaacttggcccgaatccaatctcagacctaaactcgaactggaaccccaatcccgaacccgaccttggtcctaaacccaaacctagactccatccccagacctagcctcagttctcagaccccaaatcttagacccaaacccgaattcaaaccttggactcggtcccaaaccgcaaacctaagccccgaccccagacttgaactcgaccttagactcagacctcgacccaaactcaacttcggactccaggcacgaccccagaccctaaacctcagacttagacgaggtcgaagttgaggtcaaatttatggcaaagataatatagttttacataagctattaattcaactcaatactaaacataatattgtattaaataatattaatacaatacaa

SEQ ID NO: 394896 - DNA, 1515 bp, Cannabis indica
cctgttgaatacatgaaattaatgcatataaagtaaaaactttctgtgaccaaaaatctctattttgatttctccatagtgaagttagagtcatggatagtacttgcttcttaaatggaaaaaaacttgcccgggatatacctctcaaaagaggcattagcttgttaggtaatattgtagcagtgaacggtaaaatagaaaatgagctgcctatgaataaacaccattaatggatgtgcaatatgtaagaaattagtgatttctccttacacctaacagataacacaaatcaggtatcaaggtcaatttctacctttactaagtcaaacaaaccagttgactccaactacttcattttgatcaatatcaaaaccctttggaacaatcaagaacaactcattttctccaaacacacaccaaagaaaccctagcaaagttgagagttttctcttcaaaaactcaaagtttgcatcagcccaaatctagccaaacaaccctcccaaattaaagttaatccacactcaaacgtacacatacaaatcctaaaaaaaataaacaaagagaacaccaaatttatataggttcccaaaaaattgtcgggtacttccactttcaagctcaccttaaaatatttgcttgattccactattagatcttctatgatcaacacattacaacaaatggattgcaaatcaaaggtgaacaaatggtaatcctttatttattttaagtattttgctctcatttttatctctctctgtctctctaactttctctttttctttgtgtatgtatactcttaagaatggacctccgagccctaccctagggctccaagactcaattttcaagcatcttccttcttctcttcaatctcatctttatgtttattcttctaaatatttatagatgtacgtagttgagaggatgagtttgagttagttgcaattaacagactttgtaactaactttggttataagtgagagttagtttaggtcgaaggccacttgttgtaattccttttctattataaatttataatatagagtaatgctaatctggacagtggatatggggattcatttcaacaattttcacttgaatcccatatgcactggtagaaaatagttaaggtcttttaagggtcttagctcgaacccactaagggttttaccaacctatgtcaacccatactaagcttaaggaaagcttaaactcatttacaaatgccaccttagttcacatgtttgcaagattcacttttataggtcactttctctattctaatttccccttgagtaatcttatccctgataaattgatatttcatccctatgtgtttagtcatgtcatgaaaaaaagtgttttcatataagtagatattggtctgactatttgtgtagataatatggctttttttaactaggtttagctctttcataagccttttatccataggtcttctaattcctctgtatggatattctcagattcaatatggattgggtcactac

SEQ ID NO: 394897 - DNA, 1480 bp, Cannabis indica
atattctccaagactccaaccatatgcaaatctaattaatacggaaaagaaattactaataatttttacagcggcagctattaattcattaaaagtgagtgtttttattttctatctttaacctttctattgtattttttattaatttatttatttatttttttaaaaaaaataactttcaattaatcaaacacagaagtatgtttcaaaaaaaaaaaatactgaagtacaagtcacaagtgataacaaggtagacaaacagcgagaaggtatcgactatgacgaaactttctctcatgtggcaatattcatatccattctccttcttctttctaaatggcaatcttaatgaagtcatttatatggaacaaccagcagagtatgtattaccaaggaaagatcgaaatgtctgcaagttgcttaaatccattttatggattgaataaagcctctagatcatggagtatcacgtttaataaaactattgaagagtatggcttcgaacaaaatgaagaaacctgtgtataaaaatacattaaaggtaatgtagtggtattcctagttctttatgttgatgacattctatttattgaaaacaatgtagaaaggttatcagatgtaaagaagtgtttagccaataaattccaaatgaaggatttgcgaggaacaaactatgttttcgggacaaaagtctatagagatagaaagcgaagaacattagcactttctcaagcaacttatattgataaggtgctagaaagattctcaatggagaattccaagaaaggaaaattaccgtctagacatggaattattttatgtaaggatcaatgttcaaagactccttaagaaggagaggacatgagaaagtactcttatgcatcaacaattgtgagcttaacgtatgcaatattatgtacaaggcctgacatatgctacgatatagtgattgttagttgttatcaatctaatccaggtttggaacatgaatagttgtaaagcacattctgaaatatcttcagagaccgagagatctaatgcttgtatattccggtggagagttaaatcatactggatacaccgattctgattttcaatcaaacaaaaatagtcaaaagttgacatctgggttagtatttactctgggtggaggagctatagtctgaagaagcattaaacaaactagtactattgtagattcaaccatggaagtcgaatatatagtagcttttgaagcaactaagaagcagtttggttgaaaaaattcaacactgctctggaagtagttctagaagtaaaaaactactggtgctttactgtaacaatagtggagcggtggacaactccaaggaaccaaggagccacaagaaaagtaagcacattgagaggaagtatcatctactaaggaatacaatagagagaggtgatgtgacagtcttagagattgcatcagataaaacttggcagatccattcacaaa

SEQ ID NO: 394898 - DNA, 677 bp, Cannabis indica
atctaaaaaacaaatagtgcttctctatacgtaaaaaaaatattgtagcattctttaaaatttgagctaaaataactcatctgaacttaattttttttttatttttctcttctctattttttcactaatataccgctcatctaatatgcgagtgcttttaaatatttttattgtgttggccacaccgttgtttatcaatttaatatttattatctatactttattatttagggatttttttttttttttttacatttcaaaaatattttttttatttattatatatttttacaaaaattcacataataatacatatagcaaccaacgaagtaacccaaactgtaaaaataaaaataaaataagttgaaaaatggtatatgggtgattctctttattattatctttgctttatatatatgtgggtcgcttatttatttatttatttatttattttgtgtaaatgaagaatatcatagtagtttttaatgattaataattacaaattatatggtttagacttagatagtttttaaaaattttggtgatttttaattagattataaagtcagtaagatatataaatttaatgatatttttagattaggatacggtttaaatttagaaatttttacaccaaaaatcttttttgcacattttattacatttttacccctaca

SEQ ID NO: 394899 - DNA, 565 bp, Cannabis indica
gtgcaattttacgcttttagttactaatattttcaggtttagcattaaagaagaatagaacgaattcgagagaaaaaaatgtgcatgtaggataaattaaatgaagttttgttgatatagcaccaaaaaaataatccaaaagatctagtgcgattgaagcctttaatgttgaagaattggaaagtgaggagtagcgcctcaacactggattgcagcgccagggtgctaaaacgcataaatttggcagcaaggtcttggaaagttacattcatttctgccagaaattgtgcttcaagtgttgcaacgctaccttgtagcatcgcggcccgctatggaaaatttaaaaaagggatttcgtgcctagaagacacgtcacaacactactttgtagagtcacagtcagacttttttaaactgcgagaaagttagggttttatttttttagctatataaaggcctggaggagtaaaaaaattgaaacagaaaggggctctggaggcttttatcaacttttattcaacgagttattttttcttctactcttttcttatgttcttaatcaatt

SEQ ID NO: 394900 - DNA, 2557 bp, Cannabis indica
acaatttagatccactttgatcattttattcttgctatgacaagaaagaacacaaaatagtgtaaatctcataattcacttttcttatctcataaaatgatatgattgtcactaaaataaaatttcatttccaagtaattatctttaatcacaatatagtttcatatagtaataataatagaatgaacacatttttcttatcatcatctcaattatcataccacatagtacatatattaagataatttatacacatatattaatacacaaaattaatatataactcccataaaattattactctcaaataattttatgttaatcaatattgtatgtatgttactatacaatcatatacaagatacacaaaatatcaatactaattcacaattatatatacatattacatttcataaattaatatacacaatatatataatatacgtataatatatatattaacgcagattttcgttaactatatttaagcttatttcgtgattgatttatacaaaaataataatattaaaagaagaagaaataatacaaagcttttttacgtggttttgcagttaaaattctgcgtagtccacgagtctatcttactagatttctctgatacaaaactagagtttttctcttaaggattttctgtccctttttcagtgtattctgcccctatttatagttacatagggaggtagttaattacaatcagattaatatttcacaacaatattttcctaaaattatgagatttgattatgtcccacgtaaaataaattcggttattatttgaaaatcacacagctgtgatttatctgcttttaccgggtcaatgttgacgtgaatttagatacgttacaaagtgtatctcactgggtcacctcgctgggatagcaataataactctgacagcgagctaaagcttttcccatgtctttctgaggttgataatgtaaatactgtcatttctgctattgaagacataacgctccatctgacaatcgcaattcttggtgaaaaggtgaacttcagtagccaacatcatttgaatgtcaatttctatctgagagagctgactcgacggagcagtggatctcattgaaagatgtctgggctgattagtgaaggtaccatgagtatgccttcctatagcgagatggatgccttgttatttgttgtttggattcgttcaactgttacgctactttgtataatgtatattatacgctaagtgttccaacagtttacatgtctcatcttcatctctttatacatagcgagattggtgcctcgctttgtattactgatgcagtccttatgattgtgtcttcatatacgaaatagtttctcgtcaatatgtaaattaatagtttgtacattcgtgtctcgcttaagactttatagtcaacgagttatagatatactctatcagctctacatttaatgagttattctattttaatatcttctaatataattgtcattacattcgctgattcgtattctcccaggttgacacgtttcctcctctaaagtgccagccgaatttcgggtataacagtttccccttaaaaattcttcttaatgaaaagtgctctttaaatgattacagagggtatttttatcataatcccttttgaaaaaatacaagtcctctgattttgacagtttggggatttcgatgcacatcagcatttaataactatcttttccacttcctttttcaaattctacctgttggatcaattgtttccttgatttgagattaacccaagagtataaaacggagaaaaggaaccacctttcaatacctttgcgatttcaaaagatcagaaaattctttgaacttttttgtaaaaaatcgtacccagattatctaaaaaccttgcatgccatctttttcataaacatttttcctgtgaatttcatccgatttaattttcaacttcaagcattcagagggatcttcacgccgtttgttgtttagtcgattgcagaactgctcatcgtcccgaaaaccaactccaaacagtaagtgatttctctctttattttcttacatgcttttaattttgcatttttgggtttgatcactaatttcttagttagcacctttgttgtctcatctggtattagcaattttaggagtgaattgtatctaggtaaatgttagggtttaggcagaacgtaggtttttgagtttctccaatttaccaacttatggtttgataaatttcatccaggaatcgggattgctttctccttgcagcaatgtcccaatctagttcagaagtttatcgtccagaatatttagaaatagagcgtcctattgaactttccatcccatacaaacccagaatttcagaacccaaatccaaattagagataaatgatgcaaaaatagggaacacttagtgaaaacccaccaagaagatattgttagttgccacagacgcttcttgaaagaaattacagaaggtagacgccgtttctttcgagacgttgtctggcctgtacctcccagtttgtcttctattcctctggctaagcc

SEQ ID NO: 394901 - DNA, 1559 bp, Cannabis indica
aatagtttactagatggatcactaatataaaattaatatatatttggaaaagaaaaaatatatatagaatgttcatgaggttattatagtcaaatattgttgcataaatgacacctcctagttggaaattaattaaattaaatttaaattattttttcacacccaacacatgaagttgccctctttgacactaacatgtcacatggctaaataaaaaaaattatatatatagccaaacacatatattttttttatttatacatacatatacatattaatataattccatttaatttctccttgaaaaaaggtcctaaaagctttattgtttctctttaatatattttctctgactgtgaatactttctcatgatgagtaagaaaattggtgaaaaaaagcatgcatacacatgatgaatatacttttttctctataactattgagcaagtcttaatatctaagaaaactttcttttttttttttttcttaaaagtaataaaaataacttctacattgtaaggtttgtatagttagtttcaataaatcatggttgcatgcccatttgtatgaaatactacccttttttttttaaataaataaaaaaagaatttccacatatgttattttttaaagtgtaaaaaatcctttatttttggatgtaatgatatgtaaatatataatttaatttttttaaaataaaaaatcctttatttttgggatataattgataggtgaatatataatctaatttttttaaaataaaaatcctttattttggggatataattgatatgtggatatatgaattaatttttttgaaaataaaaatcctttatttatttttaagaaaatgaaaaatgggttaggatatttcttaatttaattcaattaatcatatcatatatggataaatatggcaaactacctaatattactatttaaaatacaaaaatagtaaatagagcttcccaaccacatttggccaaaaaaaattggttgggatatttctttctcaattagttaatatacttactatatactctctcaataaaatctaagatatggatcaagtaacaatttttgtatttttgtttttaaattgtttacatttattttaattttaatttttattattaaagtagctttaaaaaaaaatggtaggatggctctagtaggcttgttgccatgtttaatgtcatccaatagataagtagggccacacatttgaacaataacaaccgttggataagaattttttatttttttcataaatatttaaaattaaattaaattttgaggaattagttaaagatgaacacactaacaagtcccaatttgtatcactatattttaatattgtttaaatcttttaaggcaattttacagcataatctctaaatattccttgtagtatattttcttattgttttgacatttaacataaaattttagtattttttattttgttaggattgtattcatttaaaatcatttgttaatttttaaatttattctaatttttatttatacgtataagtaactgtttaaactttatttt

SEQ ID NO: 394902 - DNA, 855 bp, Cannabis indica
gagacctaccagaagaggccttgataaaggaattctaccggaccctgatgtaatccactgtcaggaatccattttctccacctacgatcaatactaaccactgttcctatcttattagcaataccagagcattttgtcagtaaaaaaatgaaggagggacatcatagactcttacccaaataggcttatatccatagccgcagagatccaccttctgtccattgacattggcttgagcatcaaatgtctattgcacacagactaagggctctgagccacacaaaatacgcttcgctcttattcaaaaaacacagggtatatatattattagcctcttctttaatacttcatcccttagataatctccattttcctactagaaccggccgaagaagaccattgaagatacatctcctggaagtgattcttcccaccaccgattgtttcacaaactccttccctacctcttcattctgctcaagagatagggttagagtttccatagcaacaatctcatgttgctccgacactttctttcattttctatccattgttgacacatgtgcagactccatgactaacgatgcactcaaagaaaaaatcacgaaaaatagtgtatcagaacacacaagtaaaaacctagatcactggaaaatgatcaataaatattcttaatgctgaaaaccacgacgtaaatcttgtacggagagcatattttctctaatgttcccatgacgtagggttttattttttcagctttgaaattgaaatattgtttatatacttaaattgtcttttttcccacataatattttcatgattttcacatttttaatgttcaatatatattttttt

SEQ ID NO: 394903 - DNA, 723 bp, Cannabis indica
atatatatatatatatatcattgctcgtacttaaataattagttaccgtccaaaatataactcatgaagatatatctagacatcatgatcgatataccaatataaatatatcggccattgatgatataaattaaaaccaatatatatatgtttaccgtttttttttttctttttctatattaatatatattttaaattttcaatttgggtgcatctaacttgattagtatgtggactttacaaattattaattttcattttcattaatttatttttaaaggggtcataaattaattctatttatatatattgtgtttatataataaatatatatatgtataaggagagagaaagataagcttgaatgaaagaaagtgaagtatatgaatcatggatattgtaattggactacagttttgattaagttaattgttgtaatttcagcggaaataaccttgaggattcaatcataaaatctgcaatgaactcacaactttgacagtaaaatgaacataaaccaattaatctccacaatgaatcaaatccgaaatcaaacaaagaacaacacacgattttatcttggttccggtcctagagatcaatctgatccctggccatactccagctgagaaacatcaccaatcttcattaatactgtgaacaagagagcaacagtacaattacaataaccagagcaatcacagctcagatggtactcgatac

SEQ ID NO: 394904 - DNA, 471 bp, Cannabis indica
gagagagagagagtgtgtgtaaagagtgatatttgtatataaagacatatatagagaaggaagtttataatgtaactgaaataacagaattaccaagccaatttagatggagttgggtgtattttaaggccatatattaaaataaaagaaaaacagtattatggagttgcggactagattactctccttaagacattagtgacagtatgaaaaagatgtgattttcctattaattcaatcgcattacatagactagtagactgaaaaatataacgagaagaattactttttttctgaatcgtgtgaagtagttgttgaacgtgttccatgaaatgatacgactaaataatcagtttcaattaaacacttttctcaaataaaaataattattttattaaataaattttttgtaaaaaaataatgtgtcacacctagggctgtttatccgatccaatctgcacttttttggtc

SEQ ID NO: 394905 - DNA, 1272 bp, Cannabis indica
gtatatgagataattcccctaaagttaattacaaagatatgtacaagaaattatatgaaaagatcaaactaatttcacttagaagatatacacttttaataataaatctattaagacgccataataactgttaagatataagatagacatttatgtaatatgtgaaatatatataaataatgtgtatttttttttgatgaatcagaaattgtattagctcaaaaatatttgattacacccaaatagcatccttaaagggcctataataatgaactaactatacattgtacatgtatttacaaactttgaaaccattgtgtgtctatatttgagacttttattttggccaaaacatttcaattcttagtttcaagttagtcttcaactcattgatcatggcagtaggtgattgctcttctttggtccatatagcaccttgtttctcaatccccatatgctatataccaggccggctgctgcaacagtttaaaccaaccgcctaaactttgtctccttagttctccctagccatttgatgatgttaaggacgcttgtatgcattgttctccaccctaaccacctcttgacttcctgcaaacaagctatagatttcggacattcaaagaacaagtgttctatagtttcactcctttcacaacaaagggtacattttgtatctgtgactatttgtattttgaacaatcactctctagttttgagtctttgatgcataggaagccagagtataaaacagtgtttgggatcattgaaacgactccatacctgccttgtccattggatttttgggggagcttgcaccagaactttgtaaccggctgcaatgctgtattgctgcagcatattgtgtggttgctaacttgctttgaaattattatgaatgtattatttccatgcgtgcactacattattattggacatcgataacatttttttatagtagcgttttatgattggttaaaaatatttttttatttcttaaggtatatggcacgtggtacttaatttacaccagggcgtttggtatgaggtattcaaaataatttgattatagggaatattatgaaggagaatatgattatagggaaatgtgtaaactgtgtttggcagtgtagggtaatatgtaatcatattatgttaattaaattacattgtttggttgagtataggaatcttatatattatttttaaaaattaaaataaaaaataattttttattatatctatttaatgttaattatatataaaaataaa

SEQ ID NO: 394906 - DNA, 1191 bp, Cannabis indica
gttaacgggagatcaaagctaatcgttaaatttaacagaatattcttttatttttaggtatattctgttaaaccaagaaatgccgttagataggcacttttaatatataaagatattaccatcatatcactaagtcaaaaattaattgatagtggtaaccaacgaattactaacacattaatgtataaaatatttaattggatactagtaaccaattattattatatatataaaaaatgaatattggaacaataataaataaataattacaatgcaaataaataaattacaaatttcgtatctatgtaaaatttcctattaacaaactatctaataaaaattgcaaataaaatagaataaatgatatatatctatataatacttgctaaaagacaccaaacaccctcttatttataaatatccctactagtaaaattaaatatcggatcacttaatatgtttaatatgcaataactttttagaatattactcattcgaaatataggaatgctcatactacataatacatttactattaaggtacttctagttgggcctggccagcccataataatagttaatctaatactaatgggaaaaaaatggtagtaaatatatatttgtaaagtttgatgacaattaattcttcttggaaagaaggttgtttcttaggtcagctacatcaatttcaccaatatgattctctggaatccaatatcctgtttttgggtctctcatccaaaagaattccttcttattattagtctcattcccaacactacaactactactctccatcctcatctcaccctttctcattgttgctatctcccctctcacaacattccctactgcaaccgaataacatcgcctacattacaaaaaaaaaaacttaatatgtaaaattaagtaatattttttatttaatctataaatattatttataaaattgtcatgtaattacgaacttgcaaaagaaaaaaagaaactaacctcaaaagaataaaagagttgagtattgtagccttagacatgattattattattattaaaccaagattatattataggtaggttggggaatatacttttaaaatactagaagaagcctataagaatataagtctgtatatgaatataagtttatagcatgtggaatgatgggagttcaataggtatgatcgtataaat

SEQ ID NO: 394907 - DNA, 788 bp, Cannabis indica
tttttttttctataatcctgtatgttgtattatataggatcacttgtaaatttttataaaattttgaattgtttacagtgctgaaaaatatgattcaaatttttttttcattgaaggggttgatttttcttgtacaactagtaagtaattgttttatccttattttcggtgctacaaacaattcatattttttttatgaatttataaatagtataaaataactacaatgtacacgatcatgaataaaaattagattaaaaaactcttctgatggaggtttaccaaaagaactttttagataggtgtaaagtagacttacctaataatattatataggagtattcataaaatatttaattcaatccaacccattccctaaagtacaatttgattggattgaaaaataaaaaatttacacttatttttatttattttaaaaattataaaatataactaaaaaaacaaatacatggtacatatattttccaaaatcctaatatgtcaaatgtatatatttatatacaaaagataacaaaatttaaaaccatgacaaatcttttatttttatataaattcttttttctcttttcttttattaactttttgccttatttattttaattttttgttagagacacttattttattttggtgtttgagaatttaaaaggaatattatatgttttatatttatgtgattttggtgatgtgaaaaaaaatatattttataattaatattaaataatttaatgttaaaaaattatcaatccaaaataatttatcaaatc

SEQ ID NO: 394908 - DNA, 541 bp, Cannabis indica
ctctctctctctctatctctattctgtgccagtagtagtggcgttggcgtcgttttgtttgtttgggcaaagagaaaatagagagccaaatcggagattacgaaaaagaaaactctttttccttttttaataacaatactttttctgaacaattaattaattaatacggttaactttaccgtatctttttctatttttatttatttatttattacttaatttttaaacagtaacggaaaactaaacagtggggacggaaagcagcggccacttctgttttaacttttttttttttttaatcatttctaaagcgggaacgtgaataagttgagctcattatcttttatcaataaaaattataaaatgttagggtctcagcaaaaaaaaaaaaagagtgtaagggtattttagtcatttctgagtgagttattgattccggtcaatttgaagcacaaagtataaaaattagtgtacggttataattgactagatggcaggattgttgtcatttctggttattcaggattgttgtcatttgttg

SEQ ID NO: 394909 - DNA, 861 bp, Cannabis indica
aaaaaaaaaaccctatatattcgccccaaacgtgaccttaacctaaaattatatatatgtgtatggccaagttaatttttatagtaattataaaattaaatatataaaatttgatatttacttcaactaattataatattatatgtgtatgcccttattattaaaagcatctctgttcttaacttaattttcagtattaataacctataacttaattttcagtattaataacctataacttaatttttacattatagttataataaatattttactaatttttgaaaaaaaattaaataatttataatttaaatatcaattatacgtgtataaaaatatcatactcatacaatcatatgtgtataaaagaaattcaagtatataaatgtatatatatacttccatcgtattaataaaagtacaaaaatgaaaatatttttactgatagaaacaaaaatagtatgtgtatatataaatatttctctaaaaaaatcatacgtataatttaattttaagatattgtacttaattatttacaattaaattacatataaatagaatggtgtataatatttacatgtgatgagttaaattaaatatatatactcacattaatacatgtatttggttaattactctttaaacaaatttcaagatagattattttataaatgtgattacaattaataaatcataaactaaaaaagaagtcatagcctatataagattaaaatattttgtttttcttttccaattgctcatatatattttatttaattcaaaggtggcattcatgttggtggaaaggataatttgtggaaccctcgtgggtacattaatatataatatataaaatatata

SEQ ID NO: 394910 - DNA, 591 bp, Cannabis indica
attaaaatttttcattaatttttttttattcatatatagtaaatttactattttatatctaaaaataattatttattcactatacggtgagcaaatggtaatctttataaattaaaaatttatttcaatcaaatatattattatgtattgtgctcatattaaatataagcttattttatttttgcttttcattaaaaaaataatagctcatttttcatataatattgttattttttttaaaatttatatttgataacaaataaaacaataaattatttaaataaaagaaaatttatgatttttttcaaaaactttcattatgtaattagatattaatagttttaagtgcgagtatagtgaaaaggaattatataaccacaaaaaaaaaaaataacatatatatagtttagattcataatgtgattcttatgtatatgtggctttgacaatgtatacatatataatttagtttagtgatgatttacagaaaaaaagaatatagtttagtaatgtagtagccaacgactaaaactaaatataactattatagttatatatttgatgtaattattaaattttatatatatatat

SEQ ID NO: 394911 - DNA, 1028 bp, Cannabis indica
ttttttttgatttttttttgatgaatttaattatataacacaacatttatttaatcaccaatactatatattacatgttgagcaacatttagttacacaaacattttattattaatgcatttacattaatatttggtttgaactagaaattttctagaaatataaaatagtataaataagattttttttctttaattttaacatttatcaaatcatgtctctaattttttaggctattaagaatttccttcaaactattaagattgttggattcaaagacttctatcaaattttactgacgtgatgattatccatgtactaaatcgtacctttcaaattttgatatctaccaaataatattctttgaattttgatatctaataaatcgtatacccaattaaatattaatatctacaaaattatgcacctagaactttcgtgtacattaggattctatcagtaaaactgaataaaaaattctttcattcaacaatttcaataattcgagagatttttttttagtctaaaaagttcaaataacataatttagtacttattaaagtttaaggataaaaataatgaggaacacttttcaataatatatatgaatatcaaaggaaggagaagaggagtttttcaaatgaaatgtaagtttttggtgtcatcttaattgtagtgtgtgcatttcgatattaaattttataaataatacattcacacctcgtataaatggtagacagtgtgtgtgctcttgctcttatgcaaatttaattttgctgaatatatataaaaaaacacgtttgccaaatgcacacaaattaaacatacaatgtatttgtaaactcacacactcacattcacgaatataattaattaacatattctgttgtgtgctttctaccatcgagaagatgcgattaatttgtgacagtcagtagtcctgtgatctgtaaggaaaaatatcgggtaagctgtgcaaatcccacatcgtctagggaagatcaagtgtgatgattctgagactgtgt

SEQ ID NO: 394912 - DNA, 1329 bp, Cannabis indica
taaactagaagtggaacatccgtttccaaacaacatcctaataatttaacaacgtttctatggttgatttgagtaagaatgacaacctcattaatgaattcggagagtttggcttcatcaatgattttcgacttctttatcgcaacaattcttccatcttttaacattcctttgtacacggtgccttggcctccatgcccaagaattctgtccatactaaaattgttagttgactttctccaactcttttgaattcaaacaacttggtttgctcgacgttgttttcacttgaatgaatttgttgttttagacaaaagaccaccatttcgtttaaaaaatattttcttgcgtttgatttcattccttttttttatgaatttgtacaatttccatgtaccaaaaacaagaactaatactccaaaaccactccccagacctgatttacaaatgaatacatacattaataggcatattatatgaaaattttcttttataatataaatattcttttttctaataggagtaggcaaattttattaacgaataatattcttatcaattacatcacgcaaagcaaaaaatggtgagcaacttaattagcaaattgtttaacaaaacataaaacaacaacaaatataaaaatggacttttagctcttattttaatcgaacaacattatgtaaacattatataaatattcttaattagctttaaaattgaaatggactttttaactgttatgttatgtttcttcaaaatttaatattttcattaaataattttacgattaatatgattaattagtaaatacacaatattattgaaaaaaaatataaacttaaataatttttataaattactcttaaatttattttttttcctcagactatttcatgttaatttcaatacttatttttatattattttcataattttttctaactcatgtatatattttttattttttttaagaaaatttcatataattttttattttaatttttttgtcataatatttaaaatataatttatttttgtttgataggtatattttttaagaatatgaattggaagaaaaaagttaaaaaacttaatacacttaaagatataaattttatattaaataaaaattattaaaatggggtttctttataaatctttggggtataaacagtggcggacccagaatttaaagtgaggggggcgtaaataaatttaaaaagaaaatataaaatgtagttagtggggtttgaacctttaccctctaacctatttactaactaccttaaccattacaccaaggttactattatgtctataaatatcatc

SEQ ID NO: 394913 - DNA, 826 bp, Cannabis indica
tgcaattttattgtctgaaaaacattaaaatcaatatgacagctgtaatataagtaacaaacaaacaatattttaattaattgcttctataaataaatataagtagtaaggtgaatatataacgtaattaccaagattattattataatactcatcatccatctcttctttctaataccaataccaacttgattccttgttatttgatcaatactgggtttggaaaagagaagcagaagtgggaatgattcgattagcattcaccacaagaaaagttgtgttccaaaaaatatttgattaaaaagttattttatatacactaaaataaataaggatgtatttgcacattcttttaaaaaaagtgcataatgaaattttacaataatatatatgtataactgattatcattaattacttcttactcaacttatgttatttattatatgtaatataataataactgatgatcattacctagcactataatttaatgtatacaatttttttttaaaagtaataattatgaagccaacattttgttttgccattcatgctttgcttggttagtctaatatatctatctagaaaatttggttgggaccaaattgaatgatgtgaatttgaagaagaaagttgctttgctaaccgttgttgaaaatcataaaggtgaaaaggaagtggattttgttaaggaattaaataattaattaatggcattagaagttcagaacatatgtgttggataaattcccatactaacaacctcattaacaagttacaaggaaaaataaaataagaccttttacaagcctcaacagaccatta

SEQ ID NO: 394914 - DNA, 1227 bp, Cannabis indica
caaccgtctctttcagtaggatgctgtgtagttggagagtgattgttttttttcttttccaagcgaacataagtgtttttttttaattattattattattatattattttcctttaacaatgaaggcgaacataaaatagttattgtatctgaaattttcagttagtgtcagtttgcggtcataaactatctatgaaattatattaaaaatactagcttgaaagattgagagaagtattttttaaccttttatttttttctcttggattttacgctattttttcttaatgttattaacccgaagtattacattattggatatttttatgttggttttgtgtttgaattttcaaaaattaaggtcactctcaattatcatagttggttctttgagcaattaaatgacctgtgacgcctaatgatttggtattcgctgtctagtgaaccttgaataaatccaagttttattgtacactctaatctagtattagaagtaattctatcatattgcaacttcttcttctttttttttttttgcttaaaacattgtaaattatttgtaggacagatattcttcaaacatagtcctaccttaccggtttgcaaaatatgcaagttaagtgactaaaacatagttcttctaagtttgcaaaatatacaagttaagcgacctgtaatacaaacataatattttgtcgataagattcttggtaattatcccccctcccaaaaagaaaagaaagagcttatgtttagcacgattaattttggagtgttataaattttgggtgcaaatattacatttaacagctagtctccaataaaaaaaaaaaaaattgaatcagctactaacttgaaatacatttgtgtcagctagactatctttttctatgcagggtgattgtgtttctagcgacatacttggatagattggcagatttgcatattttcttctatgtaagaatgtaagacatttttaaattccaatataagctttaaaagaaagtaaggggtgtagtgagaaaagacaagaaatgggttaataatttggataattacataagacattatttttaataaaaaaaaaaaaaatacattttcacgtttaaagattttttttttggtatatatttttacgatttttcataaaaacaacacgaaaacaacaagaaaactacattaaaataacatgaaaatagcatcaaaacaacagcaaaaaataacata

SEQ ID NO: 394915 - DNA, 817 bp, Cannabis indica
atttttatagttgtagaagtaaaaaggttcgagttagatattataattagtactaaaaaaattaatagtactaaaaaattcagtttttgtgttgaactaaatgttatttttagtcacaatagttgttgtgatagacttaaaaactaaagtatagctagtgaacaacttgtatataaatactatatattttatgttgatgttaattttttgttatgactaaagtcacatttagttaaaaaaatttatgttatgattaaaaaattgtcattaaaagtagttgtttttttgccgtgctagtaccgtcttttgaatcaatatcgttattggtcaaactaagtatcagactcatatagtttaatgtacaataaattttaataaatatagctattcaatcgcaaggcgacacatctaaaaaatactgatcgctactagtggccgataatattattattattattaaacgtacgtgtacatatagatattcccaagatatattttcatctacacacgtgcaaagtcggctaaaacaaaactcaaaaccacaagttcttattaatttattattaggtacatatatttatatataaaatatatattaggggaattattgcctcgatctctatatcttaggcgaatgttaaaaaacaataatcaacaagcttatccatggtgggctcatctctagatatgcaaataattcttagccacttttttttttttttctaaaataaatacaataatatatgtttcatgatgacatggatgattatgtatatgtttatagttgagtaatgatatatttgtttaaaatatatac

SEQ ID NO: 394916 - DNA, 779 bp, Cannabis indica
tagtagatgccatactgtgctaggagagctctacctacttgggctcacgacctcccaagtctaaagtaatagtagggtaggattgtgggggcatccaaggccaaaagccatctacaattacaaaagcaaatgtaataataagcttatcgcttttggcttccaaagctacttcccgcattcttatcgatatctcatccacctttatgtaaatatatatgtaaatatatatatatattataaatatttttccttttacttgtttatgacagcttcaaaaaagaaagaaattagcagacccaatcccgtctcggagcattgtacaaaattaacttcataaataataggttaattaaagttttataattatattgttaaaaaaagtattatagtactaaaccaagtgcgcgctttaatattcgattcttctattattttgtttgtataaacagtttcaaagagcaactagtccttgtaaagtatatatttttgaattaacaataaggtgatgaagagtactaaagggtgacatgagtatagttcctctttctgctcttcaaattctatgcaaaattacaatcgaagaagccgacaaacgcaaataattgctggatccgcggacaaaacaaaactaaccctttgaataagctgatgtgaaagcaaattaataattatatatggtatccggtaataataataagaacatcaataacaattatagtaatatttctcttctattccttacgttttttttctttcttcttcttcattaattcattcac

SEQ ID NO: 394917 - DNA, 631 bp, Cannabis indica
ttctaattctaaaaaaaatatgacaaaattattgattttttttatggcaaaagactatataaataataaatagtctacaaggatcatttctttacaagttttgaaatgagaacataaactaatatagttctatcatttgtggtcatttgctataatttctcttattaaatattctatttttgttattttatagtttatctatagttgatttatagttgtcagaagattggttttgtcgttgtttttatataattttatagttgctttataattgttgtgagatcaatttctctttgctttttatttgtttattactttttatttgaaaatcgtatttttgtaattttcaaactttaaaatcatatttttttgtaaataaaaattttaaatcgtaaaattagaaatcaaacaaaaatatatatatggatccaagagatttcaataattatgtcaaatatgtaaccatcatgattacatttatttttagtcattagatcactattgaatagttttaattaatttgacaattaaaatattttaattaattaataacttgtaagttgatagtaacataatacagtagaacctctatttaagaatactctattcaagaataacctctaatttgtta

SEQ ID NO: 394918 - DNA, 370 bp, Cannabis indica
ccgaactacgtaaattattatttctttcttaagcttctaattatttgatttctaaaaatctcatcaaacaaaaggttaacctgagataggcaaaaagagcaactaaacaggttataaacaagataaaaaaaaaatcaaattagattaaaaattaattagactgatatttataattttcaatccccgacaatagcgcctaaaacttgttgcaaaaattattgctatgcaagtgcactcatccacaattagtaataaattaggtaaaactaagtatttccctcaaggactgaattaccaattaccagtcaatcaatcttttaattctacttgatcaaacaatatttagaatttttaaataaaaaaataaaaa

SEQ ID NO: 394919 - DNA, 988 bp, Cannabis indica
atttcctacattttaaaatttattagagcaacttgagtgtggacaatatttttgttgcttgcttatccttaccaataattttcaaccaattaagtacaaatactttatataattatcaagggacgaagaaaggatttttttcaaaaagttctgcaacactctaggggattccccctctttctctttggtcctttcttcgtgatgctatacccaatctctttctttttctccatctttcgtttttaccctttttttcatgattattaattcaacaattaatgctctttaatcacacatcaggtcgagttcttcatttaatgctcttttagaaaacccttcgttatactctttcccaaactggactgaacactggaccatatgcagtatggctggtttgattttaaaattgttggcatctatggtaggtggtcttatcaagttaggaagcaaataatccttcaggctacggtcattgttgccattatttgtgttgtcagtcatgactccttcttgttcaatctctattgcagcaaataatcccgtcggtttccataaccctcgcctatacaaccgtcgtaaaatgggcataataggcgacggttcaaaaccgtcactaatgtgggtttcccgacggtttaaaaacgtcgcctataactgggtataggcgacggtttataaccgggtcttatactataggtgacggttagtataggacactgtttaaaatcgtcgcctatagtataggacacggtttaaaactatcgcctatagtatatggcacggtttaaaaccgtcgcctataccctgttaataaggcgacggttttaaaccgtcaggaatgtataaaaaaaagaaaaaaatacagatttttctgccattaattttcccccattttttttccttcattagctttataatattacctaaattaaaataaaacaactaattaattttgttaccataacaactaactttaaaacacattaaa

SEQ ID NO: 394920 - DNA, 886 bp, Cannabis indica
aattttaataattattttaatttcttcatatatttcgtaaataatataaaaaatatatattattttaacaaaaattctataatattttgttttaatttttcttaatatttaaattgtattttatttttatttttcatatacctattttagaatacgagaagaaagaaaaaaattaaaaagttttgtaaaaattaaaatcacatatcttatataaaataaaatatcaaaaaaattaaaagttgtataaacttaaaatgtatattttatataaaataaaatatcaaaatgagatgatttataagttttttttagtgtaaataactttcatttttaactttggagtgctaagttactcaaatgtcgattttgcaggtataagtgaaaatttcctttaaaagaaataaaagaaaaaggagaagaaaataaaataaaattaacaaagtcaaactttttaaatattaaatgcttattagatgaagaagaaacttaaactttttctaggaaaggtatagtaagtatgtctctaccaacttatgaaaagaggtaaaatacttatattttgtaacactctaactattttaggcgtgttagcgtgatttttaaatttactgtgcagctcgttgctaatcaacgaggttatcgaaaatcgtgattaattaaaatttacttatttaattaaaaacataaaatagcttacatataaaattccgggatctcatttataaaagcatttacaaaaattttactgtacatatacaaaagtcctgatgtcccaaagatcgtacgctccaggcctaaccgccccgacatgtacaatctccatctgctcgctctcacagctgctcaggcttagccttgcccttacctacacatggaaatagcaact

SEQ ID NO: 394921 - DNA, 1043 bp, Cannabis indica
ttccaccacaatctgtaccttcatctttctttgaagaaagatcttccattttctcattctcagcatcattcacctcactctccaaactcttcttggacacaccaccatccctgacctcgtttgtttcgccattcaaagtgtcaacctccattattacagctcctgcttggttattagctccattaatctcatttgtgagctcacttaaaacgacaacggaattgaggtcaagatcctcagcctcagatttttcagtcattaaataaaaaccctaaaataaaaataaaaatcaattaaattaataaactccccaaaaaacaaaaatttactacaaacccctataaatggtcacataccaaaaaaaaaaaactccaatttaactttaaaatatacatatatatacatagacaacagaatatatatatgatcaaaataatgatacctgctgtaaaggtacttcgttttgagctgaaagcttcaactttttgagtttttaaactaacaaatagtgaaaatcaagcaaatttttggagggtttcagctaattacagaagaagaagtggaagaacaggtagaaaactcaggaggaagagaaagaagacggcttttacgtaccagaaatttttgtgtgactccaagacacgtgctgcaaatctaacggtttagtggttttgagcaagatcaacggctgtaaatctactcagcttaacttcgtgtcttcacacgtgtcaaatagtacattttctcgatttttgaatctaaacgacgccgtattcacatggcaatggtcgttatgaatttgttcccacttttaactttattttttcgagttaaataaactaattgatgaaagaagcagctactgaacaattttattcatattatataatattatattaaattatattttatgtaatatttttataaaaaattatatttatggtattgattgttacaagtacttaaatatataatattttagtataaatttaaatttaaaatagtattacataaaaaaaatatgatataatctaatttaatat

SEQ ID NO: 394922 - DNA, 1085 bp, Cannabis indica
caaagggtttgcaaggaagtaaatttgattacttgagaggatgtgaaaagttgaggtgataatgaactcaatctcatgtgtatatatacacattttgaagacccttgatatgatggggtctattgaaaggaatagtccttttcaaatcacatgctattgcctttcctactcatcaatgcttatgttttatgttatcatagttgtggggtcaaaagccttcatatccagcttgttgaaaagaaaacaaattgttactatttaaaatgaaaaattaaataagaaaagagtacagattgttacttgcaggatgtactagcttctctaaaccacagaacatggtgaggttacatttttgttcattatttttgtttctgtatttaatgcctagatctttcatctatttgtgaacacataaaatgtccaagacatgtctcctattgcatggggccacatatattaatggccttgtcattacaaactaggctgtcattgcccatttactggataacaaagaagatttctaatattgcatcataaacatacttgcagcctttatctttctttaaggctactcatcatgttatttgtctataaaagtgattgtagaatcatataaagaaatcacattactggttgtttcagttttgatatgaaaatggtctccttggatatggaacatgcctaagacatctattggaaatttttataatctcattctcatgaatatgtctctgactagaccccatatcctaatcctatctagggtattattgattataaatacacacaagagtcaagactgggatcataatactatcccaacttctctaatttccaaataaaaagataaatctgcttgcaagttttctgagatatctcagctcacactcttattacaatcatgggatttcgctttgcaagcttaattcatgccaaacaactcattcagaggcctttttcaagcatgaaaggtataccgaaaggatttttagcagtttatgtgggtggtgaaagcagattgaataggtttgtgatccctgtgaaatacttgaaccaaccttcattccaagactttctaagtcaag

SEQ ID NO: 394923 - DNA, 743 bp, Cannabis indica
aattagagttctaagtttaattgcaataaagatataattaattatgttaaaagaataggtggatggttttatcaaattctttattttcccttttccattatgaaaggatttaattgttggattggtaagtattcatttatttatggatataataataataataaattatccttaatttatggccaagaagaaatatgtaccatgtttcatttttaaagcttttattattataaaaaaaataatagttaaaaaagcttagactaaaattaaatttatactcacacaattctttttattattattatttggagaaaatagcttcaaaaaacaacattaaagagaaacaaaaaaattaatggggccaaaaattagaagatattattgataaatggcatcagtaaaaattcttattattgagatgctactcataatttttttttttcaataaaagaaatcattatattatatatatagattatcttataattattttttattaaaaaaaacatagagaaaatatagcctaatgatatcaaggatgtaaataattagaactacattttttattatgtgttgtgtaatcaaaatcaacataattatttgttgaaaaaattaacataactatcaaatgatttatcatgtttatgttagaattattataatggactaatacaatcataggtttaattccataatacacaatcattaattatgtgcctaatgttactcataaccataatggg

SEQ ID NO: 394924 - DNA, 2175 bp, Cannabis indica
gaaattctttgtttagtttgggccttatatatataggtaagtcaagtaacttttttattgttattattattggaattgtactttttgggtataaatgagatatatataattattgagaaatatatttagacaaaatacatgtcaccattgacataacttccttaaagaaaaccattttctttttctttcttacaagttaacattgtctttggtggagataacacttaccaagaatcaaacaaaatgaacataaattagaagataaatgtagaataaactaaataaaatagagacaagtattaacgaggttcatcaccctttttgtggtgattaatcttcaggaaaaactgttttttggccaagctttattcgatcttcaacaatagaggagtatagagaaaaatacatagttaatctcgtcaataagggtgttttgcacctcactaacaatgtcttggaccttataaatcaactcacttgagagagatgtgattaaacacacacatcctctttaacaatcatcctcattacaaaaataatattcatctaaatttctctctagatcgtcacgtaaagaagtaatactaaaagccttatataggcaactcaataagaggggtacccaaattagtaaactaaaaaaactaaattgggagctaactgtacagaccttcaacatcttaaaggtcatcagatgagactaacagtaacagtatccaagttactaaaatttcccacaaatctacttattttagtcacttggtaaaatgtattatcgtattcctgttttgactgttccatatgttgtgcctctaacaacaagagaacttttagtgttcttcaatattctacaagtttaggcaatgcctaaacttttctcttgttacactcttagagaacatattagccgagttctcatttgtgagaatcttcttaactgaaatcttttcgctaccaatgatatctcttataaaatgcaacttgatgtctacatgatttgaccgttcatgaaacatgggattcttcgtaaagtgaatatcactttaattgtcacaatgaacaatcaactcatctatattgataccaagcttatttgtgaaccctttaagccaaataactttctttattacttatgttgatgtcgtatatttagcctcagtgaatgatagagtaacaaataatattagagttatctccataattacataattaaatattgtgttaggtgattaataattaattaaaaaaaaatatgtaaataaaatcaaaataaatattgaaattaacataaaataatgtgaggaaatactttttaaaaaatattaaaagtaatttttaaaaattatttaagtttatttattttaataatggagtgtacttattattttatgaggtacaaataagactcgctaagtaattagtgaaattaattacatatttatccaaaattttatcattgaaatagattagaataaaacaaataaaatgaagtttatcctctttatcatcctaaaattctttctctctccaagtctctatctattcggcctaaggaaaaaaccaagaactacaccgattcatcctaagttttgaggaattacaacaaggtttgaatacctataatttcaatatattaaaaaattatgccataaaaagtaaattaattcttaattttttcctatgtaatttctacttgaattagattggatgtgatcgccaccattcagttacatgatcatgctcattttcttaagttctatttcttttgacgaggtttttatccgtaaattttgatcaatactaaattttaaacaaattgagattattccttatttatcgaaattttcagaaacagatttaaaaataagattagaactaaagaaaggattaagaagaaataacacaagatttttatgtgatcgggtgttaacaagtcttagttcacaagtcaatattatttgagctttaaagaaaaaaacccaatgcaaagtatttggagcccaatctcagaaattgtagggaaaattacaacaaaaaaataatggaataagttaaaaaataacatctttttgttattcatttattaaaataacccttatattataatatattaaatatactcactttttgtagtgagttgcctaatatactctcactcaaaaacgtagagtatat

SEQ ID NO: 394925 - DNA, 1306 bp, Cannabis indica
gcactatatatatatatatatatatccttgtcgttgaaatattattgagaatatcatccaagaaactgctgtcgttttcaggattactattatttgaagtagtcgagtacactgtcataatatatatatagatatataaatgtatatatataaatttatatagtgattagtgacgaattagaagcctatccctttgttgtgtgcttggccattatggtccatatatatatacaataatacaagagtactacaccaccaaacaaaaacccataatcataactgctttgaaataacaacaaataataatgataataacaataatataaatcgcactaaacatataaattataataataggaattgtgtaaaaaaaaatattagtaaaaaaattataatgtaccgaattttaaatatttttataatttttaaaattttatttaaagaaaatacaaattttttaatgtatctttatattataatattgttttgttgttaattttttattttttgtatattatattttacgttatattgatgttatttttttgtaaattttatacaattttgttattattttagtatattgtttatatataatactataaaaatataaaaaaatttaccaaaaataatactttatgtaaatttcccaaagccattaaaaggttattatgcctttgagttgagttgtatctcttctttgattattatcttcttgtttatttaatatttttctttaatttgtaaatttacaatatcaagtaattttaattttacataatttgagtatcttatattctcgtattgataagttgtttaggatagtaaagaggccagtagtaatattcagtactatcacaatatgatatataagttgttattagtataataaaatatcagattcaatcatgagatcgtgaaacgagtgaaatagtcgttttaggccccccactatagaccccattttgacaaaaaaaaaaaaatattaaaatagaattaataatatatgttgcattaatttgtttagagtaataatttggaagttaaacttaaaagttcaaatattctaaataacctcattttatacaaatgctccaattttaatttttacttaaggcccaaaataatatagagtcagacctgactattataaaaaaccgtttatatataattaatcgcaaaagtgtcatcttatatagtgaattaaacaccgcaggtggctaatcactacaaaaaaattttacttttagtcacaacaaaaatttgtgactaagactaattataaattattattcttatgttgtga

SEQ ID NO: 394926 - DNA, 583 bp, Cannabis indica
tttttgttatacttttcttggttcgtagtcacttgatgagtagtatgtattttctgggtgtgtacgttttatcattatattgtatgcctttattataattattattttatgatttgtagtctttagtattattctgtatgtattttctggtttgtagtaaaaatatgtatattataaattaatattattatttttggtttaactattataattgtataatttataaattttatttagttaattaaaattattattgttatatttaattgtatttatatataattaattaaattattatttataatatataaaatttgaattaaaagaaatgaatattattttttttaataaaaaaataaagaataataataaagaataaaaaaagaaaaaagaaggatatagtgacactttttgggtgttgctgttactttttgagtcagataaaacttaactctaaatgcctatagtgacgagtagagagtgactgtaaaagggttcagtgacacgtgtgaagtgtcactaaaaagtatctttccagtcaccctcattagtgacgcgcggtgaagtgtcactaaatagattt

SEQ ID NO: 394927 - DNA, 607 bp, Cannabis indica
aagaataaaactaaaaaacatacaccaggtactctaaattctttcattctaaagcttcttcaaaaattttaagactactaagtttatttttggtaaaagatgatgagaattatggatccatgaactcaagctctattaagttaccgttaaatttattttttaacaaataatctcactaatttattaatttctcgtgactctattatactcaaatttacgctcttaaattcataaaacgttttacacaaagtgtaaatatgttatccattgttataagcactatcatcactcactcctctttaaatgatttactaataaaacgggtataaatcatcataatgtattttatctctaactctgcctaaatttcttataaatgatatattcgtaaacttaattacagaaataaatactttatcatttaacacttgaacctaactataagaaagtcatactacaaaaaatcttacatttagtcacaacaaaatttgtgactaaaagtaaaatggttgtgactagttataaattattattcttatgttgtgattaaaaggtccgtagctaaaagtattagtcacaaaaattacaatttgttgtgactaaatgt

SEQ ID NO: 394928 - DNA, 1605 bp, Cannabis indica
gttaataaagttaattaattaaaaagaccaaaaaagaaaacgaaaaaaaaaataaaaaaaaaaaaaaaaaaaaacaaagaaagagatggaagcaaagtgaaggtgttatagttttactgagtcaaatagacaaaaactgagagacttggttctcactttcaaaaagtcgttgccggcaactatcaattattattattattattattattattattattattattattattattattattattataatttttttgaaagatattattattatgtcttttgtttctcgatttgtgcgtgtcttttgtttatatatatgtaataattattcttattactactactactaacctaagcataaaagaagaaaaagaaaaagaaacacgttacattcactccattctctactactccaaggcattgcctttagttttcagctagctagttctttgtgtttattattattattattattatttgaaatgcaactagttcctttgattggagtggacccattttcattttttcttttatagacttaattacactaaactactatcaatttaatacaaaaacctatcatcatttgtagaaagcttggtagactcattcatatttaagagctccattttcattatttacctttttttaaaaaaaatatatataatatataagaatatttgtgatataattattttatattttcgatttcatatatatcatatattatataaattaaatatgttaagttacttctgtctctactaacctgttaaattttattaaaacagtgtaaacatattagtaatccacttatattttcaataaaaaaattattaaataattttaaatttataaaattataaataaaatataaaaaatttatttttcaataaaaatcttattaaataatatagaatttgaaaaaactaaataatatttatttagttaataaaaataatacaaaaaaaaataaaaacaatatttggaggtatatctctctctttgtttcttcttcttcccttaagaatgtaattgtcctttttaattttattattgtttagttttttttttttaatttagaattatttaataagttttttaattgaaaatatgagtagaccactaatatattgacacatgtcaacttttaatctattttaataagattatttaatggactggtagtgatgaaagtaccgtaaatataactttcggtatttaccagagaaaaaaaaaaaaaaaagcatgtaatatattagtggatgaaatctaaaatattatgtatttatgctgtaaatattgctctatgtgaataagatttgacacactcatagtgacgagagtaatagaaatataacttaattaaggtacgaaaaaaaaaaacaatgtggcatataagtgtatgaaaccgaaaatataagtgtagttatgctacaaatatccctaatatatataattaggggtgttcataaaatagagaatccaatctatgttgtattatccaatctaatctaattcgcaaagtaaagatatatgcacttatgcagattgaattggattgtaaaatctaaaattcgctattgtacaagttagatgttgattgac

SEQ ID NO: 394929 - DNA, 723 bp, Cannabis indica
tccccctctacttgggcaactgttctttaaagtcatgttgcctgccatgcccaacttagttttgttttttggtttttaataggcttggagagctcagggttggttaaagtacatgattaattgttgtagcttagtgatattttacaggtggtattcttttaggacccctaattttgattgagttagaatatgcaggaatgaggatgtcctactgagttatggaaagaaaggccctttgagttttttttttaatttttttatggcattttttattcaactgaattttcaaatcttacgatatttatcacttttttcgttgattattattgattggggcagcaaagggactgcttcgttccaaaattgattaatttccatatgtattgatctaacatgactctaagattgataataatcattcttttatcgatttgaagatacacactaccaattttttttaaagaactgggccaccatcttgtgaacatcggaatgattattacaataaaaagaaaaaatgtaatacaatatgagaaaacatagtcttattacctcattccaactatgagattgcaaaataataacacatgttcagtattattttttatgagatattggcggttaaattacctgaactttacgatttgtaacacttaaccacaaaaattgaatttttggctgctaaactacctaaattctggtttcgttttgctctgcacacct

SEQ ID NO: 394930 - DNA, 1239 bp, Cannabis indica
gggtggggaggggggaagtaattattaagtaataaaataaattaagggcgtatacctgacggttattctaggataaagttaagccctttatataggagagcctaaaccctaatttacaactgaaacccttagatatttacatattaaattgattaaatacaaaagactaaattacttcttgaaagtagatattttccatccagtttgttggcttgttaagggacccatttgcgggtagcttgcattctccggaccaggctgtatagagaatcatgccaggccaatcttggccagtcatacactgtaggatatgatttttctttccatgaaagtttagcaggttgaggtctgcccggccctactcctgctagggcctagcagatcacgtacctcctaagttcttgtacatcatgttcctgtcagttttacgaggaagaggccaggatttggatgtgcaggccagcctttggcaagtggaggatggctttgtacaccttcccgttgtacaggtcaggttcttttggtaagaaagtcactttttagctgaccagcttatgcccagatcttggttgcccatacaagcttaccttggccagcctataggcttctcttgggcgaccagacatgttggtacagctttttaatagctcacttcactccttttggttactgcttgacgatttctccataccttgtatggagaccttgtctcgctatgagcaaggctttgttccacatgtactctatcttagcttacatggacatcccacgtcaggtggacagaatttgggataacaagaataaatagtggagtactcatttcagtaattatattagtttagtgaaatatcatttataaggagctaactattataaggataaaatacattgaagggtagaaaagtaaaactgtccctactcgatgtagatcatctataaagaatcattgattatttggattaaaactgtggataattaatatcgtatctatatttggaacatatagagcgttctatgtaatcaagagtagaattctgaatctatagtggagtcatgaggaattaataagataaagaatttacttggtaaattctagaactacttattgggagcttgattatgtaggcccatggtccccgtactagttgagataatattatcttgaagactcaattaattaggtttagttaatcaattagaattctaaattagactatgtcttatttatgaattttcact

SEQ ID NO: 394931 - DNA, 710 bp, Cannabis indica
tattatttttaatatattttattgttttataacaattaaataaataattacaattatattttaaacacatgcattaaagaaagccttaaaaaattaatataatattaatagctcaatgaatatttattcaatgaatctttattcactattagagaaccactattcgttgagctaaaaaaatgtgtaataactcatttaattgaaagttacttttactatattttcattatactttaaagaatgagctataatagttaaagtttaccttttttgtggaagtactcttaataaatatagattttaatttatatccttttgaaatatttatttaacttgtatccttagtacgattagatctttgttatatgtcttttttacgtcattaacatgtaacacgcaatagtaatatcacaatatatagtttagtaaaatatgcactatagataaaaatgaggttagttgattagaaaaaaattcttttatttattatgaacaaaaattaaaatttttactttcttttttttttgtttttttatttttttttaaaatatgtgtatatttttctttttgtcaagaattcaaatatatatagatattaaagcaggaccggccatttagctgtgcaacaagtgctaatgcacaagacccacaaattaaaaaggcccattatgacttgttagaatttttttaacccaatcttccactaatgt

SEQ ID NO: 394932 - DNA, 1137 bp, Cannabis indica
aaaaataaataaaattcttacttttgtgtatattaatatgtataacaaaattttacattagagtgaaccacttttgatttgtagagacttctctattttcaaaaatagaaattataatttaaagtttttatatgaaaatataatttcatataatttatagtgtcaaaattatagtattttagcatttggaaatttaaatatattatgcagtattgtcgaaactaaatttatcagacatactattgggcaacgttgttttgattattttaaattttatttttgatctcgagcaattataaattattcaaaaaaaatttaaataaaaaatgtcaatataattataatataagttgatttatagtaaaaatttaattataatttctaaatgatcacctattataacaggttgcgaacaagtaattattctattttaaaatttagattaattataatcaattatataagttaaataaattaattttttaattaaaatatttaataatttttttaattttttttaaagatatttgtggtataaatactataagtttttgattttatacactttaatacctaccacttattttttattaaataccctaagttatatttctgttgcttttcgttactactttttctgttaaatatcctatcaaatatagagtatttgtgacataaatacctgatgttttaaattttatacaattatatacactacatgttttttttctagccgattaaatactataagttacattttcgttaacatattagtggtttagtcatattttaaataaaaaataattataaatgtaacaattatgttgacagagtagaacattaatatgttgacacgtgtcaatttagtctattttaatagaattttctcgaagtgataatgacaaaagtaatgtaaaaacttaactttaagtatttaatccactaaaagaaaataaaatatggtatataaatatataaaatttaaaataataaatatttatgccacagatactcttatatttgaatatgatttaataaaaaaggaagtaacggaaatatcataacttaaggtatttaattcgttaaaaaaaatatgatatttaaatatataaaatcaaaaatttatgatatttatgc

SEQ ID NO: 394933 - DNA, 987 bp, Cannabis indica
ataacaaaaaaatgaccaatatgaattgatttatataaaacaataaacaaaaaattagaaataaatacccaaaaaacaagttaatttcatggagggaaatactttcaaccatcaaaactgagaaaataacactacaaaatatcaaaacaactaaacaatctaaaccctagaataaagtcaaaagaatatacacaacctaaaatagaaataaaattttaaagttgcggcaaaacaaaaatgaaaccaaaaagaaacctttggacttccatctacttggttttttccattcttaattttaaggaggaaaatattttcagccacattactcttcaatttcttcttaacaggtcaacgatcacgtttagtcgtagacaaagcaaaatctaaatcatcatcttcaacaatgggacatttgcctttagctttgttggcaagagatttaatacctatttttgaatattttttcaacaatagtgatggagaagatgaagaccaagtaatatccatatatatataaaacagttcaaagaagaaaaaaatgggagaacatgtgggcaattgatggaggaaggaagttggacatgatggaggagatcaatttttttggatcaaaagagagttttgatcgtgggatataatttcaaacagaaaccgagattgaaaatagaaatgaaagctaaaaatgaaaagaaaaaaaattagaaaaagagagaaaaaattggttgagtgtcaaacttgtcaaatgatatcatgcatgcaaagagcgtgtctaagtgatatttttgtaaataaaagaatattaaaggtaaaaaaagttgctcaaattgtgtgagggtatattaataataaaagtaccaatttatattttacatgtaacaatttcttttctttttttttttttttgaaagatgtatattcataacgaacaactacacaagtttaggcaagtccgccttaacaaagacagacgcacaagagggataatct

SEQ ID NO: 394934 - DNA, 374 bp, Cannabis indica
ccctccaatcccgaaataaaaagccttagaagtggcaggggcatctacactaactttaatcatatcaatattgggaaccgtccaacgctccacacgaacacaaggactggaatccattgtgtttgcagaatttttgtgagaaatcttccattattaaagtatgacaacgcagtagccaccgccccatttgcaggagattttactttgccaaataagcccatttcttgctatacaaagagatcaacaaatcatcgtaacatgaaaaactaatgtcttcggaaatcctatgacaagtttgttggaatttattttaccaggatctgatatctagcccttgattcctatctgtagcagagcattatcaatatctgtag

SEQ ID NO: 394935 - DNA, 902 bp, Cannabis indica
agcccaattaaagttgaaaagcccagttaaggcccaataagcccaaacaataaataattagaacactaactattaaaagtatatatatatatatatattgttttaaatgatttcacacgttatacatatttagtattatttagtaatttttttaaaaattttaaataggttaaatgtgataaaaaaatattcaaatatattagttgtgatgaatattaattgaactccatatatcttgtgttaattaataacaattaatattttcctttttcttgaaagaataataactcacatttttcaaaacacaattttaatcccaaatacatcataatattaacaataataattaataattaactaaatattgaaatgttatcatatatatatttaaaacctaataataataaataaataaacagaaaatttaaaaccaattaagttattgagtgggtggccttctcgtatactcaatttataatctttgtagatttggaagatgtcaaaaaagctttaatgtgtgaaaatgaaagaattcaagttggagaattagagtatccttcatgacaatgtaataattcaaaggattgtgaagatcttctagtgatattaatttagtacaactccaacttttgtcagaaatattcattaactgtacaatttgtaatcaaaagacatgatcatgagtttagataaataaataaaatacaataatatatcatcattaattttgttattaattgttaaaggaaatatacttaattaatgacttgcatattctttgtgtttagaatcaaggtgatatttttttttttttttgaaaataaagcgtaatcgtaccattaataatcaaagttagacatcgcggtcattacataataagttctccggaatcgaagaaaccg

SEQ ID NO: 394936 - DNA, 564 bp, Cannabis indica
atagaatagaataatagtgtgtagaaataataataatggtgaaataataattagagaccgcaatattatgaacttaatattagagtgaattaaaaatgaaaacctatctataaattgatcacataaaaaagtgttaatttttttcttcaaagaatattaaataaaaaaatcttatgtatgtatgcatgatagatgaaaaggagtttagaaacatggcaattccttccaataaaaaaatattaggacacaacaaaatacaataatgcttgtatgactggaaaaaatggtcaaaaaattacttcaataattaataattcaatgaatgatactcttataatattaaaataatataagaaaatacatatatatatatatttatatataagatgagttgggctacgtgggggtaccatcttaggatgcagctaggctgaccgaccttatagggggcaatactcacctcgggggtggtactctaggaatgtctcctccttgctcctcatattagttattagtgcttagtagcatgtggtcttgataattagagcaagtattgtactacta

SEQ ID NO: 394937 - DNA, 596 bp, Cannabis indica
caattattaaatttggaattcttgattaaggaaattttctatgtatgtatctttagattttagagatatttgcatatattatttgaaaatactaacggtaaattaagtctcttatataagaataattaataattctatatatagtatacatatttattaatataatcaatttaattgataattctaagtatacatatttatttattatattatgatatagaaaaatcacctctcataatgtcttaaactagacatgtacattaatattaataaacaccattatccatcggtatatatttttttttataaataatatttttcaaagtgttattgttagtagattttattttattatttaaacacatgataaaatatcttttttaacagatattttgattaagaaaatatatttaacatttattatattaaaaatattcttgttttagttttaaatccactgacttctatataatatgaatgtttgtttttttgtctattaagtaattatattatatctataaattttttctattaatattaggtaatattcgataaagtaaaaattatattttcattataattttatttatatatat

SEQ ID NO: 394938 - DNA, 900 bp, Cannabis indica
tgaggactcctctatgggcactccaagcttagtaatgagaacttcaaggattttttttcaccatgtttatttgatgtttttagatactcaagtgacacttccctaaacataatttacatcaactattcatttaattacttaatcaaaataccaaaatcattaattttataattaagtaatatttcacacatataatttagttagacgagccattctaaaaataattagagatttttttatttttatattttaaattttttttttgtatattttaatgaaaattcagtaataactcacatagtaatcaacagaccaacttaataatgacaattaaaatctacataacaactcatatagtaactataagagtaattatcagaataacccaatcagtaaaaatttaaaaaaaaaaaaaaaaaaaagttaaaaaatagcacaaagagtagagtgattcttcaaaaaaaatatacttaatttttattttggtttcttgcttttggcccctaactttgaagtctagctcggtcccatgtctacttaaactatacacacgttgatgtggaagtatgaatcactaaaatttattgttatgaaatgtgtgtattaggactacataggtgggtttgattatgtaatagcataattaattcaactaccttgtatacatgaagttgcaaatatgaaattgtaacctagacatatgtcaaaagtatcccatttagttggatcggatgagatttccaatttgatggatcattttttatctaaaacattcgaatacttattggatctaattttttccagcagccaatctaattcgatccggtttcaataattttatgataaattattgattatgttattgtatatatgaagttgcaaatatgaaattgtaaccta

SEQ ID NO: 394939 - DNA, 1302 bp, Cannabis indica
tactacaaactcagaaacactttagtacaaaaatttgaatcatacaataatgccacttacgttttttaagttttaaagttgtatatggctaagcaactttggttatgtattatcattgattctacacagttgatctatttttagctttatgatgtgaaatttcgtattgtatgtctttttagagtttctaatagacttcaatgagtgatagattggtataattatatttggaataatttgatgttgttgtttggtggattcttagttttttttattagataacataatattatttattcgttaagtctgatacaattattaagtgagaatggaaacctttcactatattgaaatcaagttaaaattaaaaaagatactaacaatcttattatgcattttacagtgctcgcatatgttgaacttgatgacaatacaaagagcatatctgcggtcatgttcacagatattgtggaaaaaataatcttagtttatttttgaattaacctaagaacatatttaaattatcaagctttcttaaacactaatatattacatccggtatttacttttaattgtcaaaattataaactataatatttagatacacataataataatctcacctaataactaatactattattcttttaatttttaattgtattacttttaaataacttaaaaaaaaattaacataaaatttagtatacgtgtttcgcacgtagctttttactagtagttatatatatatttatatatttcatatcacaatatatagtaagcatttaaaacatcctacaaatttgtaaattttaaaataatatatatacaacaaaaaccaaaaataaagttcacacacttgtatgcatgtctattttattttatattaaatactattttttatattattattcaaaagttttataatatattttttaaaataattaaaatatatagtatcatataaaaaataaaattataattattgagttactaaaaatacaaataaaatgtgcattttcaaaatttttaaaaggtacattataaaaataccctaaattatacatatatcttttgtcatgctttaataaaataaatataagttttaaaactaaatataaaaattagattattatctaatgattaaaaattaatattatatacgtgatttcctgtatatatcaaaatatatatagaactgtggggttttttttttcatcaaataatgtgctgccacgtcataaatattgtggtttgtgtccttgagaagtagggtatcattattaattgattttttttttt

SEQ ID NO: 394940 - DNA, 497 bp, Cannabis indica
cagcactttttgttatcatcttcaaatttgggcaattagaggcaagagcagctaatgtattaggtccatgtatttaatcttaatgtaaatttgagatctatctaaaagtgtgtcaaaagttgattcaaatttatcatataataaaagttatataataaaagttgatctaaatttaaatcacaaatgcaaaatttgcctttatcttctaatatataccaccactaccacaagcatcaatccattgcacaaaaatcattaaaactataacacaaatgtcattacacactaatataacatggaaaacaaattaaaaagccaaaaaaataagtttagcacctctcgaattaccatataggagttgtactaaaattgttgtcgatcctggcaccgacgagattccaactctttcttgaagtgcttttgatattttttcaattggaggatttttccatgttaggctaaaattagtctaaatttcgggtcatattttcggttag

SEQ ID NO: 394941 - DNA, 552 bp, Cannabis indica
aaaaaaaaaaaaaacactaattgaacaataatagaacatctaatgaataccattatcgaaaatacaaatcttgtgaacgaatattaacttaaaatcacatacccattcctaaaaattttaatttatttttgacatttgcctcctatctctatacaaacttatggcaagactcttgcttcatagaaatttattcatctttcactaggaatgactctaaaaattgctcaaatggcaaagtttttgggtataaggtgaagagagaagtttgtaggatttgggaaaagaggaagcagagaagagagagtatgtttatgaggggatattttggagtttagcaaaaatgtggtcattttaatttgaaagtgttatttttgtattaataataaaatttcagtttattaaaatgttaaaaaaaaaataaaatcataaaatcgtaaaaagaatatgattttaagtattgtataaatttctctattttatttaatactaaacaataaatatcagatgatcagttacaatatttttattctatatataaaatgtggctatata

SEQ ID NO: 394942 - DNA, 1145 bp, Cannabis indica
ttggggggaaatagatctaactttcaaatctaccatgagattgatgttcaaagagtgatcgaaagaagtctatggaccttcaaaaacgctcctctgatatttgagaggctgaaaccaagagatgttcctagggccatgagactacaccatctggaaatttgggtgcaattgcatgatatacgatcggggtttaagactgaaagagtggtccgggatgctgggaattacatagggggatttattaagtctgatgagaataactttaatggagtttggagagattatttacgggtacgtgtccggattgatattgagaaaccgttaaagcgtataatgaagctgtagcaaatcggaggacactggttttggattaatttttgatttgagtttgtgcctacattttgttttatatgtagaattataggccatactgatcaatactgctcccgattgtttcttcaacaaattgctaccattgttaaaccttacggtacatttatgaaggcaacacccagaataacacagtacgcaatgggatccaaacactactacaatttgctctttttagtgacacaatatagtgactcacaaaaaagtgtgtgtcactaaagagtggggagtaatttttagtgacatgcacaaatattagactctaaaagttcaatgttagtctcttgtaatgtgggtcactaaaaatatagaatgtcactaaagagtgaacactactacaatatagggctttagcttcctttttttaaacccaatttataaaaagggaatctaaagtgtgtgaaaatatctgcattgacatttagaggcggtttttttagtaaaaaccataggtatagaatatatatatctatgccttcggttgggggttggggaaaattagggtttttttaataaccctatggtgtcggttattgagtattaaccgacgccataggtgctacctttattcgacacggggcacctatggcgtgggttactacccaataaccgacaccatagggttatatatcagacccttgggcatcgtcttcctcatttcacaccttgctaaacacgaagaatagccacccaccgcagccccaaacccacgaaaaaaccctcaccaaccagtactaaaacaacctcattctccc

SEQ ID NO: 394943 - DNA, 899 bp, Cannabis indica
ccgtaaaaatagtaaaaaaaaaaaacattctttgaacgtaaaaatgtaaatattttacaaaaaaaaaaaatagtaccttatgtaattattccaaaaaaaaaaaatatgaaattagaaagttcaattcttgaagaactttggtggcatacatatatagataacttgtacatctagtatatttctctaatatataataaaataatgtgattagtcgtttttttcgttttcaatatattatttttttaagaatttatgaatgatcgtttgtgtattttttttttattttgtatgaatgacattttgtactattttttttttatttgtgtaaatgattttatttttactattattgatagagaattgctatttaataccttaaaatgtttaatactataaggatgaacatttaggggtttttataaaaatactagattttaagcaaaaatttacaaaaatactatctttttataaaacaactataaaacaataaaacagattaattaaaataacagtaaaacaattaaaaaacaactgtggaacaaccgtgaaaacttaacagagtatttttgaaaaaaaaaatatagtaatttttaaaaaaaattatgccacacagtaacaaagtaaaaaaattagaaatttcagtatgttgtgtaaaaatcctaaacatttaataattaattatcggtttcctatattatttattaaatcaaaatttgtagaactcgatatgtcacctcttgtagtatttggtacctcctttaacattttttgtccataattaattagtttaagtatttttacaagggaaatttgaaattatatgcatattagggactaaaattggtatcttaatctaaaactatacataatttgtaaaatgggataacttttacttaaac

SEQ ID NO: 394944 - DNA, 1013 bp, Cannabis indica
tgtattatgtatatgtatatttttttgtaattattgagaagttctgtaaatattcttttataattctctctctatcttaataatggtattgaagtgtaaaattgttggaatgtattgcatggtacaaatatacaaacaatatagaggaaattagattttataccctttttatattattctcttttatttttaccttcttttttaaagcctaccatttttacctctttttttaattactttatcaattttacccctatcgcctcaatatactctccgtgtaactcttttatgtcagggtattttaggtacaatatatataaaaagagatatgtttcaattaaatataaaattagaggtagatttaattaattgataaataaaagaagtatttttcaacatatcccaacaatatagtgtataatctttgtgggcctaaaatacaaacattaggcccaaacagaacaagtcggtatggaccaatcttgtaaggaataagttaagaattatatacattaattaaatatacgtgtaattttaattaataaataccttttataatcaaagtattaaatataatcttatataacttattaaaattatagtccctaacaacataataacgacatgatttataaaaattggatataaattaaaaaataaaaaataattaaaattaaaaataaaaataaaaaataaatatacaatataatttccttatatattcccccatgttagacatgtacatatcagtgtgatcatacctataagccaaacgttctttacaatacaaaataataaagttttggttggcaaaagttaatataatttagattaatttacgttataaatatttaaattttaatttataaaaataaccgcaaattacctaataaattactattattattaaccaatattcacttgtttgagactttttcatagggaattttacaaaaatactgctttttgaccaaaactttacatttttactgggacacggcaaaaacaacttt

SEQ ID NO: 394945 - DNA, 720 bp, Cannabis indica
ttgtaacaccctactagattaggagtgttatcatgattttataataattgtacaactcgttgataatcaacaaattgattgaaaatcgtgagtaattaaaattttgtttaaatacttataaataccaacctaaataattcatatataaaaccgggatcccatgtataaaatatttacaattgattaaaatgtttaatacaaaagttgtcgcctagcgactatacaaaatataactagctgtccccaaagatcgtacgctccaggtctaaccgccccaacatgtacaatcttcatccgctcgctctcacatctgctcaaccttagccttgcccttacctatacatgcaagcaataactgtaggtcaacaaacttagtaagaaaagtataatgataaacataaatattaggggtgttcatcaaactgcccaaaccgctcaaaccgcccgcaccacaccacaccgtaaaagaaatacagtttgaaattctttgtggtgcggtcgcagcttgaattaaacctaaactgtgtggtgcagtacagtttgcggttttgaattgctaatatgcgatttaaaccacattgcacattataaaaaatcaatttttatatttatataggtccaatatgtaaatattcaactcaaagtccactaattattgtattgttgaaacttattttttttttcatatttattttcaagccttatggtattttgacaagt

SEQ ID NO: 394946 - DNA, 515 bp, Cannabis indica
attttatttatttttttttatgtcaaagcaattaaatgataaattaggtcatatatttatgggtaaaatcgtttaattttttaatagtaatattatttttatgggtaaataatattttaaactttaaattttacaaaaattactaatagaattattttgttaaataataaatgagaccctaaatttgtaacgtgagcttgttcatcatttttcttaaatagagcaagaacaaagaacagatatttcaaaagttctatcatattcatttgattactatgatattgatagcatagtttagtttctttctttcaattagcaaaatacttgtaagattttggattttctttttacttcatcttaatttttggagctgaagtaatggacaatgtttctatgctcttatcgaacattgtataatgaaatgtttagtgtctttttcttgttttaaactaataattataaagtgatcttaattttagatgaatgaggttgagtttttctttttaaaaaaaaaa

SEQ ID NO: 394947 - DNA, 937 bp, Cannabis indica
atattaaaatataatataaatacaattatataatactatctaacactgccgcatgtcaaacgaatctttatcgatatttttttacccggcctctttcacattactgttttaatgcattacactcattcatcatgtaattattttacattacaaattaatattagtaaaaataattgtaagaagctgatgtttgatacctcgaagttgactgaaggttacttttccgctaacgtacattggagttaacttgaggcctactaaatggaaagactcggattatggaggtatagtggagaagattggtaagaagattcatggatggatgagtcgccacctctcctttgcagattgagctctgttggtccaatcagttttactgcgaatcaggaattactggatgggcatctttatccttccacaaaaattacttctgaaattgacaagttatgtcgggattttctgtggagtgagacatgtaatagaagtaagatgcactttacctcttggagtcaagtctgcttgcctaaggactatggaggtattggttatagggaaggtaaaaagtggaatgttgctctcatggctaagtacgtatgggccatagctgctaaacaggattccctttgggtcaaatggattaattgcatctatataaagaaccgagacttatggacattcaacccagctgacactagctggtattttaaaaaactcatgatactgaggaatacaattgataaagatgcgttaatagcagctggatattctgggaaattcaaagctaaaatgttttatctctcgctcattcagctgagaaagtgtcttatcacaagacaatttggcacaaattgaaggttccgaaacaccgatttattctttagcaagctgttaatgagaagcttctcactcgagatcagttagcaagattcatcacctt

SEQ ID NO: 394948 - DNA, 1303 bp, Cannabis indica
atgtagtgatagagaagtgcttcttaatcattcttgcattctatttaaagatagtattttgttaatatacataaatgattcaatgcctgtgatgaaagaaaaattttagaacagatatataaaattcatcatactattatttattatatataataagatatatataaaaatgtataccatttttcatgtacgattcaaagcttgtacattgtgagtattgtgtaaaactatacttaatacgttattttcttcttgaaaagatatacatgttaacttttatataataaaaatttattacaattaataaaattatacataaaatatttaccgttccatttatacattcatcatcattaagaaaaatatattccctattatcttgcctaagttggtacaaaaataaaaatagttaacataagcacaaatataattaaataagttacataattaaaattactaaaataaatttataaattattaattaatacaaaaattaatattatttcataccatttcttccaagtttagatgtagagtgtctgtaccatgattacttttatcctttaaattgcatgttccaatttataaaataaaattatcttatcaccatttcctttattatatctaaaaaatcaattaataaataatagattaataaaaagatttacctttttggacttgtcattggattttcttttgcgtgatttgaaattccactctcctctgtctcactcaagtaaattggtttcgagagcattccaccagtttttggcgactttcactttcaagtcgattcactgcctacgtgccctttacgcccagtcattctgaagaacacttgcccccgtcttaccgcgattgttggcacggagttagtcggggcttcttcctcgagtcctatcatgattgcgcactcgacgaaagagcattacaagcggcatttcccttcttcactgacacgatattgttggattgggctttcacccattgtccaagatttcccactgctgcccccatgggagtacggggcatgtctcagtccgagtgtggcagatggtcaaaaaagactttcaagtccactctttattcatttcggtgcaccttttgtttttgtacacttcaggatcatgtattgatctttctttttgtaccatcacagagggcaatactctcactaatggaatgattctccttgacacacctagcatagattctaactaattttctatctccggtggcaatataaaaaatcttttgagataaggatccttcttcaattagtttgatggctttacaatatagt

SEQ ID NO: 394949 - DNA, 518 bp, Cannabis indica
aaagtatttttcttttgcaataaaaaaaaaataaaaaaacttcatttatgagtaagaatatttcaaaaaaaaaaaaatattatctatgcttcttgtgaggaatcttttgcaagagaatttacattgtcatgcaatgttttgaaatataaaattttaaaaagctttttttttttttttgaaaacctgtaactttcattaaaagagaaatgaagaacaaattacagtacaagcaggtggaagagaatcattccacactaatttcttatcaagcaacaaagtttttttttacaatacaataagtatcaatattatttgtaatatcccaaaaaattttattgatatttatgtggccatattttattaaatatgtaagtatgtggatattaaagtaagattacaatcttacttaagctaattacgagttaattagtagaatttgagtaaatgaataaataaagcgtaatttattaattacagagattttattagaatatgagggtatcgtggatactattttt

SEQ ID NO: 394950 - DNA, 897 bp, Cannabis indica
aaaaaaaaaaagaaagaaaacattcatactcccccttcatagttttgagaaaaatcccttaattgttctttttaaaaaaaacaccaactttctttcctcaaaatctattattcattattcaatcaaataaataaggcttgacctattaatttactaagttaaatccttcaattaacatcttgtacttaccttacgcaaaaagataaaaaatcccattattttccaacttttacataattatggcatatttaaaaagttggactttggacccaagattcatttataaaaatgtaattatttccttcagcccaatgttttatctataaaaattattctttattctttcaatttggtgttaattgaacaatattttttttctttcaaatttacaatatttcttcattaaccaaaaagtggttttttaccaaactttgaacctttgttatttcttctaaacttaacgaaattgaacaaaatcagtaggaaattaacctatgtaacacgctctgtaaacaccaaaccccatagaaaacaaatctgttttactaaaaaggttataacatgacaaagtcgctatttcaaaactgtcagtttaatattcttttcgattctttgtgtttacgtgtatatgtatcagtgtatacacaataaatatatgtatatttttgttttatgattaacaatatgtcaattaattgtgcctggcttaggctagcttgtatataaactgtttatacatgtgtgaagaaaatttgttgtttggccgtactacaaaaacacagttttgctgtccattaagaagtgattcctaatacagtagaacctctatttaagaatattttattcaagaataacttctaatttgttataaaaaaatcaagtcttgatttgggccag

SEQ ID NO: 394951 - DNA, 741 bp, Cannabis indica
accctttatttttatttaagtttgagtttaggacgtagggcgggggccgaggtctggcattggggccgaaatctaaggttcaagttcaaggttaattcatctatatgacaaacataaatcaaagatgtctctgaaaagttggatagcaaactaataatatcctctaaaaagatcctaattcattaaccaaaaaaaaaaaaagaagaatcttctaaaaaaattcaaaaaaccaaagctacaatcaaactcaaaagagctaagatggtgtttggtttattgtgaggattggcccatatggtatgcaagttggactacataaggccaaaaaataaaaggtctaatatattttttttttaatgtctttcatgtttttttttaatgaatccaacttttcaaaggactaaactaacaacttgtcattgatcactcttgcattccaattctcaagatcattttcaattcagttattatttttaagcaaaaaaaaagttactattatttattatttttttcaaacttttcatattcttttttttattattattattttgttgttgtatttaaatcaataataattttaacaaaataattagagttttttatgttttgtaaaatatataatcgtgtgataatatcaaaaaatattatttataaactgcatttttttttgttgaaaatgttttaagtggctttagcttatttcaaattgcaatgtaatttttcttttattccacaaactcc

SEQ ID NO: 394952 - DNA, 793 bp, Cannabis indica
taacaccaagctacatcaacctattaataccaaaataatattgctagggtggttcaacttcaaattgacataacaacttgcaattatttcaattaatggcaggatccccataattatttttcactcaagtgaatgcatgatctaattgaaagaagaaaataaaagctctgaaaatataagatattaaataatggaataatcagtcgcaatatagcaaaaaaagtgtattcatgatttactaattaatgaagggtgtaatcatttacaagtatatatttgtgaacatttttttatagtacactgtcaaaattttagatgtataatttttcatctaattgttgatgatgttgagaatggaaactctggttttgattaaacgcctgaacaagcattctagtctctcttcaaaatcttgaacgcacatttctagactttgcatctctatcacagcctggtcagtcttccttgtctcattactcattaggttgtgtagtgcagcatccacctttgcaaattcattaacaacatcttcatcacatccaactcttttgctttgcataagcttggaaactaaagaccaaccaccaagcttagagtgtgtctttggtccagaaataaaggacaacaaggactcaaacgccgcaagagtgacagcctccacctctctcataacactaaccaaagctgtgatttcaccatcattgttggaaggagagactgagctttttgattcaaaccctttcaaactccccaaggccttttggattgcctttttaacaactttccttgaggc

SEQ ID NO: 394953 - DNA, 1415 bp, Cannabis indica
aataaagaacagtttccagcttacttcactaaatacaacaaagtatgcgacttttaaaacgcgagttggctgttcatattcttacagaagctcgcaggcttaggatgcattcgagactagtcgagtctaggatgtatatgtcctttcaaagtcgcttatacggacatcatataacaagctgatacagcaaagacattcgagtctatattggtttatcaaggctgttgggtcaacaggaccagctcgtaacatagagaatcgatctctatgtttttgcagaaggatcgcgaggatactcgcatatatcctgatatatgtgagtttaaagtcgttccttattcctacataatgcgagtcatacgaatgcgattagactcggtcatattcgcatcatctcgctgagtctggttcaggcgaggttcgtactcgaggggtctctcatcaacatctctgctctcctcgaggaaagtgaatacacgtgtctttttttaaaatctcactataaagtataatttattatcgcgtctcatagatttattattaaataaataatatagaagaccacaaactacttataatgtgccacactgatatggccttggcaccttctcatgcataatagcaatgccttgactttttttggttatatcttaaaaaggtaataatattacaaatttatagtgagctggccaattaaatatttatacagtccaaataaaaaatttacacaaatacctcttacactcacctttaagctacacgatcaatgctttagaaactcgaacccttagtgcgatcaaacgagtacaacaacaatgaatcaaccctggcagtcgaaggaccactattaattttagcgacgtgatcacgtgagaagaagacccaaatcaattcaaatatatgcaattaccctctgattcaaaaatctgaagtgaaattagttcaaaacataaattcaatcttaaattataattaaaattctagaaaactaattctcctaaattcaatttgtagattcataaaatcactactacaaaattaactgttcccaacgataataagagggtcaattatgaaaatcgttggaaaaaagagtggaagtttttcctaacgggttagaaccgaagcaaaaaaatcgttaggagaaatcaataccaacagtggagaattgtggcaatactaaatgaaattttttaaaagaaaaaagtgaatcccaacaatttataactgttattcaccatagttataaatcgttgggaatactaagtattccccacaattataaatcgttgggtataattagtattcccaacaattataaactgttgggaaaaattctttttaacatgttattttattaagggagttctatttccaccccataaaatgataattacaccccattattagaaaaa

SEQ ID NO: 394954 - DNA, 1677 bp, Cannabis indica
atatatttttaattattttcttccatcaagtataaatttatatatactccataaaaataaattatagtatttttatcacatgtaaaaaaatatcaaaaactcaaatttataaaaaaacgctaagttgatgtggaatgttaatattaaaaatataaaatataaaatatttttaagaaaaataaaaaaaaaataagatatttatttattttaactattttttaagatataataataagtattaaatagatatattttattacaaataaatttattatagagtttttaatcaaaatagcttttttaaaaaaaattgaattgtaccagttttagcttttatagttgtagcttctccataaattgttcaataagctgtttttgaactgtttaccaaacatatttttatcacggctttttcaaaaaataacttttaactttttcaaaagctatgtcaaacagacccatatagtttttatagagagttttgtggtaggtaactgcggctttgcattattgatgtagttaatgtatttttaatatgtaaataaattatatatattttataatacgatagtatacatttattataacgaatttacttttagtcacaataaaatttatgattaaaaaaaactgttgcttagtataaattatcattcgtgattaaaagatctgtagctaaatgtattcgttataaaaatcacagttatatatttttagtctcaatacataatgttgtgactataaaactaaattagtaacaatttatatataaaaattatgttttagccatatctaaatactatgctttagtcataactataaaacacaatttttctagcctagattttgagttttattctctccaacaatatttgtaaataattcatttttaatccgattaagaacatcatcaataaaacacattccatagttactgtgattgaagctttcttgagctaaactaataatcttgattgtcatgattgaattgatcataacgctttccattatgtattatagttaattatatagaagacggtatatatacattatgtcaaaatcagaatttaaatatattatagtgaatgatacacgtttaaacactacttttagataataatttattcaaaaaaaaaaaaaattgaaaacatgtaaaagatttgttataactataatatgtaatattacataaaaaaactgaaagtataacttttgaaggcgtaaaaataaatggtgcatgcaaactaatagttcctacaacataattttctatatttttaatataatatatatatgtatgtatgttactcaaggggtgttcatcaaaccgcccacatctcataaaacaaaatgcggtttaaaattctttacagtgcgattgtaatttttatttttgccaaattgcacgatgtacgatttgtggttttgaatataataattacagttcaaaccgcaccacactatatattagaaagttacaaatttttaaaatatgatttttattgacaaatatatataatatatgtgttattgcattatttttttcagagacaagttaatataatactttgatgattagtatatatgttatgatattaaaattttaataagatttttatattattaaaattttattagattgattttaaaattttaattataatatttgataatgat

SEQ ID NO: 394955 - DNA, 1175 bp, Cannabis indica
taagaacattgtgtgttttgcaatacttgctttgctcgtttgtgtttgcttgagcaaaagaaatgtgtagtatcgcttttgaaaatgtattgtggtttaggaatattataggttctagacttgtgtccatatcttaatatatcattgcaaatatatatagagagagttataaatgtatatatgtaagccctaaaatgatcaaaagtgccgtttttttttgagggaacgatgatcaaaagtgcttggatatatgcttgttcccatgttagtgctttttatgaaaataataaagaaaagaaaatcatcttaaaagaggtttgactcaagacaaagacaagaaataaagttactatatataaaattaagaaagcatctggttacttgtcaaaaacaaatttgtatttaaataagaaatgaagaaaaagcaataccataatattttgcatgttcaattcactatccctaattaacacagttctaatataaatattttacacttatttttgaaagcttattgtgttcatcttcacctaattaattgtataatatcaacaataatttgaggagcaagagtggcatctacctttaatatgttttcggaatcatgaatttgaagcaactccaactgcgatgtcaaaagagtagacgccatgaaatgttttccttctgcagctcttttctctaaccgagccgcaagcacctcagccgaaagcatccaacaaaacaaacttcacaatatattgttggtgtcatagctttgtggcacgtagtttggatcagctgatcgaagaacttccctgtatcgcatttgcagcgctgaccatccgaggatcacacttttcttatcttctaaacattttctcaagacatctcgaagtgttttgagccatgaaatcctgtcttcttttgtaagagggattccattcttcattttttctgtgttatttgaaggaacaaaaacttaatttagtaaagctattaacataaaacatggataataggatatgtatacccaagagaaggatagctcaaatcgtcataccaggctcgttccaattctattagggtctccagccggagaaaatctaattgaggtttttcattatatttatatatatttatatatactaggtgattgttacgtgacaaggcatgtagtgttagttttatttaat

SEQ ID NO: 394956 - DNA, 702 bp, Cannabis indica
cccaattccaactaaggcagataaaggtatcacaatctgtgtcaggccttcactaagcaaacccattttcccaaacaagattttggccaagaacaacaaacagattatattatacacttacacagacagagaaggtagttatattatatacacaagaaagatatacttaacacgttagtgtcaaagactaattactatttataactaataataactattccaattcttatattgtgtgttttacaattgacttacttaaaataaagtaacacttttatctttatttatgaatagggattttttacatttgttttgtgctcaataagaattcaattttgaattcctttttagtatttaaattaagttagtggatttgggttgttttcttttgcatggccatttggaattaatatgaaactagtaggtttgaaagtcaggttggaattgggcaagattcttctaatatataatattaggagtgtactgcttcttattttaacctccgtccccaaaaatatacatatttgtatattagaaccttttttccaattttattttatttgttgtgctcattgtagttacgatatttttttttctaaatttttaaacttttttgaaaaatttataataccaataacggagtttctaatataatttaagggatacgattttgtcttgtgatgtacttttacggaatatatt

SEQ ID NO: 394957 - DNA, 849 bp, Cannabis indica
atagtagcagtaggcttttgagatgcatcagcaagaaaaaaatcttgaaatcagaaggcagattgttatgattcaaaaaaggaaagatgtgctcatgaaatattacatctctagagcaaaaaattttgttagtattgagatcaagcaatttgtatgccttcattccgggaggatacccgaagaaggcacaagcagtatctcttggagaaaattttgacctccctgctcctaaagtagaagcataagccaaacatacaaatgcctttagatgttggtaactaggaactttggaattcaagatttcaaagggagatttgtgtttaagattaggagtgggagtcctattgatgagatagacagcagtgcttatgcaatctccccaataaggcaaaggaatgtgagattggagaagaatggctctagcaacattcaataaatgttgacgctttctttctacaacagagttttgttgtggtctttgcacacaagaatggtagtgtataatgcctaaggatgagaacaatgtaggaaactgtaactctttggcattgtcagacctaacacctttaatttgaacattatattaagttttgatgagctgtataaaggcaggtatagcaaattgagcatcagatttgtttttaataagatgaatccaagtgaaccttgaacaatcatcaactatagttatgaaatacctaaaaccttcaacaataagagtgttgtatggtccccaaatatcaatatgtattaggtcaaaataatgtttggacaaattatgattgctaataatgggcaattttctttgcttagcaagatgacatatagagcaatgaaaatcatgacaat

SEQ ID NO: 394958 - DNA, 1095 bp, Cannabis indica
gagaaaaagtataacacaaaagttttttcatcttttggttttccacttcccttgagttttggagagcgccgaatcccccacttcaatttatctcgccaacctattagccttaaaacaacgagagttatgtcctaatccccacgattatgcccaataaacatgggaaaaatgattggatctaaacctttatacgggcttgcctcttttccgtaatgagatcccgattccccgttaataatccccaatgccaagtgtttatccatctattaatatacatctagttcagcgtgcaaagtgaaaaatggaacggttgctggagatacttatgggataccaggaaagggcaccttccaggagaagcagacacttcacttcactcgcccaaaaggcatctaacgaatggaggagcaaggagctaagaaggtatcttgcttcccaacagtcgactcccatcattacatgcatcgaagaaagtattcggcaaatggagagtcagctcaaatccaattgctattgttttgagcttcacacagaacacacgcccaaaacgcgcgcaaaatcgagaagtcagtctttaaaatcctgacaagaaaatagaagaaattatgccaccctaataatgacactgtggtttgacggcagatgacgtagtgcattaaagaccctgtcctaagtcccacgtgtgcgaaattttttcaaaatgagatactgcaagctcctgaatcatggtatgtcccgaaagcttggtgtaaatgtcatccgcattttcgcaagcatgacacatagatactaattggagaaggccaaggagtcattaagccgcccaattgcctcacatagtgccccaggaggatgaaggcacttaccccgcaggaaaggtctccccaagtgccagccatgtgaaaggtgtctgtgaaccaatctctcattccactctgagagatgaggccatttgctcctgacaagagtgcggatctctcaaaaccaggatacactaggtctggggtacgccgtttgacccgcagaagctcagtccacgtgtgttaggctatggacccagtgccgagcttctgtgtgtacggtgtcaaaggttgt

SEQ ID NO: 394959 - DNA, 871 bp, Cannabis indica
aacaagattacttttgaattagtgacactaccacaacttcacaaccacaacttcacaacactaactgaattgatgaaaataaaagaaaaggaatataaatatgaataaaaatgagaatagaataaagttaaatttaaaataaaaaatattgttaaaaaattattaaaatgcaattagataattaattgaaataaaaattattttctttctattttatttcatttcattacctctaattctaattaaatactacttaatattagtagtacttaatattttttaaatattaaatctcatataatttaatttaataattattataacaatgttcttaaataaataatactatacttgacttacaacctccctatgtagtggccataaaaaagcatatttattgtttcctatattctttttccagttcaatacagtttttaggttaaatataaataataataataataatattaataataataataataataataaattaaaacacatctcacattttttgtacaatcttagaattttattttatttgtttatccaattaaagattttatgtacacgtttcaacttgtttgttgcacctcacaaatcaaatgtcatcacaaaatttatttataacctgtgcataaacaaatatatattttttagcctagctcccttacaaatattctttttgaaatagacctatattaacttcaaaacatcaaatgatgaactcaaaaatcaccaatttgatgacaataatcgagtagctacaacaatatccaacttctcatagttttggcccatttaagagctgaaataataagggcattttacaaaaatactaaatttggggtaatacttttcaattttactg

SEQ ID NO: 394960 - DNA, 678 bp, Cannabis indica
  modified_base (65)..(65): a, c, t, g, unknown or other
attacaattgactcattagaaagaaaggagataagatattgtagctgagtcaaaaaaaaaaaaanaaaaaaaaaaaaaaaaagaaaagaagagaagttaatttgtagaaattcatatttgttacaaacacatcattgaaaatattttaatgtacataataaagcaaaatttcaatataacaatcattataaaaaataactacttttagtaacaattttttagtaacaagataatttttttgtgattaaatgactaaaaacataatattagctacaagttgtcactaattaagttttagtcacaataaatattgtgactaaaaacacatttaatcacaataaattgtaatttttgtgactaataaagtaagattttttatagtgtaccttgtacaagcaataacccatgttctctttttaatctattttgtttgatccgttgcactctttttcaatctatttcgtttgatccggtgtactcttgcttgctaagagatttattttttctttttttaataggatatgttatgagaaaaatctatatatatatatggaatacttctcaatgggtattacctattgatggctactaaataaatttaactataaatattaaatttaaaaatattaaactattaaattttgatctgatggcaaataataaaagaaattttttaat

SEQ ID NO: 394961 - DNA, 698 bp, Cannabis indica
tctctctctctctctctctctctctctctctctctctctctctctctcaaaaaacttgtgtgagtgtttatgttttagtttgagaaacaatggtgaagacccgaagagcttccttgtccaaggcccctacccattaaggtcggtcttgagattggatgggccttagaaaaataaattattgggccttgtattttaaaaatatgtggtgttcttgaaaatcctaaaaaaatatgtatatttttgaaggaaaaatatttttttgggcctctagtttggtgggcctaggtgcgggcttagcccgccttagcccaggtcttgccctgtaccccagcccatctcacgttcaaccatctctgtcacctcctgcttcagtcttgatgtcgcctccaggttgctccagcttcgatgacttctgttagacgcaccaccaagactatagctcgaaagaaagttttctcactctcaaatgaacaccccatggtgtttactgatatcccatttgatcttgaagtcgaagcaccaccgtcatgaagtagtggtctcatccactcggatccgaacccgaactcaacttaaataaaatcaacaaataaaaataaaaaataaatttaaatatattttattttctgtttttaaaatttaaaaataaaagtgattatagaatgaatttttattttttaaaaatatttttttaaaaa

SEQ ID NO: 394962 - DNA, 728 bp, Cannabis indica
aaaaaaaatgttattttaataattaaaggcatgttctattatgtgtttgataatttctaatttagtgggctatcaaaaagataattatattttccatatttatctgtaacaatcatccttacgtgtgatctaaacatttttcttcataaaatcaaaatcatattatacaataatttatatatacatatatgtaagccttatcctaataagtaaatagttcatacaattaaagaaaagaacatgtgatttcttcccctatttaatgttgtcatttttgaatagtttaatgctgactttgactaaattcccattactatgttttatcatcaatgtggcttcattacatgtatgtattatatatgtacacacacatatagatatattcatcactgtgtggaatctcataaagggtctttgtttagcatttcagaaaacaaaaaacaaaaatgaatgctttagtagcaaccaataggaatttcaagctagctgcaaggcttctggggttagattcaaaacttgagaagagtttactcataccctttagagaaatcaaggtattaaactcaattaaagtctttgattttgaaaaattcaagatgggtttgatttttgttaatgttttctttctctaggtttgagtgtaccataccggaaagatgatggtactttggctcgatttgtggtttcagggtcaacatgacaatgccagaggccccatgaaagaggaa

SEQ ID NO: 394963 - DNA, 656 bp, Cannabis indica
gtagtgaatatatatatttaacaataaaaaaaagatttattatttttttcgcttattgatgggtgagtcatacaactatggtcaacaattaatgaaagacaatactcaataccattactattgattattatgcctaacactattattattctatcatcatatatatatctatttatttatagaatcatataatgactttagtatagcctacacttacattacttatcatctaattaaagcaatttttattctaaataattaatgcttaattatgatgataattaaataaataaaaataagaacaaaatgtctaaaaagttgtatagtgtctatttactcaaggaaaattaatgtgcaatataaaaggaaaggaataaataaagttggaaaatttgtattacatcaagggtagttttggtagtttattttatctatttcataatccagtataattttttaattcgattttttttttcatgatcgtatatattgtatttatttagactcacttataaatttttaaaagagaattactttatatactattttttttaaaaaaatttaacttcagtagttgctccattaatttttatgtgggttgctatgtaggttttgattgcgatttaggttgctccattggttgttatatgaatttt

SEQ ID NO: 394964 - DNA, 2040 bp, Cannabis indica
cgtgaaggagaagaagaaaaaggtaaagccaagcgaggctggtgtgatcgagcagaaaaatgagctcattcaactcaagcgtgaagctaagttgaagggagacaacgaagccaagcagtatgctcaagaatattcagagcagaagaggtcgagcaagaagaagcaggctctttcaaatgaccaagcaccagtagaacacgctatcaggattagggaacctaatatgtttgcttggccatctgctcctgtggagggaaaagggaaagccgtcctggtgcagtaggaggaagactctccagacgatgatattgtgtctatgcttgttcggccaaatgctcatgccgcgtgcagggtatttttaacttgcacttacttctttcacgatatgctttacatcgtatttgcttctaaccgtgtcattttgtttgcgcagaaatgtcacaaaaggtactcaaagccttgaagaagagagtgggggacaccttgggctagactcctcttccaaaaagataaaaaggcgatgagactccatccaaagagaaggggtcggtcgaacaagtcattgacctttctgaggaacggcctgctgagtaccctctaatctagaaggtctcgaagtcaaagagttccaaagggggaagctcgaatgagtctgattagactaggaccccttcaacgaccgtggcgctgagcacgcaagcaaagagaggcaaggacatgctccaatattatgtgaatcgatcacttctcgaagtgaacgatcaattgttcagggcaaacatcagctatctttggaactagtcttgggatgagtcctcaaggaagctggatgggtaaatatttccttctttgtttttattctcttttctgtagtttgaattttaacattttcccgtgcaggtcaatctaaagatggcctacacctattcccgagccaagtccactgctgccaagaaccttgccaccaccaacacattgcagagggaggtggatgcatctaaaaaggaagtttaggacgtgaggaaggagcttggggaagtgaactaaaaaacttcttactgccaacaccggggttgaggagctgactaaggaaatgcaggagatgccctcgaccgagcagctagaggtagataacgacgctttgtctaaggagatttatgagcttaaagacgagagggagagtatccgcactcttctctcaatgttagaggggatgtccagactaagcaaaccagtgaggaagagcttaagaagtaggtggaacgcctggaaataaccgctcttgaggtcttctataaatttaggaaggctaaccccataggaaattttgattaccttggtgactccaaagggatgtatcttgattactgtgcgggtcagacgaccaaagaaaaccccagggcaaccacttctatagttctgactgacgagagagacaaaactcttgatgctcaagaatgttgaacctccggcccgcacagaccaaaccgatccatacaaagagcctaggatccttgccaactatttttttttatcctttcttctttcttcttctttttatttatatatgtgtctattcgacccataggcctctttttgagacaaagacgaccgatcaagcaattcttaaacttgggttatgttttttcattttaagacaactagctgacctggtatcttttaatgccgggtttaccgtgctttgttatctttttcaatgaatactgtcccttgttttcataattgtctgtgcaactgtgtttgttttttgaccttgttatttacttttaccaatgctttgtacgggtatagttgcccccacggtgaccgagcagactttttactcttggtcacctgtattgcccaagtataatttttgtatgttcggttctttggattcgagcatacctttgtacacatttaatggtaaatttataacttgctaacagaattgacacaatcaaaatttagatagacatctttattcattcattggtgggaaattttttttaccgtagtaacttacataaaagctattat

SEQ ID NO: 394965 - DNA, 1552 bp, Cannabis indica
ttactaggtttcgggttaaaattcgaagaaaattaaatagtggaggtgagagttttgttgcaccgatagagggtttcattcgttcgttcttctgttatgtttttaaaatatataagatatatacatactaggtgagtttacatgtgcaattgcacatgtgtaactcttagtttgtattttttatttttatttttattttattaaataattgtgataaaataaaaaatatgaaattgagatttaatatttttaaatgaagttaaaattgtaaaatatatattatattatacaataataattacaaactaaactgagcattttaactatatacataaggtgtcctatataagatgctcattatttaaatatattttacataatttatatattggtttatattattttgtagatgcttcaagcatcattggcagtatttgaggtgcttgactcagcatcactttcaagtagtgagataacactgtgtttggttcgacttccgctactatattcatccgctcttgcttttaagtaaatgaaaaatttactcgtagtaaaaagtcttgtaatcgataatatgttttgatcctattattataaacatcattgagaaagatagtaatattaatatatgctaatgaagtgaatgagtttaaatagtagaatttacatttggaatatgaataagctcttctgcggtacaatttgaaaacttttctgcatttttaccgaaaattgttgctattaatgagcctgtgtggtctgttagttgagcttgaaagtggcatctaaaaaagtatattcaaataaaaattaattaattaaagtaacaaattatgataataaaatttctactaaattaaattaatataaactttagaattgtctcaacaggtgatttgctgcattcgtagcatttaaaatgtgatgtttcattgtcaatatatactttttgacggtattttgtgcaagccatgtaccagaagggttgtcttaaatttttaatggagattgatgcattgatccaaaagtattttgctaatgaagcatgacatggttattgacattaagtatataatattatgtgaaataaaaattaattataaatactaagaaaagaaactaatcaattaattaaaagtaaaataaacatattttacatatgtaaggccctaatacttaggcgctctacaatgattttcaaattaatgtgtcacctctgctaatctaagggtttttcttgaaaatcgggctaaattaaaacttttgatttagttgtaaaactttataatctaatatgtatatatatatatatttacatagtcgagattccgagtaaaacttttacaaatgttaacaaatacattttaaaacctggtcgcacaatgactacaaaatataatcatagatgtcccgacgaccgaacactccaggtcgcgtcgccttgacaatatacaatcaccatccaagcccaaaagctcactcctgttcagccatcgcatttccgttacctacacatgaaaagtagcatctgtgagtcaaacagactcagtaa

SEQ ID NO: 394966 - DNA, 523 bp, Cannabis indica
tcaatctttgaaaagattctatcttcccctgctgcttattgctccaggtaaagaaacaccctgagtacttaacatctctcaacacaatcaatgaaatctctatcaggattatatttgactctgtgcccaattctctcctctttagccaaaatatcattgaagtcacccattactatccacttctcagctgtattacaatcctgcaactctttccataacagtttccttccttggatatcattaaaggcatgcacaactgtgatataactagaaaatatggcccccattctttgaacataaagatgcatagattggctagtacattgcaatatgttaacctgaaaaatcattggatcccaagatagaacaatccttcctcccttgtgccaaggaatatttgtcgagaaacaccatcctgtaaaaatattagagtaaaaagccccaagtttcttggcttttactctagtctcgaggagaccaaccaattgttgggttttattatctaaataaaactcatttcaat

SEQ ID NO: 394967 - DNA, 839 bp, Cannabis indica
tgttgtataaaaattcaagcttatacttagcttgaaaagatcaatcggtggaagagtcgctgggagtaaagaagacttcaagaaacctttcccgttcaggaaagacggttgaagacatgcgacactcccaatgatcttccacgcttggataacatgttggcgcgcgtctccagggcctagcaagggcctggctggtgcatgcttacaccttcaagatctcccaggcagtttgtgtccatcagtgaggcacagggcatttgaggctaaagcagaaactcggacttccaatgggacaagaatgtcgcaagggctccctaatttgtttataatgtctcgagttgcttccctctggtgtaactctggggttgtagctacaccaagcgaggagaatggcatggagaaaactttgtcaaaagttgtctgcttctaccaatagtacaataattaggtctcactggtagcccagcaaccagcgacagtactaatggtctcctctttgcagccgccatcgcaggatctgttttctgtgcaactttaccacctgtaggaaaggcagggaaagtagtttttttagaagacagatctagccctcatgtcggcattggcgctagatttttctagttggatagagtcgttgcatatgacgaccctatctgagttaatcattgtaactgcatcgggtcatagctctttttgcactacaagaaatgtcacttttaccagcacagtttgctattgcgctgacaaaagttacttttaccagcgtatttcgcaaactgcactggaaaagggatcaaagttttactagcgtacatttgtagtggttaaaatctaacttt

SEQ ID NO: 394968 - DNA, 1094 bp, Cannabis indica
attttagttattctattatctgagtgctcttcacgtccgtagatatgaaatctatttacattacatattcatttagtatttatataatcatgcatgtaataaattatttttaattaattaatttcggtacacagagaacacatcagtcattaatgatatttaatttaatttggagtgaagaacaattttcttcatgtcatatatatatgtatattcataaatagatacaattgaaaattatatattaattagattggaaatgacatgaatatatgtttcaaagtccaaataaatgagctaaacaaataatgccgggctaatcacgcagtaatattacttctactgtattaatatttattaataatagtttgtggagtacgttgtacgtaattaagttaattgccttcctttgttaatttgtctccataatcttctgcttttctctgacaattatgttgttcttttttggttattttcatattatttttatccaataatataaataaattataattaaaataaataataaaaattctttaaaaattgaaaacaaatgtaaaaatacatataaaaaattatttgactatagaaatgttaaaattttgctaaaaattttattttttgtaatcggccttaaagtttttaatcgcaataaaaagaaaagaaaaaaaaatcttttaattaattaattaaaacactgtgatcagtacaagctactagtactgttaaagatctcacgacacgattcatgcatgtattaatttttagatcaaatctccttccaaacctatatgctgtacattaataattattaattttatatataaagtgatgacaatatataattaataaatattaatgatcagttaattataatttgcattagctattgataaggacatcaaggtttgtttgcatcattaattagagcacgttggctttgcttacttagaaagccactttacttaatttattatttaataacctaataaaataatacttcaagggctcgtttggaacaccgtattaggtcgtattgtattgtattgtattatattcaattggattatatatcatatttttatataatacta

SEQ ID NO: 394969 - DNA, 407 bp, Cannabis indica
ttatatatatatatatatatatatatatatatatatattgtacgacaaattttaagtttagaattcttaactaattatacgtacgtcaactaaaaaaaaaaaaaaattaaaatagtcttaagaatgaagaagtcttgccttaaatcatattgatctccatatatataatacattatccttttacaaacctcttacaaagatacatttttttgtgcatagaggtgcttataagccatttgtgcgatgttattaggttgtaaagttgtttgtttgtagatcaatatacttgctgatttagcaaaaataaaaaaaaagatatggccaaaataaaaaccaaataaaattttaaatcaatcacgccaatataatcaaccagctcatatgcttcctaaataacatcccataat

SEQ ID NO: 394970 - DNA, 1334 bp, Cannabis indica
aatatcttcattttgtttagcatcttttaattggagaaaattaaataaataaggtttataagaagaaaaaagtagcatgattcttgttttaaatccaaaatcataaaacacataaatatttttattttctcaatcaatggtaatggtgtaacaaaaagtataatatcttgatttcttatagggtaaatttattggataaattaagtaagaagtaataaccagcagtatccttaattgttataaaatccaaaatcttaaaaacaataagagtacttttttaaaaaataaataaataaatagataaataaagttatcaatggtaatgacaacatccaaatatcttcgcttgtaccttaaaattggataaattaagtaaaaatgtatataagaagtgagaacaagcatgatctttgttttgaatccactttcataaacaaagagatttttttttgaaatagaaaagatagaaatatcaatggtagttgtaaaaaaagttcttcaattcttttaaggtatcttaattagataaattagggtggtaacatatttttaattaattttttattttttaaattagaaaagtaaaaatatttttcaaaatcgttttctataaaactgttttcattttttaattttttaattgacaaccaaattttaaaaaatttaaaaataaaaaaatcactttcaatatttttttttttaaaaaaaaaacttaatcaatatttaagactctaaccccaacctagaccttaaaacccgaactcagacctcgaccccaacccgaaccaagacctcaatcccgacctgaacccgaacccaaacccaaaccttgacctggactcggatcccgacctggaccctaaccttgacccggacgcaaactcaaacccagactccaactccaaaccctgacctcgaacatcggccctagacccaaactctagacgcagaccctagacccgaacccagaccccgaccccaaccttgacgcgaacccctacctcaaacctcaaacccaaaactcggccctagacccggaccctagatcccagacccaaacttcgaaacctgagcctagacctagccccagaatcggaccccaaccccaaacccgaaccctggtccctagcctggaccccgacctaaacccagacccaccgagccccgacctcagacccagcctcgaccttgcaccccgacctcaacctcaacccgagacctcaaaccccagacccgaacccctatcccaacccaaacttggaccctagatcctagcaccggacctagaccccgacttcgacgccggacccagaccctggctccagacctaactt

SEQ ID NO: 394971 - DNA, 897 bp, Cannabis indica
tttttatatatacataatagttaaatcgaagaattggttaaaatactttaaatttatacgctttcctaataataagtaaaactagacacaacacaataatttgttatgatttattaattaataattgaacgttatattaattttaaattaattaattttgtaaaattttctacatttgagtaggtcacgttggaaattacaaaaataataataagctaaatattattttatttattattactttttcttttgttttatttttttataaacaaaaagggtttgaattattgaagtgtgtagaatatatatctgagctgtcttgaattattaaagtacttttttttcgtttttatgacatgacctaaaaagtataaaatgatatgtttgcattatcgtagttttgttggttatagactttgctttttgagatataatattcttcaatttaagaatggcatttttgtaataatacagctgatcaataagaatgatgatcatattttctattaaattttaaaagttaattaatccatagctaaacgaactttacgttttgttggtggtatttatactgtaagggtgtgcagaaagtatccgatctaatcccaaccgaccaattaaatcacaaccgatccaatagaatcagatatctaatcataattggatcggatccgacgaaaattttaaaaatttaattggatcggatcggatgttggatgagacatacgatccaatagataaccaaaccgatccaatccaatatcatccaatgtctatccaatcatatttaatatttataattttatatatttaattattttaatttgttttaaaaaaatatattaattattaataggttttactgtgcacctgcacacattgatttaatattttata

SEQ ID NO: 394972 - DNA, 882 bp, Cannabis indica
agaggaaatattgataaaacactattaatcaaaaacattcaatttgataatatttttgctcaatgatatgttgatgatattgtttttgaatttacttctaactctgaagtgtagatttttgtccaacaaatgcagtgagagtttgaaatgagcatggtaggccaactcacctattttttgggtctccaagttaaacaaaatgataaagacatatgtttgtttcttagagtaaatatgcaaagatcttggtgaaaaagtttggtattagaaaagccaaacatgctaatacacctaagatcacaatcttgaaattatctaaagatgaacaaggggtaaaggtagatcctactttttatcgaagtatgattggtagtttgctttatcgtactgctaatcatcgtgatatttgttctagtgtttgtatttgtgctcgctatcaagggaatcccatagaatctcatatttattctgtgaaaagaatcatttgatatgtaaatagtactgttgattttgggatttttttaagaacactaattctaatctagtttgtttcagtggtgttgattggacaagtaatgtagatgagagattatgcactagtggcagatgtttctatcttggaaacaatattgtatcatggcacaacaaaatctctctatccactgcagaggttgagtacattgtaatgggtagttgttgtacccaattgttatagatgaaacaagtgatggaagattatggatttgatttgaaaattttaactacttctgtgataatactagtgctataaatacttcaaaaaaattttgttcaacactctcgcacaaagcacatagacattggtcatcactttattaaagagcttgtggaaaataaatactt

SEQ ID NO: 394973 - DNA, 735 bp, Cannabis indica
agagtatataatatagttatagaagattttcaataagttttaattaatttcgaataatttaaattgttaaaattacaattcgaacaacttgctgcccaagtgtataaacaagcatagaagaagctacttgaatctttattttttacttattaaatcatatgaatttattaaaattttctaggtctcttctaactattatacactgccatttaaatagaaaaaaaaatacaacatttctatgtaccaaaactactaaaagtacctatagataataattaaaaagcaatcactaggtaacgatttatagagagctagttaaacaaaataaataaaaagatgttcatttgtggctaggttgaagaaaatgtagagtagttgaaaaattggtgtacttaattaattttggagaataggagagtacaaactttttgaaggagaagtgggtagtccaaacgaaatgtactttaaaataaaaaaggaaatcttactattagaaaatgtgaaaattagatgatatatgagatttcataaaaaagttacaaaaatatggcatttataggtttgccactctcctatggcatttttttacatttaaaattttttatggtatttgatatgccatatttttgtaaacttattatccaaacccatatttcatgtttttgtttctagcttaattagttttattttattttagtttattttacatttacattttaggatttctttctattt

SEQ ID NO: 394974 - DNA, 1058 bp, Cannabis indica
ttgtgtgtattgtaattatttgagaacaacttataaattttcaaaaattttgatgaataatatgcaatatcaaaaaataatacgagtgaaatattttattgcaccgtatgactgattttcttatacatgtgataagtaattatttgaatcttattttttatactataaaccatttaaaaatactaaaattaatttataaataattataatatacactatcatatatatatatataaactgaaaaaaaaatagaagccaaaacaaataatgataattgtactacaaatttatcctaaaatttactataagtaagttgtttaaagtgctcaagacatatcctagttaatagtatcacacatctcctcacataaagttccaagattaaatctaatctcatctccccaacaactggagaaaaaaaactagtttaatgttgtatttaagttattaagtaaatttttggttagcaaaaatcataatttttattaattttatctcaattaattaattaataatgttgatcgaaaattttaaaactaattaaatgtatgaagaatctaattgacaataatttttaagtattggtgcagttgaagcttacaacaatggaaatttctaatattttcatttcaacagtattttaaattagaacggaaggaattggacccaagggctagaatagcgcaaaatctcaagctattaaaaaattaagcttaaccctctaatgggattattaacatgtaattagggaagtgaaatacaacattccacccaattgagaaggtccacttggaaggtgagaatgatgtgagagttgtaggtgtataagttaccattttttattaagggaaaggtgggtgtcagaatagtaggagttcatagtttgggtgttaatgagccctattctactagttaatgatattagtgtggttttttttttttttttgagaaaatgatattagtagggttgttaatccgatccaatccgcacttttttggtcaaacaacatccaatccgcactaagttcggatttcattttttggatccaatccaatcc

SEQ ID NO: 394975 - DNA, 650 bp, Cannabis indica
aatttttaactgttaaatgtcaaatagacctgtcacaatgtacactactacacttaacatattttattgatccacctcatttaattgtttaaataattaaaaaaaaaactattttaaaacataaaataaagaaaaaaacatattttttcatttttgtatttacatttttacagaattgtgtattttatgcattatttttatattgccacattgttactatgaaacaacgaccttttttagaacaaccaaaaaataatagtctgtaagaaaaaaaaatccatcaaaatgtgaagaaaaaggaaaaaattcattaaacataacttttttttttgtagtttttaaggtatttttgaaataatccctttcacaattatatgtagggttttcaataaaccacccacactgcacaaattgctcgcaccacactacaccacataaaaatgtggtttaaaatcttttgtgatgcggttgcggtttgcatttttgttaaattgcacggtgcagtgcgagttacaattttgagtttgataattgcagtttaaaccgctatatattacaaagttactaattttttacaatatatttcttattttattttttcatataaggacaaatatatgtatgtgttgggaattattttaccaggatct

SEQ ID NO: 394976 - DNA, 718 bp, Cannabis indica
gtttattttaggaggctttcatgaaatcatttttagttttctatgggagaaaaaaattctgttaggatttccagtttttacgtttgtatcctctgtagctctacttttatattagagctttttcagaaattaatataacctttagctcgatctctacattaatatatttagatatagtaagtgagaatttgcaattgggatcagtagatcgagttcacaattttaatttctttgtttcgtgataattttgatggatgtgatcctttaagaattatgttattataaaagtagttattatttttgtttttatcccttttgaatatataaaaaagtctcaaaattattaatatgtagtgaactacaatctttaacttgatctatataatgagacaatatggataatgaataaatattatacagtactaaagaagattattagagcatctttaacgagtgtttgtccataatggtttttactactaatattttaatcaacatttcaaacaactttatatatgattatcattatctaaaatgagtaatgaacatgtgatattattcaattcttatttaaaaaaaatgactttgaatgatgtcactactacaaaaactccctttagaggcggtttttaagctctttcagcgtcagttttcgcaaaatttgctaccgacgcggatcagagcgacgctaaaggatttatatgaaccgacgccatat

SEQ ID NO: 394977 - DNA, 943 bp, Cannabis indica
atgttcattcaagagcctttggtctattgttaaaacctacaaaacttacaaattactaacggccataccctaactatcttcacgatatgaacgctcttatggcgcagagagtttgcacacaatcccaccttagaaatatgcttctacaggaaatattcaaccattcaaacatacaaaatattctagacctagcttgaacttagcattgctatcctggatacaaaaagagtataaagtcaacaaagcgttgcgatacttacttgatgtttgaacggagaatagaagattgacgtgcaaatccgcctaggagcgtcgaacccagtcaatcacccagtcataactaacatgaaggtcaaaatcctcgtctggctgggggtggaataggtcaaggtttataggttctgcgtttgggaaactaattgaacataggtttagaaaatactatataaaacaatcgaaggcctcttgcattcaccattagaaataatgatgaagtgaagattacctgggaacaagggctctgattcgaaggttacaaaagggtttatgaagaatgaagaagatgaaaaaaggaaatataggttcattgtacctatttatacttcaacatggatccttgcgagtcaaaataaacggcctagatcgcttctcccagaaagcatgtttcgattcgacgaatagggagttaaaacgacttgcattggcgtttaaatttttataattgcatgtctcgtatcccatacgcattaaaggataggtcatctcaatcatcctacaattattgtaattcctcccgaggaacgctctccccacgcgcacgtgcaccaacaatcgcattaataacgccgcatgcatgccacgccaatggaacctacgattaataaccccttacttgataaccgttcatgggatacgtccgggatcccagccaacaccacgtcgt

SEQ ID NO: 394978 - DNA, 1413 bp, Cannabis indica
agtgaaggttgacttggctcaggcaatgatattgtgtgcggtaagcaggcccgatcctaggctaaggcgggctgggctcgtgcctagggcccactcaaacccaggattcaaattttttatatagtatatctttttgcattaaaaaaaatgatattcttaaaaaattttgtagaaaaaggctcaataatatacttacatcttactttagataaaatacacactcaacaaattttttgggcctattattactcaagatcggccctagcgataaggttcagacggcaaaagcattgaaaattgggattctggggtttagggctctaacccaacccattacattggtaagggttgaaggtaccaaccgaggaagaagatgaaaggaacacagatttttaaaaaatattttttgtaaaaaaaaaggaaaaaaaaaaaaaaaatagtatttaatttttttttccagaaatatggtataagtttatctatacaaatgtaaagattattaaagtttataaaccaaataaattaaaaatatatagaaaaaaaaaagtaaattactttaaaatttcccactaatttctactattttaatttaaattgtaatttatgatactaacttttaaattgcatcaatgtttatatatcatgttcttgggtgttgagcaatgctttggaagaaaaaaaaataaaaaaataaagttgacgtgtttcatatatccatactaaataaaatagaaatatgtaacccattttatttgtttattattattattatttaaatgaatccttcttaattttgagatggtatacagatgtgaaaataaatattaaatatgggaccaacatttatgaagaacaaacatagtaaaaaatatgtatatactgctccttcagcaggctgagacgagtggtgatttgatggggtttaggtgttctcgctctggtccgcgggtgtctcacttattttttgcggatgatagcttgatttttggtagagctaatgggtagggaagcagagtctattcgtcggattcttcagtgttatgagagggcttctggggcaacaagtcaattttgataaatctgcaatcacattcagtccgaatgttcagcctgcagatcgtactagtgtattgggtattttaggcttgggttcagtggccgactcaacaaaaagaattgggggtggccaaccgttattggcaagaataagaagcgtacgtttgctagtatttgtgacaaggtccagaaacgggtgcggggttggaagcggagtttcttctcagcgggggggcgtgagattctaattaaggcggttctgcaggcggttccaaattaccttatgagtatgtttcgattacctgtggcgacgtgtgataagctccgttcgatcattcttcagttttggtggggtac

SEQ ID NO: 394979 - DNA, 1487 bp, Cannabis indica
ggcattgaccattccttccactttgacattcctctcaattccaagatttccaatgatggaaatggtgtagaagttgtcccataaaactcaagacctacagtccccattgcatcacagtgttcaatccaaagagtttcaagagcaggtaactgcccaagtggtggcaaactacaaagtctaggacagttgatgtcaagatatctcaaactaatgagatgatggaaatttttggggagcttggtgagatccttgcagccaagtaactttaatgtctgtaaattgaacagcttggaaaaagatttgggcaactctttgattgaagtgtacgagacatccacgtagcgaaggtgctttaattcacctactgacttaggcaattcactgacatgtatatatccctttagagataaaaatctcaaacgcttcaacttcaacaaatcttccaacacaaattgctgcaatttgctcgcttcgtataacaatgagacaataggcagaaatgtacgcaaaggaattggtttagaaactgacttgaatatctcatggaaatctttatgcccatctatggcaatgtgtcgtgttcgctttatcaattcaatttcatacgacttgtttatctctaagtgaataaacttttttctagagacaacattagctaaatcaaccataagatcatgcatcacaaaatgattcttttttatgatccaaaggttgaaaaaatgatcttgacactaaatcattaaaatactacacatcctacctcttctcttgtactcgagtactccaataaattatctaccatccacaatgagaccaactcatcctttgtaaatgcataacctttgggaaacatagaacaataaacaaagcaacgctttaagtataaaggaagataataataacttaacctcaaagctggaagaatattttctcctccaattggcaaatccaatatatcactcttagcaattctctcccattgcttaacatccgtaaaacacaacagactcgcaagcgctttcacagctaacggtaagcctttgcatttcttaacaatttctttgccaattttttccaactctgaatccatactaaattcttcattgcgcgatacaacttttacaaacaacttcaagcatgctacttcattcaactcattaagatgacgaacttcagttgttccaatcacagatgcaactttacgacttcttgttgtgacgattattttgctaccttgagctccaactttgaaaatcatcctcattgtatcccaaaaatcatattgttcacaccaaacatcatccaaaattaccaagaacttcttttccttcaacctttcttgtatcctctcttgcatcacattcaaattctcaacagtacaagcatctctagtcactgcttcaagaacagttttcgttactttacaaacatcaaactcatccgaaacacaaacccatgccttgagttcaaaatgtttcttaacttca

SEQ ID NO: 394980 - DNA, 778 bp, Cannabis indica
gctgtgatggttaccaatgcttttatatggccgaacaaattgtattattgctttttaatgatcttattattgacatttcatgcttactttcctttctcccaggtgtatcagttatgcatgtcaaatgaacagctaataaagctgctcattgtttggctagatatgctttagggttggatgaagcttgttattggatggattcttttcctccatctctctactcttttattgtaaatgacttatcagtttaatttataataataagtttttatcctaaaaaaaacaatgtaaatattgtgttaaatttaagacaaaaaaatcaataaacactatatttgttacaaatgcacagtaacattttatattacaaattataacaaatattaaaatatcattaataattattaattaattaaatatgtaaaagataactaatgataaggggctgagatgcaaaattgtcttaaatttgaaaactaagttaaaaaataaacctttttaaaaaattaagaaaatagccgaatataataaattagctaataaaaattataaaaatacatttatcacatatttttttaaaaaaatatatatataataataaaattaagttatataatttttttagtatcgcatattattatattgtaacataaatgaataaatatattagatcattaaatatatacaacagtatttagtatatcatattactgaaaattaatttaccctagtaataaaactatataccacaaagaaattatagcaatactaaattaat

SEQ ID NO: 394981 - DNA, 594 bp, Cannabis indica
ctgggttatgctttgtgataagtatctcttatcacataagattgttctcaagtaaggtcagataacacttcgtcttggcccaagttatgttatttgggtttgatgggcttttaacttctatttggaatctacgtgtctctcctcgaaaacacagataacaattatctaaacataacttttaagattaaagagcgtgtatagtactgcttatttagtatcgtgtgttttatgtaaatatttattttttgttttttgtattttaataatactaatctagtattgtgtatgttaaaaaaaaaaattactattgtgtattttaaaatggtacatgtttaggtgaactcaaataaaatcaatgaaaatattaataacatataattgtcagcagtttgctcatttctgatgtttcaaatatgtttataatatgtctagttcatgttccaatttaacggtctaaaaactgaaataccgggtaagttgtgtgtaggtataggactacacagttaaagagggcttacatggattgattggtactatctatatcaacaaggtgcatattgtttttcggtagcccatcacgaaagaactccacag

SEQ ID NO: 394982 - DNA, 437 bp, Cannabis indica
tatatatatataaactaatcacaatgtttagaaatagtaatcataatagaacaatatacaacacactaagaaatgggttacaatcaaggagaaaattagtaccttgtggattttccaacatcgtagctaggtattcattgaatatatataagggttttagaagtaaaaaaatggatgaaattaatgtggataagagcttgagatgggaagaaagaatgattgccaaaaatggagatagtaagaatagtcaaccgaagttaatgagagtaattacgagagaaagagggcgagagacccaaaataaatatattctcttgttcaaaaagaaaaatgaaaaaatattcttgttcaaaataaataaatcttttcagtattatgagttattgtaattaaaaggtaaaattgttgagagaccatcggtagtgacaaaggagaaa

SEQ ID NO: 394983 - DNA, 749 bp, Cannabis indica
tgaaaagtgaaataagtaacaaaaactaagtacaatgaggctaggaagggaaggaaaaaagcttgtaaagagagaatgggaaataaattaacataaacctaacttataaataaatgtataaacctaacttataaataaaatgtacctgtctctcttcatatacaatgtttaaatataatacaagtatctctctcactgtatccacatgccgatagtaaaattttctaagtgatctttagctagctgtcatgttgacattgtagaatggggtacaaggttctagaatggtagcatgacatttgtgttggctatcgaccaatgtgttttttggtaggtttattactattaatagatacaacatattaagtgtggaactgatgaggctatttcagtttgtccagcccaagaatgtaagaggttgattaatttatcatagttaaaattggccgacatatgaaaagtaaaagccgaacgttgttgcctgcttactatgaattgttgaataaactactagcaaaaataaaagagaaaagatattaattagtaaataaaaattctaagttgagtcgcaaactaaatcgttctttttaagacgttcacggcagtgtctaggagtatgcaagcagtcagaattcgtcggtcgtctctgagataaaacagcccaatcgtacatgtatcggaatcccactgcactgtagagcaccgtcaaatacacttaaaattttgatatcgcagatggaatttaattt

SEQ ID NO: 394984 - DNA, 524 bp, Cannabis indica
ctctctctctctctctctggtcggccacacacagagctttggaggccttagtttttcttgctttttctcatcaattcagaaggttaattgtggggaaactcttagggattgaaggcaccagctcttggtaagcaagtttcctccttctcctttgaattttgtagttttgagttatgtgttcacgcaatttttgaagataggtttttgtaggtttgaatgagtttgtttctattttttttaggttgaattgaagttgttggagctggtttatgcttgatttgatgcttgttgtggtatttggacaaagtttaagctcaaactttgctcttccgtgattttggtttctatggtttaaagttgtttttatagcttgaattaagtttattatggtttgtatagatattttggaaggtttgaggcgatttggggtagagttgagttttgtgtgagggtttgtagggttcttgcacagaattggtcgatcggttcaggcttgccttgtaacaccctaactatcttaggcg

SEQ ID NO: 394985 - DNA, 1071 bp, Cannabis indica
ttttgttgttgatctcctcccaaatgtggctaaatctattgacgagcattgtgtaatgttggttgatttcttactggtcgtgttattgactttgatattatgaggcatatgatggcatccctttttgagctatggaaaggtgtatgaaggaattggagcctgttcacattttatcatggactggatattcagagggttatcgatagaagtccgtagacttttaatcgtatctaatttgttttcactcgtttgaagtcagatcaagatcctagaattatcccccttaatggtcttgatatgtggatccaagtgcatggactacaagcggggttcaagacagaacatgttctacgtagggtgggtaactatattggttcgtttgttgagtgtgatccaaaatatttctaaggtatttggaggtattacttacgggtgcggttaccctcgaaattattgttccattaagaaaagaatgaagcttcatcaaacgagtgttgattttgtatcgttttgggtcattttaaaatatgagtttgttttggtcttttattttatttgtggtataatcagccactctctttgagtttgaggtctactgttcatgattcgttcattctggttacctcaaataaatatttagtggttgatttaacctgtgcaatttaaaactaacgcttgttaaacaatatacgaaataacagtgaaacaactcaaaaataatattagaaaaaccataacagtcccagtcttatgtttgagaatttaaagtgctcaaacaacaggttaaaagaatttcgagatctatgtttgaacatcatttgtaattttttacttaaaagaatttgagtgggtgtaaacttctaacatttttgattcgttgatttatgttattgacgaagttttcgggtgttgatttaacgttgattttaatgattctgctccatcttgtaagaattaatagttgtttttcgactattctagtgttactctagtggttcggtccgtatgtattttggagtgtgtacgatataaaagaaaaaaaaataatgaagacaatatttttataaaaaa

SEQ ID NO: 394986 - DNA, 1025 bp, Cannabis indica
tgattctccatatgctccattgccgtactgctcgacgccattgtccaccaaaaaaaatcgaagccaaaagaaacaaccagcgacgactgaaaacgacgtggtaactgaactccacaatctcaggaacgagagaaaacccagatactattcacgcaacccagcaccaagaaaagcaatcccagcacacaatcctattctcaaaacgcaatccaatacaatcccaattacaataaccagccaccgagggaccctacgcactgaatgcaatcccaaaacgcaactctctgatcaagccgcaagaaccaatcgttgagggagatgaccctctcgacgcaagcagaaaaccccagaaacttagtgtagaatcttcctggaagcccaggataatctacaagggaacctaccctatcgacgccgtgctccgccgctgagatcgcaacaaccagaaccaagaacgcccattcacgagaaggcagtcgcaggtgcagaaacaacccagaacccacgagaatcaatccaaaacgcagccctggaaacctagaacattacctagaaagagtatacaccgtcgacaacgatcaaaccattccaccgatgaagccgcaccaatcggaaccgaaaaacaacccagtcgtaaaaaccagtcgcacacgcgagacttcaacaaattagagagaaaaacgacccaaccataccagctggcaagacaaaaaacaattaggtcgttctttttaaaacatgtacgatactgtctaaaaaattgtgcaagcagttgaaaaaagtcaatcatcttcaagataaaatagcccagtaggtatcgaaacctcaatactgtaacaaacgatcaaatacaccatctaataataatactgcccaaaataattcaaatgggaaaactgtttgggctcgtttggaacgccgtattagatcgtattgtattgtattgtattatattgaattgtattttatgcaatatttttatataaaattatatgtggtattaacttttatggacacctaaatat

SEQ ID NO: 394987 - DNA, 809 bp, Cannabis indica
tgattatcagcacattacaaccaaagttcttgaaactttattacactcatcaatggtgtatcacatcaattacaatagcctcacttggagtacccttatcagatacacaagggaccgtacaaccctccttcgctcacactagttctaaaacagagattacaatttgagagagagagagagagagagactaatcttggtgttgagatatctccgtgtagagctgttatgtctatttataggctttgacagttgtaatagttgaattggaatcggagaccaactaacttaatagaatgctaaaaaatgaagttgcatttcgctattgactaattttgtgagctaattctcaactgttaatgaccatgtcttcctaattaatacaaccatcggccacaagtgacacttcccttttattccttccaaccaaatacatctttaaattttattccattttattctcattatactatttatatatatatatatatgtattaattttttgtaacccctatagttttctgtcaccgtgccagcttgtaattaacaaatatcaaagtacacaccttattcaatatcttcaataccaaagtgtacctcttcatgcttttcttcattttttttttttgaaattagcgtggtgtcattaaataaagagaaattagacctcatggtcattacataacaggttctccggtaacatagagaccgggatagatccaaacatatgatgaaacaaaggcccatttagccacattgtgagcggcaaagttacatgttcgattaataaaagaaaaattacaactaataaa

SEQ ID NO: 394988 - DNA, 599 bp, Cannabis indica
acataactctcatcttagaagttagagctcgaaattcatttatataaaaaggttattttggctaaaaatatattttttatttacatatttacaaattatatttacgaaatatttaatataatatctttcttattagttatttcactataaaaaaaaatgtataaagtgaaattttacttgagatatgtatatatttttaaaaaacattagcacaatcacatgaagagcgtcttaattttctagttcttaatgtttaggagttaaaactggttataacttataagtgaaatgtctaaatttttaagtttcacaattatattaaatttaaatgaaataatttaaatcttcttttttatttgatttacttttataatttaaaataataataaaaaaatagtgatatattttataatttaataatataatttaattatttacccatttacggctttatctagtatttttttttttgtagagagaattatctattataatattaaacaataatatttataaattataattaatatatattatcctaacatacctatatttattaggtagcgtttggttgagaggaatgaaaacataaaaatatg

SEQ ID NO: 394989 - DNA, 1147 bp, Cannabis indica
attcaatagttctgaatttggaattagggatgaagagataggaagatgagagtcacatatatttaggttgaaaaaatacagctccattaatgatttgtatcagtactttttgtatttctttttttttaaaaaaaaaaagtaaaataaaatgatgactaattttataaatactgtgtaaataattaggtgagttcagccactcaaattaattggaggcacgtgaaataagatagctttatgtagtgagcataacaatatagataaatatgtgtggcatggcatgttcggcagagcccacttataatatatgcttgcatgaatcaataaccgatagacatcggtgctttaaaagtggttaataatttattagaatgttataatttgttgttattattgttattggattcttggttagttacccttttatacgagtatattatttgatattaataaaaagaaagatttaccatctaattaattaatacaattatgggtacgtacttttggtgatgagaataaatacactagagcatgagcatatccaatgtggtgcttggaaggaatgtgtattgaaataactattccacatgtttgggtaccgaaccaaatatgatacacattcatgccaaattttgacataggtgtcctcctactttttttttaataaaatcaaaacaaataatatgttggttagcaaatttgaaaagtgcgtacctttagatgagtgttgtacctttagatgagtgttgattattaatgattgtaaagttctatttttctctctactaaacattcatttacgttttgttagacaatctgcaaaccgaaatgcttactatgttgctatcctgctaggtactctcggtatctatctggtcgtagcattcttgggtattagatcccatctaatcttcagattcttttgtattcaaaatgctaatttaacgaagttgctatttcatttcaaaaaaaaaaaaaagatcatacatgtgttactcaatatcttctaaggagttctcctatattttaaaatttgatgttgatggtgtcattacaaattcgatgtaattgattaaatgtataatatacaaaaaatatgtcttagtgataatcttttaaccataatatatacaattatgaatgatga

SEQ ID NO: 394990 - DNA, 800 bp, Cannabis indica
ggaggctctataggtaaagtgtttcaatttggaggggatatcaaggtgccaaatgagtttaaaccagggtgagggggaggaggaggggatatcagggaggggtgtggtgggagaaacttaggtgatatccggttttgacagtataggtgccagacttcgtgagcttccaaataagcttgtcttctgtcgggtgaagaggtagagggataaagaggatatcatcaactacatggggtgggaaagattggtttaggcgagatatattccaagtcatattactaaagatatagaaagtgacattggagggggaggggcctaagggtcaaagtgtttgtgggaagggatccaatgatcatgaattggagaggtgttcttaccattgcctatcttcatgatgagccctttgtgcaggagatttcttcccgaatggatgccacgccaaacataggatggggaatggccaagggtgcaattcaaaaatgaggaccgggggtgataccttgcagcaaaattttatgccacaagagagtgagggtgctgaaagattcaccaagcttgcttggcaagcatggcttgattaaagtggacaagagattaaaaccctagaccgccatgtttcttcgattgatagtgtaataccctagaattaagaaatagattagcaaaatcctaattagataattaagaataattgaggaattatattattatatagtttaatatatgagaatttatttgattaattatatggtaagaccccgttggtgagccaggggcattttagtaattatggcccgaga

SEQ ID NO: 394991 - DNA, 627 bp, Cannabis indica
aaagtttgagataaactttgtaatggaaagagagagggaaagtttgagataaactttgtaactaaagtttgagatacataacttcagcgtacactgtagttatttcaacaaaaattgaagagtttataatgttaaaaataagattcaaatattttattgcacactcgattatttttcttacaaccatggtaagcaattatttgaaccttatttttttgcattaaaactatttagaattttctaaaaaatttcaggtgctcctaaataacaaatgcatacacgattatgaaaaaataaagactaaagacttctcatgaatgctgaaagtagatagcagatataccagaacaacctttttaaaagtgtaacttacccaataatttttaaataagggaaaatagaataggaataattgaggcaaaattccccaaaaacttgaggttgatgcagattagttcctaaccttggaaattggcggtgaaaatacccaaggtcgataaagttgtttgtccgttcatacccaatctgttagtgtaactaacgttacacgtggactgttatagtgagatttctctcacctaggaactcgagaccagactcctatttaaaggacacgtatattcagat

SEQ ID NO: 394992 - DNA, 538 bp, Cannabis indica
aacaatataaaaaaaataataaatataacaaaagtaactatattatgttacagaaaaacacaatatagaaaaactaaatatatatacatttagtaagatttaaaaaatattcaataaagaatataatattttacgtcaaataaattacttttaaattacattattttatttaattactattagattttaatcaaaattatatatataaattgacttttaatttttataggcaacaaaaatataacgacataataatactaattaaatatgtaaatcaattagacataaaaattaattatcgacaatctttaaaaaattataaacacaacacataaataatcttaatacatatatactcatgaaaaactaaacatattattaatttttctaatatttagataactaaataacaacaataaaataacagaataacaacttcattttaatataaaaattaaataaatttaatcaattagaaataaattagctagacttcaactaaaaatatacatataaaaattaagcatatttttatttt

SEQ ID NO: 394993 - DNA, 837 bp, Cannabis indica
atatatatatccttttgcttattgtgatcaattagctagtatatatggttaatatatatatcattgggatcttatactttgtgataatatgttccttattattattctactttctttttatgcttaatttgttccttctagatatatatttaaaagtatatataaatctatatgaaaaattagtgtattattatagtccttgaacttttttatatactatcaattcttttataatatacgtagattttgttaataatgtaattcttttattatagtcttgaagtataacttttatttaaatataattcttttattatattatatttaatttaattttaaataagtaaagtaatagataatagttaataaatagatgcaaattaaatattttttttttgtttttttacattaattaataataaaataaaatatttttttcataataatttatatttatatttttagttttttaatcattaaaataaaaaggatgaagaatatttattttgtatttatttatcaattataccattaattataaaactacaataaaatatgataaaaaaattatattattgtgaaacttatatataaaaaaatattattaatgacacatatagtatatatcataatagacacaatttattaacgtctaaaggcaaaatgctaatctgtatattatattatatgcatactattattcgatctcacagcaagagcatatatcataccagggccggtcctgaaacaaagtgggacatagagaaaaaaaattgggttaatttcacaaatgcacaaaaacaacaaaaatacggtttcacggaattttaaacattt

SEQ ID NO: 394994 - DNA, 994 bp, Cannabis indica
aaaacgtgcatacggactaatggtgggcccgcccccgcagcacccacacccataatatattaattaattcatggaatattttacacacaactgctctccatcacacaactggtccaatcaattttttctttaatttaaaaataaggtttcctatggtggtgtacttcttcatagttagattatacatgagtcggttttgggcaagcaaatcaggtctgtgtctaagcctttcaatttttcgaaaaatgccaacattttctgtatgaaaaggttttttgaatttgaaaattactattttatataaaatcattttttagaattgggccccttccttacatgagggcatggccccatgaccaatacttttcatttttcattttccttttttgaaagtaatacttttaacttttcagccattacaaagaacatcatttttaatgctatgtttggtaagaagatgaagtgggtggatggtgaggagaagagaagtcaaaattctcttggaaaagagattatgggagagaaaagattacaaatccactcaaatttaggattatttcaaatttgaatattgaaatatttctacggattataagacttttctttttttaactaattacagcttattgtttcacaattgtatttttaaatattattttcataggagtgtaaaattaaaaacaaaaaaaaaaatccgtaaatttaaaaaaataaattgtaaaaatatatataaaaaaaaaaatattttgacaaggaaaatttgattttctatgcttaaaaaatcttaaaattatatccctaaccctaaatgttataccataggcaatatatgactacttttgctttatccccatgatacccctcacatttgaaccaaagcaattgtctctctcggccaaaacacctccaccaccttctccactacctccaacgacgacgacgaggaccacccagccccctctgtcggacccgaagcctcaacccacccagcccc

SEQ ID NO: 394995 - DNA, 874 bp, Cannabis indica
tttccattctacttaaacaagaagtcgcagaaaaaaaaaagttctcctccattcattctcattaatctcatgtacacgtgtcgtagtcatatttgctactcgaaatgtaagtataacaatacgatattatatttattagaatgatgatacttattctctgattaatattattttaaaattttaatagtttatttatgataattcattattatatattcttaccaaatttaataaataaaattttgataataaatctatataaataaaattttcattttctatttaaattctttttaaatataaaatatatttgtaaaattgaaaataaaaaaaaatcctaacagcagagattatttatcccacaatactcgataaaataaataatattgaattagttattcggcttttattgtacgtgaccaaaactagactaatatgaaattgtctaatctagtccaatccaatatcctttgtgttaaatgggcccataaagtaaggaatcaaacttcttcacatttaattagagagacagaaataagagtattgctattaggcaccagtggtgcctagtactttctcgacatgtcgcgttgtgattggctagcgatactccctaaaagctattatattaaattatatgatacttagttggaccaatagtgatattgacacataagagggtactaggcaccactagtgccctttagcatttctccagaaataagcaacacgccaccatatttaggaggaccaacattataggagcgcacctcgaaaggataagtcactacaaaaaaactgttacttttagtgataactttttagttacaacataaattttttgtgactaaatatgacttttagtcacaacaaa

SEQ ID NO: 394996 - DNA, 560 bp, Cannabis indica
ttatatatatggttaattcttgatgttaaatcatctttacgtttatgtgtttaattttgctattgtcaaaattatgtaaaactcagatttcaaatattgagattccatctctctctctcacacactctctctttaattccataattctcatttattaatgttttaaattttgtttcaaattatggatattatgaagaattattattcagaaccaatctttaaaggtgaaaacaccatactcgtcgtggtatatatcttcatttatatatgttctctttttattaacccatacatactgcacttgtatgaatctttcaaagatgtttgggattaattacaaaaaaaaaaaaaagaaatccttttccattagagagaaaaggaaggaaaatactcccttttcaacaacactggttttccttctttttccatgctagatttattttaaaaaaaaaaaaaattaaaaaaattcacaaggacaattggaatgaatcagagagagaaaagaacaatcaattggaaattaaataatattcatgatactttttttttttcagcaagac

SEQ ID NO: 394997 - DNA, 1275 bp, Cannabis indica
taattagaaattaacattataaataatattaattatatatttataaactaaattaatacataaattcaattattattattattatgagaccgcgcaacgcgcggttatctaaatgatatttacctctgaaacctatgtattattataatcttaaaattttcaatttgttaaaaatagttctcaaactattcacagtgttgtaaattgatcattgtattaagtttagtcacaggtaacaaatagaataataacatgattgtttaaataattgccacatcaacaacacgtctataattaattttaacaaataatttaatttttaatttaaatctataagtaaattttttaatatcattaattgatttttattttaatatttttttaaaaatacacatatatttttttatttttaatattaaattatacatatgacgctaacgtggtaactcgcgaagcagccatgtcattattttgtttgctacatatgataaaacttgacagaaggaacaatttacaatactatgaataatttagagactattttaacgggttaaaaaatttaggggagacaataatgcataggttatagttcggaggacaaatcctaaataactatcctaaatatgagtgtgtgtatataatagattaaatagggtttatcccctctaaactatgactgttgtagagttttggcccctaaatttttctctgttgcaagaattccttctaaattataaaaatcgttgcaaatgtttccttacaattgcattctggtcatttatttaaataatttattgatataaacattaatctagtctgtaaagtccttttttggcaagttagatgacaaaatattttttcttttatagtaagattaatttgcattcatacctgattttcttaccttgtttattcggttttaattgctcttttctatgttaggaaagatgcatttttacagctgaacttttcttgtatggaaacttcttgtaagagaagcaattctcttatggaaagttagttttttaaggaaactttgattattgccttttccttattgaaattcgattgtgtcttgatacaattagaatatgtaaactgtttatggcaggaatcaagacttaatagaagatcggacccgattatagcaagtttcttttttctagtcagatttgctgcgtcagcttccgattttgatgctacagatcgtgtttatcttaggaaagttttgtacagctgtagattcgatcttgtgactgtctctaaggtttctat

SEQ ID NO: 394998 - DNA, 1096 bp, Cannabis indica
gtaaacaaaataattaccaatatatcttatattaggtaaacaacatattttattagataaacaacatgacataaattaagtaaacaacatatcttattatacaaacaacgtgctttaaatggcacactttattaaaataaacgacacactttaaatttttcattgcccaattcttgttcaatcgttgtatagtgaactatgtgccttaagtaaacaaaaatatttcttataaagtgtttcattaaaaggtaaagcactaaccttttaaatgcaaaaaacaggccttaaaagtaacctttattcattgattgggattgcaattgtattatttggtgtcataccacctaagtctttcaactcttttttttttttcgttttctatgtttgcattggtgtcgtggcatgtatcatagttgtgttggttcctcgactcttggagagcttcgtgtgtgtcgttttttttttctttggctttggggttgtggcacctaagagaggagcctcagctatcgggtgccatcttttttttttttgtttttttttttttttaggaagagtatttttgtggtttgtatatattaagacaaataatttgaaagagaatttggggtttacaatagtatacttttttattttgttaataacttaacatgtaaatttattattggttcacaaaccaaaaaaaaaattaataacggagtaacatatttgccacgtaaatatttaagtttaactttcagttacaaataaatatttaaatttaattttcaacggtaataatacataagttatatttctgaaactttcataaatacttgactgttaagtgtcaagtcattatccacatgtcatttttttttattgatatatatgaattaattttaaaataaaaaataaaaatttaatgacttagaccaatcaatgattgtcacattgccataaacttgacacctaatatctaggtacctatggaaattttaaaaatataacttaaatatttttattgtcaaaaattaaacttaagtatttatctgcaactgtacttaagtatcaatataaaatctaattactcatccaaactaaatgaaaataataa

SEQ ID NO: 394999 - DNA, 660 bp, Cannabis indica
aattcgctaagtgttggtcgttcagcgtggattactgaatatcctactttaagcatgccagcaaggtatcctactcggactatacttctcgagcagatgttccaagtggactccacgtgtcaccattcacgtgatgccacgttagagtgcaaaaattgggataacatttgggtatgttgattttttggtattaaactgttttggatagtttcaataggttcagaggatattggttgggttttggttcgaagaaccagagttttccatttttgttgcgagaaccagttaaccggttctacagggtactgtggaaccggtcaaccggttggccagcaggggaaaccctagtttttctcgaaactagtttttgtttggggtgttttttagaacatagtttagagtgttttattgatgtttaggctatttctaaacctataatgattagggtttgttcggttgtgaagttatggactacttcaggattggttaagttgtttaccaagttttcattgttgtgacataggacccgggattgtcgagcatcattccactcaggtcagccaacacaccttattattggactcaggtaagaaaagtaaattgcactacttagcatgtcaaataagatttgattattattatttacgactcgattataat

SEQ ID NO: 395000 - DNA, 710 bp, Cannabis indica
tggtgttgccatttatgagaattgggagtaatctttagagagtccataaattaaaatttttcacatggccattaacgggacaaagcgagaaatgtggtctcaagtgttatcgatttgtaataaaagaatagtggttcaatactacagtagccaaaatttcatcaaattttgtgataataacactaaggtaagattcaagtcgaaatatattttactttatgcatccaagcaaggcatctataaaatgtatatttactcaatcaaagtgagagaatattatattttagtataatgtttaatttgagtgattaaataaaagttacaaagtttgttacatagatgatatatttaatgtacgtagtgagagaatgttatattatttatttattaaagaatataatatataaataataattgtaacaaatcaattaagtgtaaatattcctatcataagaagtggagttacttacattttgtaacctccacaacacatcttaattcttttgaaattcaaatgtataatgaaaatatacctatcagagatttatttttatcatttaaaatgtgtataaatgatattaaatcaattgggaatgatttggaatgctttggagagttatttataaaaactggaaaaatttgataactagtaactagttactgtttttagtgctttcttccatcgatcggagctctttggattgatcact

SEQ ID NO: 395001 - DNA, 679 bp, Cannabis indica
ggatcatttaatacaatgcttataatatagttaagaagttgtaacttgtaatcatatatatgtttgatagttttgaattcgctatactataatattttattagttactaatggtacatagtataacagtaacattttatgaggtaacaatattttataataattattatgttaaattatatagaatacaatatttaataacattaatatggtgttatatatgacattttaagttaagtagtgtttcttacattatttttataaaaatattaaaagacactaataatacttaatactgactaaaatattatattattattaatataattagttatcaaattctacacaatttaatacagttattcgaatgtataaacatgcttattttcaataaaaaagactacaatattatattattattgatacaatttgttatcaaattctacacaatttaatatacagttattatgacatatataattacgaattatttataaattgccacctcaaaatatcaatatagtattaggcatcactacggactcgtaccaaggctacatcaattgattcagatcagatcaacaaattgctttgtttattagtttattattatacatattagagaactcttatttactacttttcaactcaaacatataaattaataatatatatttttt

SEQ ID NO: 395002 - DNA, 1119 bp, Cannabis indica
ccatggtaatttatcacttgaaactaatcaatctatagaaggagtcaagaatgtccggacagagtatgtaacaccatttgatcaacatctagtgtgcaattaattcgcacgcactgaccataaattgtgagttaaatatctttagggatatacctcatgaatccacaagcttggaagtcgtgatcatatccctaatttcatggcatagatttgcattgacaaaaatataagaggaaagccacctagtttcctattttgctttatttgtttaagtaaataagttttctattttaattcttattagttttgggaaaccaatttgatataatttttctttataaaagtagagtcatttgactatttagggacacaagaaaaatgagagggagaaaagaatcatagatttaagagagatcaaaaacttcttgtttctcttctcacaaattaatacaagtaaaaagagagtggactattaccaccatcacgaaactgaacctctataaaagctttgatgttctcttctctttatctttatcattattgttattaattatttttaatcattttaatttgattcattgtagttgactaaaaacattgtcaacaaaatatatattctattattatatataagaaaaatatgatttaaaataaaattaaacatttcttctttaatacaaattttttcttcatttaaatttatcatttgttattttatttatttaaatatattattggagacatataataataataatttattttattttattattaattatacataaaaaagattttttaataaatattaaataatttaatattaaaaataattagcttatctaataaatatttttgtgaattaaattaaattagacttgagctataacgtaaattaaattaaatataagaggagtgctaagggaactctctatcccactctcttttgcactctccctttaatgtgatgacaaatgtcatatatttagcaatagttatttttacttaataattagttatgctattttaatgttattacaattgtgccattagtacttttaatataattattctactaactttttgtttataaaaaaattaactacattaagaataaaa

SEQ ID NO: 395003 - DNA, 1784 bp, Cannabis indica
acctcctcccatgcggcattaaatgcgagatgactgctcagaggaagcctgacacctcccggagatgctttgatgccatcttggtctccgggagcatatagaaccttgcatgcattctccgggaggcatatccaagataatgcctttctttacaaagacttagcttttaatttaagtgctaagacctttgtgcccacgtgtccttgtctggttggtccacgtacattgggcaaaatcaggggcaacaattattaattaagctatatatataatattaaagagaagagtgaggttataaagaatgaatattaatattaagggaaattaccccatatactatttttttaacttttttttttcaaatttacggtttcggtttctaaagtggttgcagcgctagttgcaataggggtttccatacgattttttttcaatttaggttgcagcgctaattgtaataggaatttctatgtagaatttcgtaaaaatgacaaaaaaaaaaaaaattgttttaaagtataaaattaaaaaaaaaaaccctaatgttaataattagaaggtaattacttacaatgatggatcatctattgaaaaaacaaaaaacaaagcaaaaattactaagagcatattttgcattgttttctgttttttattttcaaaaaattctttttagaaatgagaataaaaattagtttttgaagtttttaaaacacaagtcatgtttggttagtattttttaaaaacaatattgaccaaaagtgaattggtttttaaaacagaaaacaacattttgttgttttcaaaagggtaaatagcagcgtgagtacccaaaattttaagtttgtaagcggcataaacccaatgtttatttttggcggcataagtacccaatgtttgtaagactgtaatttttcttcagttttgtcagtatagactccgttttaaatttattaaaggaacatttagaagtaactgatactacatgtttctgtctagacccaatgatcaagaatctagaccttatatgtggcatgtttaagaaaataacagggtttgtacggacgaaattagagaaaaattacaattttacaaacagtgggtacttatgccgctaaaaataaacattgggattatgccacttacaaacttaaaactttgggtacttatgccgctatttaccctttttaaaattcttgttttttgtaactttttttctttctgaaaactattttcaaaaaacaaggccaaacaagccaaattattttagaaaaataagttttttttttaaaaaataaaaaacagttttttagttatgatgtcaaacatgcactaaggactctttgtatattgtttggtataccccattatagaattaatcttaatatcgtaacaataaaagaagtctggaacatttgaatattgaaaccaaaataggctgttaatcacttcaatagggacaaattctttaggtatcaaattcttgttgaagatagtcgaggaaataacttgttcactccaattatgattatccctaagaacccaaaccctaaggtcgtgtgcctcattaacttcaccaatagtcggagccttgttccaatagaaagaatcagctttgttgtatcacaaataacatttcttggaaaatctttcatcatctcaaatttctctgaaattggatcaaaccatgcttatctcaaagtgggatatactacctcgtggaggaatttaaaaaaaaaataccagtttacattaatacactatcgacttattttattcatatcgta

SEQ ID NO: 395004 - DNA, 1463 bp, Cannabis indica
cacagccgattcatcggaagccaccactatctggtttttaaataacgtaaatgtggacgtttgcattttgatagtgaaggtttccatcgattggaatttggggcttgtctcagggatttttttttggagatgtgctcttttcatgcctttatgtggctgctactcaatcaaagaaatggaagcaactggtctgatctatagtctcaaatgggcttttgataatggattgaagattaactttgtggagaccgattcacttatagtagccaatgctatcaacaatagatcttttcttagtggccgttccaactttcatgatttacttgatgatatttctcttttattatcctacttttttagagttgttgtctctcatgttaagcgtgatactaataaggccgctcatgacttagcaagatttgctcttcgattgaataatatttgttcttggttgggagaaataccttctccaatcctctctattattgtaatgaattctcttcggataatagttttttaccaaaaaaaaaaatgatcataaattatattatattataaatttatactttaggccttgctcacctcacccgaccccatataatattaattaagcaataaagattatagtatttgaaggagctagctagtggtgcagctgctaggctgcctagcttttaccatcaaaatggatattcattcataatagccaatttagttgaacagagagaagaccataccataatgtttggaacgtcagtaatgcaattctgccatcaataatatctcctcccaattaactctagtatcgaccatttaattaattggcagcaacaaaaacgatgtcgtttatgttattattattgttatttttttttcgtaaaaagtgaaaggaattattataatattattctaaacagcaatattgttattatattacatcttcatgttacaattaataattttgcatttgattaaagattccatgtttaaaatgtgaagtagtgatttgattcgaaacccaataaaagaaagaaaaaaaaacataaaagcagccgaggcgaccaccttgcattgcatgatttaattataatacaattcttataactaagaagtccatatatatgtgccctgtctgtagtaaagtcactgcttattttgtcatatttctagcaacttgattaattaaattggcattatctattctatctttaaaaatcttcttttagagtgagtcaaattttttcaactcgttaacaataaattaaattttttggaacgtattttccaccaaatactataaaaaaagtgacaacttatattctaactttatatatctttagctaaacaattagcctgttaacttgaagtttctctccatcgaagattgtcatagagtgatttttatcactctttcaaaaaataaaaaaaaaaaggacttttttcataaatgtacaacaaaaaca

SEQ ID NO: 395005 - DNA, 518 bp, Cannabis indica
aggtattttttaagattatttttattatgttactctatttgcattagttttgggtgccaatttattgtgtgtatattttaagtactaagtaatctttttataaaaacacatcaaaaagctggtagaaagttgcctagggtttttctctaggttttccttagtctgtcgtcactgattttaaccccttattctatagattgatctttcattaggggtccttgatgttgattaagtactttttctcctttattctatagtttgaataaatgatgtctcttttatctatttttattatatctttgctaattattattgataagtgtcatctgtcacatgttcatttaagatttaaatttaattttttcttatattattttgatatttcacagctgacagcttataaattatttaattgaagatgttgataaaatctttgtattacttattgtaattgacatagacataatttagttttttttttttttttattttagcaatatatatttacatataataaa

SEQ ID NO: 395006 - DNA, 1301 bp, Cannabis indica
gatgacggttagttagaagaaaagaagacaaagaagaaaaagacgatgattttagcttgtaaagttttagtttttaaaattttctttcgtatttttctcgtgaaacaaacagtgggaatcgtgagatattttgatttttgaaaatttgaaagaaaaaaaaaaaagaaataataaataaaagggaaggggagcgagtgtcgaatcgaatgtaataatataacaatagcaatatttgaaattaaggaatgtccgtacatgtataagctcaggagtcaggaagaggagattactaaaaccaggactgtaactagaagacccgcgcgtgtcttcacttgctaaagaaaaaaggaaaccaggaattatagcaggacaagtggcgtgggtcccatttgttctcgtaattgaacatagacgtggagacaaaatggattatgttcttcttgtttgttgctctctgatcattattattaaagggatggaaattggaatatggactactcttgttaatttcaaataaaaaggaaaagaaagttgatgggatacacgttatctaatttttttcttaattttttgaaggttgttttttttttcaaaatgggagtgtaaacttcaaagcttcctttgttaagaatttctcttttttctttgtccaaattttaatttgttgagcatattttttagtaaaattagtggcaagcgtttgaggcaccatgtgatagaagggttcacctaagagattagtacttatcattatagaagttctccaattaatttgagacgcatctgggaagaatcacggacattttgaagagtggtcaaaagaaatcttgtccatttgagccacgagattccaaattataggtcattcgggattcaattattcacataatacaagtgtcatagtaaatcactctagacaactaattcagcgctagattaacatcattataagaccatactgttttgacaaagtggcgattatattctgtacttttacattagctgcatatgggacaaatcttgtctcaccaaactcttactagagagactaaagactacggagacaacatagtacctagagataaaaaggagatgtgtcattttctcttctaatctcattctcctcctatttaagaagcagtaaatgcatagaggattattgttggaggaatttagacaacaccaaaataaataatataataaagatatatacagaaaatgtgcgagtactcgacctagaatggcgagtattcaagctatgaacacacaaacgtatggtcttataatgatgttaatctagc

SEQ ID NO: 395007 - DNA, 829 bp, Cannabis indica
actactgactgtcacacttttgctgcaacaatatacatgcattatgtaataataatgttgaaaagcaaaaataaaattaaaatgaataataattaaaagaattaataaaattcttgtaaataaaatacaatttttttttattattttctgcaagaatatatattgtattatggttgaaaccttaaataaaaacataataaataataataataatgaaatcatcttctataaagtatattgtatgagattacaatgttgaaaaattaaagaaaaataaattaataattaaactatatatatatatatacaatttcactgtacatatataaatagagaactatatatatatttctgtatttatatagaatacacgtttggaattgtaggatcaaggaccacatcaccctcagccatcacagccgtactgccacttgtgccacggttcacgcttacaacattcccactatgctgcatggtagtggaagcaccatgcaacgtaccatcttgtacttccttgttaggccttcctctccctgccacctgtgctttcatcttcacgccattcatagaggagccgacattctgctctgaacggatattatgttgtctcttgcaaacaactttggcacactgggcatttccctgtaaatttataccttcatcacagacaaccaactcatagcgagagccagaggccataaaacaatttccacgagctccatctaccttgactccacgacccataccattctcacagccaggtccaaccgcgggggttaaacccataccagtgggttcagtgcattcttgtttgcatgcatagctaatt

SEQ ID NO: 395008 - DNA, 1257 bp, Cannabis indica
tgttttttaagagtataatttgtctcaattacgtgctattgtaagggatgaagcttcattttaatgaaaattttattttcattaaaaaaaaattcaaaataatcaaaaaaaattaaaataatcaattagacgtaaaaaaaattaaatagtatgtgaattatttaaaattttctaaaacttactagaacggctactataatttcaatgtatacccacataaaaaatttaattttttattgtgaaaaataaagatgtcctagtgcttggggcaaaaataatgtccctacagtaaaattttttatacatgagcacaatagtctagggtaggggcggacccacattgtagcgactgccccctgaaaaaaattaggaaaaaaatatatatgtattttagttagttataacatatatttgtattaaaagatgatatttataaacataatagtaagcttggtgtaatagttaaggtagattataaatatgttagagagtaaatgttcaaatcccactaattacacttctatttttttttctttttaaatttatttttgctctctctgactttaaaaaaaattacgctccccctcactttaaattctgagtccgccactggtctagggttgaacatcatgcgggttgattgagtttcgagttgacatgctttgagttcatgggttttgagtaaaaggatgaattcgtactcgcccgttcacgtgttgcggggttggcaagttcgggttgaccaggtcaacttcctttttttcttttttaaacctaaattttatatagttatttttgtctactttatttatttatgaaattaaacataacaccttaacctaaattctctagaagaaaaaacattagtttcaaattcaaagtacaaatatcaatccaaaccaaacaattaccaacaatcattcatcaaacttcaattcatgataataaaaactaaaaaaatcccaaaataaaatataaataaaattccaaagtctatcctatatagcctatagtctcaaagcacaacataaatatactgagtttatcctataaaagattatcacaccaacacaatttatattttttttcagagcattactaatttactacactagtagtgcctagcagtagcactacttagaggtggcatgttgcgattgaatagagatattccaatcaaaaatattacattaagttctaaaagatcaatacttaattgtaccaatagcgatataacacgtcatgcatatatttttt

SEQ ID NO: 395009 - DNA, 1022 bp, Cannabis indica
  modified_base (95)..(95): a, c, t, g, unknown or other
cccaatggagacacaactgatattttttagcataatatacactaacacacagatgaacagttaaattgatttgtctattattaaacagaactaanattttaaaacaaaagacaaagctagtttaatcttaataataattagagtaataagcttgactaaaagatgagtagaagcaggcacaactgtggatactactatggcaacgaccctggtaccatctggtggtgccatattattcaaagcagtataataagtgacgtagagacaagttacacagatctgaaactccacccgcataggtagattgtttgtgagaatagtaagcatgtatagagataccgaaagtccagtggagttgaaaatcacaaagaaaatatacgaaactgggctgtaagaccccaaaatggagctcccagctaagtgtattggagtagtactgctattattatctccttttcttaggttactgtcttgccaaataccacttggagggttaattcctgcttggaatgttgctgtggctattaaaactgccataaccaaaagggcacctaaggcatcacttggaggatctctgcccattttgaacttgaagtattctaccatgtcttgttgttgttgttgattattagtgtcgtttgttaatgaattagaagagaagagatgatgagtaatgtcgtttgatcttttagctccagctttgtgaaggagctcgtggatttctatgtcgcctgcttcgcttggaaacatgtgtagcaaatccagagcagtgaggttactgttgtttacagcatttactatcaaagcagcagtagtagtagtaccgtctgttgttgttgttgttgttccaaacccgattaaccattcaactacctgtacaatttgtgaaatttattaattgacatgcgtgagactgagaacacactcacaaatagtataaactagcctctttggttttgtttttaatttttaaaattgtgtttttaaaagtgagaatcgaaaatatttttttgtcattttaa

SEQ ID NO: 395010 - DNA, 1122 bp, Cannabis indica
ttaaaaatgacgaagttttttttgatctggatcctgaaccatccttacgcaaaaactgtagcaacaacttctcgatatgcttctgcagttaaagcatcatcagcagcaaatgctaaacagcttatgcagagctctttttctagtaactttcttcctctcaagctataaattctgaattctttataatgacaatcattgtgattggaattcatatgctacccgttgtttcgaccagaaacagtcataatttttaatgtgggttcctctttttaagttcataattttccaccctttctttacgtagtttttctcttatttatgttgtacgtccttttagtgcatgtgtgacctgtccttcctttgatgtatccttacgtgtgtcctttttctttaccaaactctgtttgccacgtgtcttgttgttgcgagggtgggaggtgtttctttctgcatttatgagatccgctggtttcttgcttgatatctactgattattttgttcctttgaggaatgatttccttctgacggcatactttgctttcagttaagggtaatgagattatcctagcattaactctcgtcaagtatgtttctccgacatgagtatgattttgttttatcttgcttgaaatatcctcgttctatggaatctgccttcctgtccatggagggctggttcatccgacggtgggttagatgaaaggtgtacctttttcgcacttggtcttgtctgacctatggctttaacccgtcagtttcaacttatctcggacctcgactttttggcgtgatactgaatgcgccgtcgtcacttatttcgtttttgttgggttcgattctatcattagttattacttcgagcagcgaacccctatattgtcttttcttgagtctttcatactttatcgttatgctccattttgatcttgtggctttgtgggctttttattattttatctatttgtgggccaccttgttttcctccaatccagtgggccttattgttgggagtatgtctaattgggcctttgcgtcttttctcatatctaattgggccttcatgcctgttacattttctccccccaaacagtactccccctagttattggaaattattttac

SEQ ID NO: 395011 - DNA, 709 bp, Cannabis indica
ttaaaaattaatttataactaaaaaaaaaaaaactcggaaatataattgaaaaaaaagacaaaactgtaaaaaaaaatggggaaattaccccatatactattttttaactttttctttcaaatttacggttgggttttgcagctagcgctagtcacaatagggatttttatacgattttttattgcaatttaggttgcagcgcttttccgcaacagggatttctatgtagaatttcataaaaatacaaaaaaataaaaaaaaaaaaaaactaattatagttagagaaaagctctatttattccaagtgaaaaatacataatgaacatagaatatttgctttgaaggtactcaagtcacagtaaacatgaggcacacaaacaaacttgaaaatagaacaaacaactccactataaggtataatatttatattggtataatttaatatgttttacttattttattatattaaaaaagtatagaaaattgttaactaattataagaggtgacatcataataatatcataacaatatttaaaatataaatagtattgctattaagaatcttaagtatccaacaccatatctaaataatattatttttatgttatttattaaataaattaaattgtgaaactaacgaataatattatgtcactatagtatttagcaccgttaacatttctcaaacataaaaactacattcatct

SEQ ID NO: 395012 - DNA, 843 bp, Cannabis indica
tttttgctttttttattggtgcccccctcccctctctcctttttttttgttttgttttttttttttttcttttttaaatatgatttactctcatccattatttatatattctgtttgtgggcatttggaatggtacaatttgtgtgatccaacttagctccgaaaaagatcaagtcgatagacttaagtgcctttaataatttagtttattgtctaaataaggagcacttgatagctcaaccttatgaaaaggtgcatcttttgtgaatgttgacactgcacatgatgccatttttatgcttcaattacaattatatgaataggctaattagaattttgtgtacatttaactttgacatgtcccttaaacttttaaggtcattaaattaccccataaactattgagattgttggatttaagaacttttgtctaatttcattcaattttattatttcagtgattatttatgtactaaccatgctctccagactttgatatctactaaatcatgcccctcgaactttgacatgtactaaatcacgtccctggaactttcatccatattagtactttttactaaaattggaaaaaaaatttaaatccaacaatctcaatagttcagagaacatttttaacgaccttaaaagttcagagacacaatttggtacatgtcaaagttcaagggacaaaaatcataattagccatacgaatatatccatttcataaaacaacaataatcttccgaatgagaataccttttcttaaatggcaatatactagatatatcatacatattaagctggtggccagagtttggcaaattcttctttacaaagacaga

SEQ ID NO: 395013 - DNA, 1135 bp, Cannabis indica
cagtgccatgaacgtagttgctacttgccaccattgattgagaatatggaaaatatggttgatgaagaaggagaaatggctttgaatgaatgggttgagtctcaacaagtacaatgtcccaattttctattttgggaaaacgtcgtcgttgaaggatcgcttaataataacggtgctcatgatattaacaataatactaatggtttgaacttgggagctactcatacgaatacgatgtcttctttcccttcatctttataagttatatacatatatacttatattatattttctttctaggaatagctttcccgatccaagttttttgaaaaagaataaaagaaaaggtttgttttaacttttattttttctgggggggtaatgagtgtatgtatttttaatatatgagggaaactactaaagcacagcgtgcatatgaaatatatgggcattgctatatgtattaatgtttattgttgttatttttttattgggtggtgatgttaattttggagagaacagctgaagagggaatatatatatattttaataaaagggtcaaagcggcaagctgcagcaagtttgatgaagtactaccctcttctagtgatcgtgatcatcattatacatttattcattcattaatttgtttggcttaataatatatatatcgtgtgaatttaggcctgtgtgtgtttttaaatcaaatacaaagacttaattaatgtaaaagaattagcctcgattggctgactgcatatactttttgtgccctttcttctctctacatgtctattatttttctttaattcataaaataaaattacgtcttgatttaattataaatatactgaaattcaggctcgattatataatttcaaacatattataattaggtaatatagtcgtttttcgcgcaattattttagcgcattttgaaattataataaaaaaaattagtaacttaaacaaaaatataattattctaatatataattattatactcaaaattcagctacaatacttcagaagctgacacgtatcctagaaatagaatatgaataaactttaatgatataataaaatggagaattaccatatttactatttttttaactttttctttcaaattta

SEQ ID NO: 395014 - DNA, 817 bp, Cannabis indica
ccaactgacaagaattaacaaactaattctaacagttaaaataactaactgaagtaaaagtttgttatttatcacaattgtataggttttactgtattaaggaaaagtcatatttataaaaataaaaaataaaaaaaaaattactcatagaaaatattggatcgatggactcgctttacttccatatatgttaattaatattaatatatattatataattcatacagccgtcgtagaaatgtaaagagtgtgtatcatcagtaactgtgagaaaagcaataattgtacatatgatgatgatgatgagaaagaggaagatctgttgagatttatatatatatatatatatatatgtatatatatatatatatataataaattgagtaaattacgtagagagatgaatggtgaatatataatagcgatctcgatgtctcacgttgaagttattgtatgatttaaaagaaaaggaaacgtcaatcgagataggattatgggagacagagtgatgaggcaacgatacaagttaagaagagagtcatgtggtggtgatgaaggttgctttgcttgcttttgtacttcccatgcgcatcaccttattggccgacaacctatctatctcttctcaaaccttaattattatacattatatatatcatccacacttacaccaacctctacctccctatactacgatcccatgaaactatatagtagactctacatatcttctctattaggtattatataatttaggctaattagtcatttttcccctaaattttgacatatactaaagcatgttatttgaactttt

SEQ ID NO: 395015 - DNA, 593 bp, Cannabis indica
aaataaataattaattaaaaaatcctagacaatgagtacatcttccatattgtaaacaaaatatatattattgaaatataaataaataataatttcaaatagacttcaaaaattatgaaaaaaaggtctcatagcacattcaaaactaaaaatcacttttgtagataactactttattgttatctttaatgggttgtttaatcaatattatagttcaacattacaacttcaaacatacctatattttaataaaaagataagactttattaagcaatattatggttcaacattacaactttaaacataggggcattactttctatctataatactaggatttagggtaaaaacatgaagctagtgctagatagtgagctattctatttggagattattttacaaaaataaataaataagctagaaggtagtaattattcttatcaagcaagtaataataaaaatattaaagtagtaaaatagctatgtttagattagataaaatttcaataacaaaaacaaatgagattttgataaaataatagtgcttgaaataagtatgcttttagtatattttaaagggtaaattgcggca

SEQ ID NO: 395016 - DNA, 703 bp, Cannabis indica
taataataataataacaatagtacaatctaaagtctaaacacttcaattagtcacaaaaattacaatttgttgtgattaaatttatttttagtcacaatatttatcatgactaaaactaaaaatcagtaataacttgtatctaaacactatgttttagtcacaaataattttttttgttgtaattaaaagtcacatttaatctaaaaaaaattatgttttgactaaaagattgtcactaacgatagccttttttttgtagtgattagagttaattaactttagttcaaacaatctaagattattaaaataatatcttaattataatctctctatttaaagaaaataccttttgattctaattacgataatattgaatactttagggaaaaaaacttaagaaaatttggggagaatatgggcgatttggaattgcggctgaactcggtaaatttggttaaccgaactgttatataattatgtattaataaaaaattatattattatataatttattatgtgaaagtattatgatataatgcattttaagatcccgttggtgtgttaggggcattttcataattttgacccgagaagggtaaaattgtaatttggtaatataatgtgcttttggactatatattatatagtatgtttattctgtctatctgtaggtattttttgacaagtcatcgcggtatagtc

SEQ ID NO: 395017 - DNA, 1440 bp, Cannabis indica
ttagaaagaagaaaaaaaaacaattagaaattatcttcttcaccaaggtccacgccaactaacagctatcgtttataataatatagaagaagaagaaatgaaaacctgattagatcttcgaatagcgtcagcttcattccgcttggagagattcgcagtaaatcggaatctccttttgggattcttaacaacccaacaaagcttcctccatcgctgaagtgcttcctccgatgagttcttgggctttacatccccaaaatcctcaaggaaataactctccatcttcaccaaagccaagctactctgatactaataccaaaaacctcgattcaggtctggaattcaaaagataagagttcaggtgaattaaattccactgatctgattgatttcaattagaaatgaagaaaaaacacacacttaaatctttacaccgtggtactatcaacttaaaacttaaaaatttgggttcactgttctctgtattcaaacactactagttgggtgttgaaagagagagagaaagagttgactaataagttcataaatctgacctatgagtttttttggtggtagagattaattaattaaacatataataacaaaacaataataatatttaaaataaatatcttcttaggtttcaacgggattggttggaaaaacgtgctgtgcctttcttgaccatgtgactcactaatagataactgacacagtccatagttagagtcattaccattaacgtgctccattatttggttctcttctctgcttattttaaaacaatttctaacatcatttttatttattttaattcactcaaaaatatatataaatatttaatttaaaatgaatatgcttcacatacaaataaaaaataaaacactactagtgtttgtttgttagctttcctttctccgaaatgacagatttttttttttaaaaccaattaattttagaaggaaaagtcatagagcatccttaatagtaattatattttaaagatactaaaaatttacacattatttaaaaatataatattttattttatctttcttttatattatttttgtcattcttacttttgaaaatactctaatatataacactctttaaaaatgctataattatgatctcagacattattattcaatatatcttaatttttagttacaataactttttatcttcaattttttattataaaaatgaatagcatcaatgctacaacatagtatctatgcaaatttctaaaatgacatctttttctctttaatggtatagcatcttaatattttgccacataatatgtcaacttcaccaagcatcctctaaaattttaccattataaagcatctctaatggtagcatcctttaaggatgttatgctattgggcactagtggtgcctagcaccttctagacgtgtcaccttgcaatt

SEQ ID NO: 395018 - DNA, 592 bp, Cannabis indica
cttagtctataaatcaattttgataagtttttaaataatttatactataagaaagcttgataatatcttaaaagttatatttaaaaagatacactaattttattaataagctttatagtaattattttatacttttgtagcttatttgtttttaagtatgtttaaaattaatgtaagaattgttaaaaacaaagtaatcctaaaatattttaaacagcaaaataacataatatatttaaaaatctaaagaataaaattatagttgtaaagttaactatgagatatcatatatgtataaaataagtaaccaaatatatttaaagataaaagatttttgaaatattttttttttcaaaaaagtaacctactgacatcttatttgcataaaaaaaccaaaaagtttaaaacggaaaatttcgagagtgcctttcccattttttaatccattttcggtaggaattagttgaatttgttattttcattaattaaggtactgtttggtaacacttttgttttctaattctttaatcacaaaataaaagtaaaatttttgtttttaaaaaacaaaaatacgttctgtaactacttttgt

SEQ ID NO: 395019 - DNA, 718 bp, Cannabis indica
gtagccagctgtatatacggagtactagggtaaatagtttgatttttacataataattaaacacattagttgtaatatattttatattaattttgctatttattttaataatttatagtaattctgctatatatatatatatactatacacaagagatatatattgatgataagacttgtagctaagatcaaagtatagtgtgtctctaaggataatgcagagacaacatatacaagagttgcattaaaatccaagagattctttcactaattattgaaaaataaaataaaagtatacacataaatatatatgatgagaaaaagtgcaaataatcaaaaacagcactagccactagctatatagcttcttcttctcttcttcttttgtttttcttttggtaagaccacaatatattaatatgactggctcccattttctttagattggggaatatataaatatatatattaatatctgtcgttttggtggtagttcgtagttgatcgtgtgctcatttttatccatatttattctatatgatattcatgcattattaatactatataaatatataataatttatttcgtattttggtacacattcaatcatgcactgcagatatatatatacacatatatatgtgttgaataaaaatccactataaccagcccttttacaaatatccacatcagcaaattacaaacagtttaaaaagc

SEQ ID NO: 395020 - DNA, 656 bp, Cannabis indica
atatatagatagatagattctaaagctccactccaatattttttttcgtgaaacaagtactctattcatttatgttaattctacgtaataaataatttaatatgcatgacagccaagaccatacatacacaattaataagattgatatcatgttaaattgttaataaataatatatttaggagtaaaaagaaaaatcaatttggcatgtgcgcgtgtggttaaattcggtacattcaattcaattttttatttttaaaaaataacaaacttttttcaataatataaaatataagaatatttaaatttgaagtatgatattttcttttttcaaaaataaaagataaaaaatgaagtacgatattttcaaatctctatatacacttatatccgtaagtaacagctatataatataggtatatgtatgtatatttatcgttggaaaaaaattcttaaccatggaaattattgtttatgagcggcggaagaaaaaatttatgttccttgttgaataaaatccacttataaccagtcctctttacaaatatccacatcagcaaaatacaaacagtttaaaaaacaagtaagactcgatcctagggtggcttcgcctctagtggatcaagacttagtagttagttacaactgatgttgtaac

SEQ ID NO: 395021 - DNA, 954 bp, Cannabis indica
taaaaaatatgtatattttttaaaaagatattttttcttatttggactcctaaaatgagtgggtcataggcgcgggcctagcccacctatgcctaaggtcggccccgatagagtgagttaatttttttttttttttttggtgaaatggaatgagcaaagatttatacctctttaagttcttatccttcttcttcgtgttcatcctctttaatttcttcttcctctttctttttttttttgaacatatttcttcttcctctttcaaataaaccatttatttctctttgattcaaaaattgtttgtaggagttttttttttttttttttttttttttttttttttttttttttcgacttcatatttgcgtacattaatcaagttggttatttgccaaatattgatgaaatcgtggatgaacaagtaaaacagcgataaagagacaaaaaaggagagttaggtgttgtttttttttttccaatgaacaaggagggttagtttgattgttatcttttttttttctaagctaacgtctaagtaacgagaccttaacttttgttaaaaaaaaaattaaaccaagtttaaaagaaaaagaaaacattaaaccaacaaattctgctaaacaaaaaattgttgttagatagccacttttaatatatgtagatagtaggattatttacaagtgaattgagaatttaaccgtaaattactttaataataataataataataatcttgatagttataaaaaataaaaagataaataatagtaatagttataaaaaataaaaataaaaaatcacgaattaattattattattaataaatgttaaatatatttttattttaaaacactaaaaaattagagaaaataaaatattagatggagaagatcacacatcactcactctcttaagtttctaaaggtcatatgccaaaaaaataatggcatacaa

SEQ ID NO: 395022 - DNA, 878 bp, Cannabis indica
ttttttttttttttgaggagatacttaaaatacttgtacaacaacatatttggttgttgtgggtatatgtgttatgtcaattatatataattaataatcgtatgaatatgtctaagtaaaattatcaaaattcaaaaggttgacatgatgatcacatcttttattattaataatttatattatagtgctaatataattcatgactaaagaaagaaaaattatcattattatcacactaccttgttattaaaactattataatgatatgtgttagggtgcttttacctttggtagaagagttcaaaattaataatctgattaattgaaatattaagtgaaaaatataattgtttaaatacttataattatttttagagtattgtgcatgagaaatactcttaacttaattatattatttggttaattataacttaattttatctacatattaatatttttatttcacaattttggggtctgaacaatcgagggcccgaagcgcacacttagctcgtctactctcaggggcggctctgctcgaactttgacatgtgccaaattatggtcttgaactttcatcgatctatattagatttttcttactaaaattaaacaaaaatctctaaattcaacaatctcaataaaatttagtaggcttgatttacactactacaaaaacaccctttagaggcggtttttaagccctttaggcgtcggttttcgcgaaattcgctaccgacgctgatcagggcgacgctaaagggtttatatgaaccgacgccatatatacccctatggcgtcggttattagctgggaaccgacgccataggggtacatatggcgtcggttcctagccaataaccgacgccatatatgg

SEQ ID NO: 395023 - DNA, 686 bp, Cannabis indica
tagaccaaaactcccccattcgatttataaaagtttttgggttaaaggcattagagaggcatcgggctacaagaaaaaattgaggattagtgtgtgctacttgaagatcagactcagagaggacatgagtggccctttctttttcagataaaacgatttttgaagacattgcaccaattagagattccataaacaaaagccagtcagtaagagagaataaaaatcgaaggaataaagaaaaaatgctttggtcaggggaataaatagaaaaaacagagcagtagttaagttgggggagatggaagacgtgaagagcttttggtggaagagtctggtggttatcggagatcatggtagtataggcgaagaagacgaagaacaggggagaaaacggttaagaaacagagtaactgctgcagagcacaataaccccactcgggcacttataagaagtgttacctttacatgttgttcttatgatacggcttgttgcattcaatttttctatttcaacataaatcacgtgttattatttaaataatattcataggaggtttttttaagaggagattctttattttagtatgcccacgtttcaaattttcattttcattataaaaaaaatatctaaaattaccatcatcttctacataaaaataaatccaaattatcatatatatatatat

SEQ ID NO: 395024 - DNA, 1170 bp, Cannabis indica
cactttttgctctctgatattttttgacttttctttcttggctttttagaggataatgtttttaataatctttcattgagattggataaatagatataaacctctcttcttattaatttacattaatttcatagggggtggacacactatacacatgtaatttttatactatatttgaatatgactaagttgtcataccaattggaactcacattttgtcacttttcttattttgggagtcagaaatggggtatgtaatgagtatgaatgtttcatccataaccattggatttaatgactcaaaatctatcaaatttggacaaatatggtatgtgggaaagtttttcttcaatctattacattctacaattaacttatacaaaatatattaatagtctccaatagaaaaagagtgtgaaactttttcacaataaggagatagaaacaacaacacaatgacatagccttgggaactcttgtttataagtatggagacaaaatacttgtcaagatctgtttcgagttaagacgggttaggtttgtacttagaactcaattaacttaagagtctaagttttttttttttaaaaaaaaatacaaatattttttaataattcttgctcaatgatcttaagctcaacaaattttaggaccgatcctaatacctgcaaatatacattgcatatataatttacaaatgtacaggttatttggcattgtatttgatttgaacttatagtcatttagtacaaaaagtagattaccactatttgggcaacatgtgatgttttcttcttgtttctttaaaatgttgtgttgagaggttggaaggcacgcgagggtggtacaattgtggtgctttgtgattttcaactcttagcctacaccctactccatactccattgggtgagagagattaaatgaaatcaattcaatcccaccttctacttctcttctaccatagtataggaataggaataggaataggaccacaaattcaaattacctaatatcaatgtcatgggcaagacaaaatctctactacttataatgtaatcaatagtgtaggaatgttaggaaaattatatggtactactctcaaacggatatattgatacacctattttgagtttttgacatctagattgttttaatcttatttttttttt

SEQ ID NO: 395025 - DNA, 1492 bp, Cannabis indica
acaatcactccaatatccctcctaaaagtagtgggttgtaaagacatgtgggtagaagagtcggctgtagtaaagttcccatgagaaggatttccccggtcaatggggacaacaggagcatcaggtccatcgatcgtagttgcagcagttgagttatgctcaaaagggtacaatcctaccaacttaagcatctccacatttacaatcgttggggcatgcttttcagctactgcatggctgtgaaagctgccgcgtgttgtatcatctcctcagttggcactggtctgagatatgtacccgtatggttgaaagcacggtgggtagtctccatgggggtcacaaaaaagtaggatgaatgatgcttgtctccgtgagttgtgctacaaaaaccagaaacatacgggtgaccctgttctcggttcataaagtagaagtattctaaatggttcatagatgggaaagtccggaaggaaaggaggtaatgaattttgtgagtagaaggccttccccatcccttctgatgatatattatgaataataccgataaggccaggtacacatgaggagaaatttggaccggggaaacgtcaaagtagttcgccccatctcgaaagtaatcatggagtggcaaggtcgccccagcctcaatatggtattttgtccaggcacatgaattatctaggggagtaccggtattttgacctttcttcgtcgggactaccttcaccccttcaccaagagggtacagagagaggtaaccttgcactttagacgactccaaattgttgtctggacgttcgattgagacgctagggtcccaagtactagggtgatagcgtgccttcgcctctaaggtaggcaccatgtgctgagccttttgttggttccgcttcctttgtttcttggtcaccatgtgttgatctgttacctcttgttgagtccgctttttttgagtagtagaattttgaggagcaatacgagcttcattttgctctaggccgtctttggaggaaggattggccatttctgcaatagcgagaggggtggagcactctccttcgtgcaggaagtacaaggcccaacgtggaaggattctttcaatctcctcactctatgaataggacatgtagtttcgtgagacccgctagatgactcattgctacctaaaggactaggtgaagacgacaaatcagataaatttggaggtgaccgatagtctgagtatagatgagcaaggaggtcatcgccaatgtggttgtcgcatccccaatggtcacgagcatacatctacaaacacaagtaaggggagtgaccatacaagcatgaaatgaggtaaccaaaaataaataaaaatgctaagttaaattcaattgataaaggttttaggctagttaatttaaataaattaaataaaaactaattcaattacaaaaattagatgtaaactaaatttgatttaaattaaattgaaaaaatctaatgttgttaaatt

SEQ ID NO: 395026 - DNA, 1556 bp, Cannabis indica
attcaagtggtttagccgtcaatctcccttattattaagtatagtttgatattgggttttttctcgattatgcattgtgtaatatataaacgcttaaattaaaaaaaaaatatgggatttttttattttactttaataaatattataaaaattgttaattagaccattattttatattgttactgtaaaatagggtcggtaaaataggtcggatacgataacacgactcgaaacctataccagagttagcaagtttgggtttagatttgccttaaatgggtttgggtggtatttgcgttgactcgtctaacccgtttagtaaacgagtcgtatttggttgacacaatttatacgaaactaacttgttaataacctatttaaagttattttagtgttttaacaggtcataaacatgttatatgtttaaacaaaatatgtttataaatgagttacacatgtcgtattcgaattaagcatatacatgttatacatgggtctcgacacgatacgattacgacccgtgaatacaaattgtttctcctattgctaaagggcactcatagtgccttatatatttgtgaggtgtaatattactattggtacaatttaatattatatcttacttattatactttaataaatattataaaaaattactaactaattataaaatattatttcatactagtattaggtacattattaccttataataatactcatttaataatgaaaaattgggttggggtcaaagtatattaatatgtgagtattttataaaacattaactaagtaatgaacacatacaaattagaatacataatgaataacattcacaaatgggtgcactaatatacttttttttttttttaattttttatataacaatgtataacgtgtttatttaagattttatgtaaatttgtgataaatttgatgtcttaaaaataaaatttaaataatttattacacacatgtatagtattttattttatacgcatgtcaataaataatttgaataatactttttttcatggtaaattatcaaaaatagcataaaatcataaaaaaaataataataataaagaaataaatatttttttttttttttgacgtagtgattaaaattacttatgaatttacgatgcagacacatgcaactagcacaggaacctccttaaacttggataattcatcatctaactaaaaggtatactttgtcaaactataaatgattaaagatagcgagcaatatggaataaagctgaaaatttagacaataaaattatagcctcctcaaacagcacacctaaagatatggtagatttgtgatatgattaatgggtatgattaatggaaagcattaaaaaaattacaaaaatccagtgcatcaatatacttatttttaagatatggacatatttttctcatattcccttttgtttataataagggtaaatggcggcaaaacccccaaaactttcattttggtttcacttaaccctcacaacccaaatttctgcgggtaaacccccaaaaccactattctgttagca

SEQ ID NO: 395027 - DNA, 1360 bp, Cannabis indica
cggtgttttataaaaataacgagaaaactacataaaaataattagaaaataacattcaaacaatattaaaacaacaacaaaagataataaaaaaatcaacaacaaattaacaagagtacagtataaaaatacatcaaaagagactgtattttttgtaaataaaatcataaaaatcgtaaaaatcgtaaaaatatttaaaatttcgtacaaccatattatttttgtgtatttgtaaaataatacttttaatttttttccatttaaaccaaaaaaaaaaaaaactttttttcttctagaaagaaactggtcaatcaatattcttcacaaactatgcaaaaatggcatattctaatttcctttgaagaaaaaaaaaattaaaaaaaaaaaggcatattctaatggatttccaaaaaccctagaggggacaaagataagaaaattatctttttatttttatatgttaaaagcatgtgatctattttgagatccattgttcaataaattattacttttggattaacaaatgactaatgtatccaaatatattaatctttattctaaaaccaagatttcattaatgattatgagagttaaagttagatttttccaaatattatatttatattaaggacacataaaaaaaaattatatcattaatattataattaaaattagttacatgttaataaatatatttttgtaattagtagtctcagtagtaccattatgaagcgacattttgccaatgatagttttttttttataaattattaaattaaaatatataaaacttaatacttaattacattgatattagtaaaacagttcatattaaacatattaataaatataattttttaattacaattttaaaaatatcatttttactaggcatagttttattcaatgccttagcaataattaataatttaattattaaattaaatatataaaactcaatataattaaattaatttacaataattttaataagagcattgctattaggcaccagtggtgcctagcacccttaagacgtgtcgctttgcgattggttaccgatactccctaaaagctattatattaaactatattaaatctaatacttaattaaactaataataatattgacacgtaagagaatatttgcttttaccatttctcttttaacaaacatttctctttcaaaaatagtaccccacacaagtctctaaatgtttgttttgctttggatatatttcatcaaaagaataaaaaagtttacacgtgtgacccactaacagtctcacaccaattatattagggaaatttgatatattatgctaaaaaatagaaagtggtgtttaattataccaagaat

SEQ ID NO: 395028 - DNA, 610 bp, Cannabis indica
tatatatatatcatcgttgtttccaccactagtatgagtggaacctacttatgatgatgaagtgtggaattttcattctgggtttgatgatatatataaatattaaattaacgatatatacattaaagtcagatccatatatataggtgtatatgcgacattctttgatgttgatatatacaattaatgcattatttttaatgctttgaaagatgcatatacaatttaacgacgacacatgaacgtactatttaaattttgacttgacttaattaattgagaaatttatatataaccaaaaattgctagtagtatataatattatatatatgaaacaatacaaggacaaatatatgtaataatgaagcaaacaaatttaaccatattgaattagttaatctataatgcattactttacattattttatatataatgcaatgtttataattacaccacaaactatttttgggctcattacgttattaattattaataatattattaggtagatatatatataacatgcacaatatttgttgaccgaggttttcggcaactaataaaatacgaatataatagtgagctataagaaagcgagatgaagacttt

SEQ ID NO: 395029 - DNA, 582 bp, Cannabis indica
aaaaattaaactggaaatagttaaataaataaatgaagagttttgcaaaagtttttaatatttatttttgcataatagtctctcttcgataaattacttaaaacacacaacactcgtctatatactccgcaacaatatttcacaatagatggttgatgttggaaagtttatgaaattttttaaaaatatatataactatcctagtgtgtgaagtggaaagagtcccacatgggatagaaaccctcatttacattggtataaagagtgtaaccttggtatttgggtttgggccccaacggatgcccatttttgtgcgaatgggtgaggacacacatacttggcccaccacacacgcatgcgcatcgaccgattcgagccggttagtgtgacactatattattcaatttattcgtctatataatgcgattgacctgcaaatttcgactgcttgtacactcttggggagtgtcgcgaacgtcttaaagggctcgtttggaacgccgtattgaattgaattttatgcaatatttttatgtaaaactatatgtggtattaacttttatgtacacctaaatatataat

SEQ ID NO: 395030 - DNA, 527 bp, Cannabis indica
tatctttagtcacgaaccttttattacagcataagaatgctataatttatttttagttataatttttttacttttaattacaaattttattgtatctaagttgtttatatataatatatcctatattcaaccaaattccattaatttaatttatttattgtaattggtaacatttttttttaactttctttggagagactgtgagtaaataattttggtggaatttaacctctagtcatattaaaagtttaataaatttgggttttcttgggaagcaaggaagggtggagaataaagagtctttggtgagtaaggtgtttaaagctagataatattaattaatggatatatcatttttgacaatagctagcttttataactaatctttaattagtttcattaattttggacaagtgttttggatttggaggtcaaactcaaagcttgttgaagcttggagcttggttgttcttgtactttgttgagccgcaaatgttaaaattattattgtggactaatataatcat

SEQ ID NO: 395031 - DNA, 790 bp, Cannabis indica
aaatatttttttttttgaacaattgacaaaatttcattgagaaaaaaaattgagtatatcaaaaaaaggagatcgaagatcctccctccaaattagctcaccatccactctaagtgcgtgcgcagctaattcatgtgtagctatattggctgaatgatttgtatgaataagggacgccttaggaaaattggacagtaaactaattaggtgtccataaaaattgataccacatatagttgtacataaaaatattatatactataatttaatataataatatacaacggcgtacctaataaatccgaatataattaaatagtgatggagataataaaactgttagagggtaagtatctgttgttgtccaaatctatcattattgttttgtactgtaagtctaggaatatgaaatttataatcttagagataatatgccatctttattgttcaacttatgtactataaaattgttgataggatgatcatatgacaatgtaaagattattatttctgtatgtataataaaaatattttaatttttgatatttttctcttattatgtaaaagataaataaaaacaaaatattgattaatatgattttctatttatattaatggtgatactttgtaaatgtgattaatttctttaaaaaaaataaaattaatatagcataaaatacttttattgataataatattttaaattttagtgatatgggtatatcttatatttgtaccaaatattactaatcttactacagtagaatctctattcaagaatactctattc

SEQ ID NO: 395032 - DNA, 1013 bp, Cannabis indica
aattaattaattaaaatatcattttaggctcttatgtaacaataagctacataataataatttgggtagcatcaaattttatattaaactatgttactcattgttatgcttattataacttatgtttattttctatctcccatttggtgtttccctcttttggtacccaccctcagaaatttggattaagattaattaagtagggagtgagactatgtgtgtagtgtgttggctagagatcatttgaaaacagttttgtaggtgattaccaacacacttgtagtttttctaatccccttattgacatagttgtggcttatctgttagctatagagatgataacttttttcaagcacctctttgtgatgatggagagtgattctgagacaattatcaaagcactgaagggaatacttgttttaattgggggtactggtaacaaactctctaatttattcttgggttatattttctattttatttctaaattttgtaattttacgtcacataatgttgttaaatgtgcttttgctctaaaattttgtgtattatattaccaaattattaattaatttaattaattgtggaataataatatgggtactgaaataattgttttgtagctataaaacacaagtttgtaactgcatgataaatcaaaaaataaatagtgcaaaaaaataaaaacacacaaaaattttatacgtggtatcaacaattcatgccgagagataagtttcattagataggtcttaaaattacaaagtaattgatttatgcataaataaactctatcttattgtatgtcgcaagtttgatgtattccacattctaactgaatcttgctaaaactccaagtgctcaaactttcttcgatctccttgaagagtacgttggcttcctcccgaggcaagacttgaaaagctatctcccaaaagcttgtagaaccttctcctgaaggtagcactgttgttcttcttcttttgtaaacttgattatagactcaagacaat

SEQ ID NO: 395033 - DNA, 565 bp, Cannabis indica
tcggacctgggagtgtggttaccgcagaacctatcacataatcagaatttgagtaagatggaatataaggaatcaaagaatggagaagagagtgaataatatctcacaaggactcgttgagaagggtgttagcacaaaatcgattctttttgggaagccagaaactgcagcgcttcttctccatttttggtttgctgcgagctcgcctggttcagagttcacccctccttgagtaaacggcgcttattttcggggagtttttccataaatactaaattttttttttcatgttttatttacaattttttttttgacgtagatgttttatttacattttgatgacctataaatttcattcttataaatttaatttttcaaaaatactattttaaaatttcatgtttagttcattataatggtaacggtagctgtaattataatggtaatgaatagatccattagattgtttgtttttctcttttaatttttgtaatccatttacaatgtaatacttgtcataaaataatataaaataatataaagtagatgagaagaaagaagaaga

SEQ ID NO: 395034 - DNA, 1233 bp, Cannabis indica
aaatcgtaacacttgcacacttcttttcgaagagtgacttacttgcaatcttcctcttgaagagtgtttaacttgcacttttccttccgaaaagtgtctcacgaacaattcttctcccaaaacttgatgaacaatatccaatgtgttcaacctgcacaagttcaacattcacaagaaacaatatagaataacacaataataaaattaagaacttgttgaactcaagctcttcacacaacaaaaaaactctctctaaatttgaaagtaattttagaaatgatacaacaagagagatagagaaaaccaacgacaagggtgtatttatacactttagaatccttctaggtcgtggtcaaataatcaagaaaaaatcaggttaataaatggaaaatcttcccaatcatgtgagtcaaaatctgtttaaacagatagttactcttttcaaacaggtacatagaaactagataattttttaacaaaatttctataaacaaataaggaaactttaacaatctttacacacacaactatatacaattttttggctaagaaattagataagaatcaaataaatataataaaaaaatttcttaaaaatacaaagataatatcaaataaccaataaggaaaacttatttttattcaccaaataaacaaggaatttgatttgaaagacttttcatactaagaaaagagtatatattttttaaattaataaatataaatacaaaaccattttcaaaatacaaaaaaaatattatatttgtctattttatcaattatgtcaataaataattttacaacattaatgatacatattgttattagaaccagaataattaattggagaaatgaatcagtttaaaatagtaaataatcggaaatattattttgatatgctctttactaaactgtatggaaagaaaaccacaatcatattatttttgtttacataactaagaaaggtaatcaaaaaggtttaatttgacaaaattatcattattagaacatgtaattattttttatttatagattttttaaaggacaatttgtcctttttatttttaattaacaaaattaaaattaaaataaaataaagttgaaaaaggaaaagggaaattttatttacaccccaaaaatttctaagtatatcccattttaataatttttattttatataaaatttatatctttaattgtactaagtatttttaatttttttctttcaattta

SEQ ID NO: 395035 - DNA, 1271 bp, Cannabis indica
gtaattgatgcaacaattttttcttaattgttcagactgtttctacatttccatccaaaatggaaagaatttgtgaaaactcaccgacagatcaattactccaaatagtgatatttgattttattttggaaatttggattaactgaaaatataattatattgtgttatgttagtaagtattgtaaatattaaaaggattggaaattttattgatagttagaaaaaatatttgaaagagataattgtgatataagttgtaagtaagtagcatagacggaatgagttttttagcgcaaaaatctaactcaaatttgtattcacaatgtatattaagtaaattttttaaaaattttaaataatttactatgcttaaaatagatttgaagttttttaaatacgtaaattgaaatatcaagagtattgtttttggtacggtaaattttttagaatttttcaaatatttacagatatgatattgtaactataacaaatgctactactatgaaaaaaagaataattactaaggcactattttttgtaaaaaaattacatttttacatttaaagaatttttttttacatttttactgtttttcatagaaacaatataaaaataacaagaaaactatataaaagtaatatgaaaatagcatctaaataacaacaaaaaatagcatatatataacgaaaaatcaacaccgaattaacaaaattacaacataaaaagacgtattctctgtaaataaaataaaaaatcgtaaaaatatttcaaattccgtgaaaccgtatttttgtaattttttgttgtttttgtgtatttgtgaaataatcccatgaaaaaaaatgagaagttgaagaataccctttttttatacattaaccaaatttaccttcaaatgaaatttaattccattcaaaaaaaaaaattcataaatacttctttttataagtattacatccaaattatcctcacacactcacataattaagacataatttcaaacataatagatttgtattctttgtaaatagatgtgcaggtttgtggaaaagttgaggtaaaattttgattagagaataataaaatttatcgtgaagtgaaagaagtaaaattagtaaaataattaaaaaaataggtaaacataataaatttaaaaagagagtgtaaaaattaaagacattaaataaaaaggcatatagtgtaatttcttgatattgtaactataacaaatactactcgcagggccgaccctgaaacaaagtgggccatag

SEQ ID NO: 395036 - DNA, 770 bp, Cannabis indica
gggctaccaaaaacaatatgcacattggtgacataagtagtatcaatcaatccatttaagatatcttcaactttgtagtctcatacctgcacagtctcaaaaatcattacaatgactatccccaggcaacaagggattgaacagctcccgatcttttttcttacgaatcacgagactactgattgtcacaattttgttaaaaaaacaacccaaaccctatattttccaaattagtgcataatagtagaccgaactcaatttagattaatttatttttttaatataaccaacctacacacaatttctagcataaaaaaagtgcaaaccaagttttcatttaacaaaagaaagagtcgatctaatcatagcttttgctaaatatatatggtccaaaataatatttagttttaggaaaaaaaaattaaaatggtgtactatatttcattctttcaataaaaaagaagccaatcttcgtaacaaagttgtatatatctaaataaatatttcaaatgatgttattcagaataaaagtttaaaaaaaaatgaggaaattatattgtatgcccactttattttatttgttttaatttttacttctattttcatatttttttaaatatacccacttttatggatgatattcccataagaccccttaagttatgtaaattatatgttatacttaagtagagagtgagagtatattaggcaatccactcaaaaaaacgggtatattttaataaaaaaataatatgaaagtatttttgatt

SEQ ID NO: 395037 - DNA, 1862 bp, Cannabis indica
agtagcatgatgagtttcccatttttgttgctatagaacaagctattatcggctttggagtgctgaaatccttgctgcagtaggaactgtttaagctgttcaaaccatgttcttggagcctgttttaatccatagatggctttattgagtttgcaaacataatctgggtgttcttcatctacaaacccttgtggttgattcatgtagatcatcttcggtgatttctccatttagaaacacattgtttatatctacttgctgaatatcccagttgtaatgagcagctagagtaaacaagattcgaatggtgcaaggctttactaccagactatatgtttcaaagaagtcaattcctcgtgtttgttggaaacctcgagcaaccaatcttgttttgtgagtgttcacggatccatctgcattatactttattcgaaagagccatctattagtgataatggtcatatccggggtaggtggaacaagtttccacgttttcttgtttttgagtgctgtgaactcattgttcatggctttattccatttaggatgagacaaggcttctttgacagtagtaggttctctttctgtccttatgtttgccaagtatactctcggtttatgcctttcttggatctagtaactattgggtggttattttgggtactgggaggttgtggcaaagctgatggttgaggatgtggagaggaggcagtatgaggttcaggtatagcagtatgttggtttggagataaagtttgtgaggttgctggtgtatgagactcagatgagtgattgtgactaaattcttgttgatgtaagggatcatgcaacggatgtgagacacttaagggtggattttgagtgtagttggtaggtggaaaaacatgtgtttgaggtataggataggcagtatagttgatagatggggtcggattgggattattctgagaattagatttaggaaataattcttgataatgaaattcagcttcgttaaattgaacacttctagccacatatatcctaccactagggtgaagacacctataacctttttgtgtcatgctatagccaatgaataagcacttagacgatctaaatgagactttgtgagattgatagagtcttaaaagagggaaacaagaacaaccaaagattttgataaggttataatctggtgcctctttatataatttttgaaatggagattgataattgttcacggggtagggagcctattgatgagataggcagcagacacataagcttcccaccaaaaggtgagaggcatgtgtgcttaggctaaaagggtgagacctacatcaacaacatgcctatgttttctctccactcttccttattgttgatgtgtgtgagggcaagagtttctaagaacaattccagcattttgaaattgttgtttaagaggggaaaactctttgccaaggtcagattgtatactctttatctttgtttggaattgtctttcaacaaaggcattaaattgattgaataagcttggtgcttcagacttagttttcataggaaaaatccaaacaaatttattaaaatcatcaacaaaacttatatagcatttgtatccatccatagaagtatgaaaggaaggacccgaaacatctgtatgcactaattgaaaaggaatagatgttttattttggacagatttaaagctgaattgatgcattttgcctagggctgagcatgggttgggttggccgggttgagactattttaatgggccaacccaataagatcggtttattaaattctaacccattcattttaaattttatgtataacccaacccaaaccaacccaatcattatgggttgggttgggtt

SEQ ID NO: 395038 - DNA, 810 bp, Cannabis indica
gaatggattctcaaggtgaaagagggaatcaacgagaatgaaccagtgaggttcaaagtcaggttagtggctaaagggtttactcaggtggaaggtgtagattgtacggaaatcttctcacttgtggttatgtataaaacaataaggttgatgttttccttggcaaagtttgaagttgaacagcttgatgtcaagactgattttctaaatgggttcctcgatgaagagatctacatgaagcaaccacctgggtttcaggtagaagagaaaggagtttagctagtgtgtaagctcaatagatctttgtatggtttgaaacaatcctcaaggcaatggaataagagatttgatatgtacatgcatcaaatcgagtttaaacgacctgtcatgaccaatatacgagcatgttcttattgctctatgtagatgatatgctcatcatgagcaaagataaatccgtgaataaaagtatcaaagagaagatcgaaactaattttgaaatgaaaaagcttggagcagtttaaaagatacttagtatcgaagtctcacgaaactggaaggaagggacttttagcttaaagcggtccaggtacatcaagaaaattattcaaaagttcaacatggaagatgcaaagagtacatatgttctattagggggaagtttgttttgtcaaaggaataatatcgtaatagtacgtaagagaaagaaaaaataaaggatgtaccttatggagtggttctaggatgttaaatgtacgtgatcacgagattggacatagctcacgctttaagcatcctaagccagttcat

SEQ ID NO: 395039 - DNA, 2077 bp, Cannabis indica
ataaaataagaaagaaaataaaaacaggttaatgagtatatcttctagtcgaataatatcacgactgccagaacagctcaaaatcattgctgtacaaggaacgatcttgaatctctagatttgccacatgccaattgacgagttgggattgaaatattttacacaaaaccagtccagcaggaaaaatccaccattcactttcatccctgagttcacaaccaccatggaaacagtcaaaacaaacatcgttagtttgtaaagtgctacctaaatgagaaaagatgaaaccctcacatgttcatactactccaaggaggaaagcttggatgctttttgctcgacgattgagttctatagtgcacatatccgcacagaaatgcgaccacctggttcacgaatcagaaaacatttcaaaatgacaaacgaatgtaatacataacaggaatgacagaagaaatgaaaactgtttttcaacctggaaaaacaaaaacaaagataccaaaagttttcgttgcaacttacaacattgactaaagatgccatgttccacaaagcatagactcgtgcaaggcctgccgaccgccttggtccatgactgaatagagcattgattccagcgggaaatgaaagaagaatgccgaaaggtaaaataaacaaaaccagaaagacgtccacaagagaaaaggaatacagctggagaaacgtaagcaacactaaactaaaatctcctaaaagtagcattgatattactaagccaacaagatcctgcaatcagacaaaaaagaacgcctcaaggagatcaacaaggttataaatataaaattttgatggtaagaaacttggatatctaggtttagaattagagatacctgatgtccgactggcttagtattatgaagtataaaagagagaagataaaacatatctctcttctcttcaagcatctgtaaattgttagcatctagtatccctccacatgctcttgtctgccttgcatcgttttcagtatctcctggagcttggcttaattgggtttcatctctcatatgactagatagattgtcttccaaaatgctctttacactgatgataagagattaaaaaggatatagtaagtattgccttgcaggatatgtaaatatcatattttatgatgccaggaaaacatgtacacaacttgttcatctagccgtttatgtatgcataaatttggtgaacctttataaggtactagagtgttcatattccaaatcaaccatacagcgcgatgtttacgacactgctaggtgtactactttagtaagagacttatgcacgtgcttactacaaaagtgtaaacagattaaaattaagagaacaaacaaagatctgcttacacttcccacgaagataatagagctcataaattattaccgtggcagctgtccaccttgtattgatccatctagatttctgataggcatccaatctgtctcttcatcaatagcatataccaaaagtccatagtgacaataaccacaagctgtggcctgaaaccaggcaagatctacgcgtatgccatggaccctcaaagcaggattcgcaaaattttcaagccacctaagaacaggtcgcaatgttactcttaaccgcccacgacgaactagacgcaattgtgcatttagaccagccacaaggcgataccatcgggtagggggaactgactgcaagacagacataagcgaaataaattccaatagcaaatgcaacaaaaatggttaaacgcttgtttcaaaaaaatttgcagtaactggacgagtgctgacagaaaagaaagtcatatcaggtatataagcaagctgccctggtaccaagtagggatgacaatttctgacacaacatgaagacaatactcaaaaagatggtgtaaaaaaagaatttgtgaacaattatgtcgaattcatgtttaagttaattgtggtattatctgtagaaactagggctgtacaaaaaaatttgtaaaccgcctaaaccgaataacccgcccaaaccgaaccgaaaaaaccgataaaaattacaaaccgaaataacccgaaaa

SEQ ID NO: 395040 - DNA, 696 bp, Cannabis indica
tctaaacaatatcatgctatatatgatcaaatagatttgtagttcagcaagagcgcttcgaactcagcctgcctaattcacggttaagaagagattcttgactctttcctttacaatgagactgttgcaacttacaataataatttaaatattaattatattattaattgaagcaattataaaataaaattaacgtttgctttaatgacacttgaatatgcttaatcgtttaatgatgttgattcatgtcttcgcgccttttatatattattgttactacgcgttaattcattaaatatgggaggtctgctttcctcgtgagttctgtaatgaagattgcagattgagtggggagagaaaatttatcccaataacaaaacttaaatcaatttaataattccaactgatttgatcaaaatcatgttatattcaaatatttacttaattcaagataccaaacacatattcttggaattttaatttgtttaatgatttatcattggtcaactctttcaggagaagtgttataaataaattgtcaatccactagttgattcattaatattaattagttgtttgtctaatagtaataactactctctgctctagctccactgagagtacagtatcggactgggatttagtagtactgtgctgaatatttctaaacttctagctacagtctaagctcttctt

SEQ ID NO: 395041 - DNA, 1544 bp, Cannabis indica
ttttttgtaataacaattcctacctctcaaattcaaccgtcaagttatattcacattattagtatataatataagatatttgtaaaaaaaatactaaaatatatgtagcttaattaagctgtttcgtacaactgccaagttatattcacattactataatataagaatttttgcggtaataatattcaaatcttttcgattgttacactttaatatctaaattttagttgtaataatacaaaaaaatttatatttagttacactttaatacctaagttttttttagcaataataatataaaagttaatattttgttgcaattaagtataaattgttaatttttgttgtgaaaagtgacatcatatgtctattaattttcttattcaggttatattttaaatacttttgtgcaacaaattaatgaaaaaatttgactattatggccataaataatcttataatatataatataaataattaaatatatgaaggatacaatgacatatattggtcccaaaattcaactatatatggcaattaacttctagattacactaactccatatgccaattaataaattatattattttaaaaaaatatatttatattactattattatttgttcttattattattaggtggcaattgagtatttttgcagaagagttttgctaactggctccaacaaattccaccatatctaccaaaagaaaaagaaaataaattttattaattttattacaaaataaaaaataaattaaagcttgatgtataaagtaataattattagtggaaaatatcatatacagatagatttatatatatacagcttaatatcattttagatcatgtattttctaaaagttaacgattagattttttattttgtaaagggcaaattaaattttgtattttctaaaatgacacaaaataatttctaacacaaacagctatagaaaatatattcagttttgtcataacaactctagattgaattattattaatttttgttttgacaaaaaaatcagtgcatgttattattttgtacaattttaaaaaatacaaattttaatttatcatttaacaaaacaaataataaaattaataacttttacaaaatacaatatccaaaataatatttatcatattctaatatacattaatttcattcaaacctattatttttaaaaaaaataaaaagtatagttaaataaaataattaatttacttttttattattattattaatttacatatatttcaaatgtccccagcacataatcagcattttttttattttacttagaattattattaattacttatttatctttaattatgggtaacgtaataacggttgtacggcaattacgtacacactcttaattaaaatttcttaacatatttaaatgattattattgtatatatatactaatactgactattgtaatttccatccattttattgctaattgcattaatctttattaattaaaactccattattacttataataaatatatatttatataaaaatat

SEQ ID NO: 395042 - DNA, 761 bp, Cannabis indica
cttcctcaacctatattctttatcatatattaaagaatattccttagaattaattctttacaccaaaaaaaaatgacaatttatatgataataggtaaaattacgtttagttaaacttaaaaaaagggaaaaaatttaaaaataactattttttgtagtctttaacacgtttttttttttttttaaggagttggtcttttaaaattgattaattattaattttaaataaccatatatatgttaagtgtcaaactaaatatcctcaccttttgacttgttgtaatttttttttttatttttttttttatttttgaaaacttataactttgctgcccataatatgataaaataaacgtttgcgagaaatgtatctagcttagttgatctctcttcgattctagacaacattgtttgtaatgattatgaagtttaactgtttgttttttggtattttcttatttttacaaaaaaaaaaaaagaaaaagaaaaaacaaaatacctcacctcaccacagctccttcccacttgaactaccctcaaatgactgatattataattcttttctagttaaagtgtatgtaaagatattctagaaaagacaataaaaaatatttttctaaaatagaaactaaactttctaacaaaaaaaaaaaaatagaaactaaactgacacccagaaaaaagagggaaattacaaaaaaaaaaaaaaatacacaaaaataaatgaatatacaaaaagtttggaatcctacaaaaataaa

SEQ ID NO: 395043 - DNA, 1105 bp, Cannabis indica
ttttagaggaagagagaaaacttgaactagaaatctagaatctatataatataattgacattttggaagaaattcaaaaattaataccaagttcgactttttagacagctatatatagaatgttaattcttcttagtccgtagaaaactaatgtaataaaaatgaggttatttcgtaaataatccaaaatgataaaaaaatttatatatttaccgatctacatttattttgcggttactattaatttattacaaaaatacgtaccattattttttaattatttattctaaaaattgttttttttaattattattttcatactacaattaatattatttcggtgaaaataaatttgttttcatttttatttttcagttttgtttttagtcaaattagaattttattaatttattaaattagtcaataaataattaagattgtaatttaatagaaacatcacttttaaaacaaaaatacgaccttcttgtaaaacaataagtaatcatattatcgtttaataaaaattaagaaaaacatattgtttagagaaaaaaataaataaacatcgtttatatataaatatacatatatatatatatatgtcagtttaaataattgttgacccaattaaactattttgaatttttgatggcacgtgagaaaagaaatcatcccaataatgacggtaattttttttattacttattgtaattttttgtttataattagtactacaacctctagattcattgcaccgaaccaaaaactttttttttgagcaatttgcggcgaaaccccttatgttttgatttttatacacttaacccccttatctttatttttggtggcaaaacccccttatgttttaatttttatacacttaacccccttatctttttttttgtggcaaaacccccttatgttttaattttttacacttaacccctctatcttttgttttggtggcaaaacccttcagtttacttttctttgcaaatttaaagttttagttaaatattaccgttaaatactaactggattactactgtatcgacttcgaggttttaccgttacatatacaaaggtgtatacaatggtcatccag

SEQ ID NO: 395044 - DNA, 926 bp, Cannabis indica
taaaatacacttggaacaatgtaaatagaattctaattaagtggttataactaaatacgggtatataagaaaaaaaatgccaaaaaacatcaaatataatgacatgtttaccacacagtactcaaaatcggaataacttaatggaaaaatgtaacgggataaataaaaaataatcataatcaatatttgtaatatgttgtttacttaattttttttttttttttttggccatacaatcataatgacttatcatgtttattttatcaagaaacgtaatcggaatacttaaattgacgaaattatctttttcagttaaactataatgtatggtatttattttgtaatacataatttaaaagacttaattgtcattatatatttaatattataataaaataaaaataaataaaagtcataccgttaataatgtcattcctaaaagattaatggtgatcgcgtgaaatattccatctcttttatccattatttatttatgttctttctcttctaattttaataaagtcagtaaataaatataaacaattaatttatattacatatgctaaacataccataactacaatgatgttaaacaatccttaacaatatattataattaaattattctaaaataaatataatatttatacatatattataatttataattaattaagaataaaattattaattctatgtacataaattcataagttacatatattgtttattaagatataattatactaatgtaaaggtataatttcttaatacaaaacttagaaaatatatagcagattaaaatttagaagttaatttttataatagctaattaatatttttgccccttcactttaacatgtatcaaattatattccctgaattttttaggtcattaaaaattcctcctaaactattgagattgt

SEQ ID NO: 395045 - DNA, 578 bp, Cannabis indica
cagaattcaaactcactatcccaaatgtccagctcgaactaatgtttcaatctcatctttctaataataacaatcattagtggtgtgacccttcctccatgatactcgcattctctattttgataacatctattcctccctctgtgtgacatccgtggaggttttctataatggaccatattgcaggttgctttgtagacattttcttgagtatcttttagactagtatacttagtgtactttagatcatactccttccttgtattctttgaggattcgttgcaattgtgccttttgccccctctttcgctcttgaaatggctcatagtgggttctagaacctcagtttttgcctgtttggaagctacacttcacccaatctgtgccaccctatacccaaaaaaattaggtctgtgtaggggcgagactataggtagttgttccataaatacttgtggaaaattgagttttgggaagagttaaggccgaagctaggaacttggggagtgaagtagggagtagccgtggaaggagttagtgttgggttttatgccctaaataatactcatttcaatata

SEQ ID NO: 395046 - DNA, 1183 bp, Cannabis indica
atatatatatatatatatatatatatatatatgtagaagaggtaaggcacatcccattccctatctaacttttctttctttattctaataatttaccttctagaagccaacccttttaatttgaaaccctttttaattataattattatttataattaattttagtaaaagaggaaatatttatatggaagaatcatttaaggttggtgacccacctcctctcctcttcacctctataatatatatacaaaagtcaagtgggcctttatttcctatgctcctttcatagtctcatacactactcatcaatcatctattctcattcttttaattaaccctaattttattttaacttgtatataatttaattgattagtcataagataagattcttgtgtgatgccaaatatcatattcaattcatatatgctaataataataataataataataataataataataataataataattttaatatatttttgtctacactacttgtcttgaaagacgtgtgtctaaaaatggatggggtctctattagattaggtacaccggaataaataaataaataataaaacgctatactaatatttattaatgctactccaactatatattatatatatctataatactattctaattctaccataatatatatttgtcttttttcttaatcaaatttcatctcacctcattacttatttatttatttaattaattaattaattatttatttatttattacttaaacaataagagaataatttgattcagctgaactaaaatcaccctccataaattataataaatattggaagaccaattaatccctttttcaattaactttttttatttcctatttttcttttctataaattttaacggtcaaatgacttttttctatttattttggttgggagagttgacatatataggcccagtttggcacagttgtgctgtgggaaaaagcagctgtagctgtgctgcgagaaaaagcagctgtagcagagctgtggaaaaaaagctaagctaagtgtttggtaaattataatttttaaagtgctgcgacttgttaagattctattataataacgataatattttaatctagttaattataatcacaaatatataaaaaaaatctatgttaatataaaaatttttattttttata

SEQ ID NO: 395047 - DNA, 643 bp, Cannabis indica
agtgtcctcgagctctaagaaacaacaatgccacttgctcgatccagcactgattcaagtataagagccctagctcatacaactgttgagatatcctggatagttgctcttctgcaagagatgcaattcagattattaaggtgtcctgttatctcatgtgacaaccttggagcagccttccttgttgctaatctagtgtatcatgctacgaacaaatatattgaaattgatgtgtatttttttcaagttatggttctaaacaaacaagtagcaattcattatgtgccaacctataatcaaatagttgatgctcttaccaaaggactctgtgttaacaggtttataagacttcgaggcaaactgcaagtggtaaattcttcctttcacttgagggttaatattgagactaatgaactagccacagaaagtataaaagttgagtgattaagagagttagagcctgtttggctgtatttttagttttcagttcttaaaattgtgttttttttaaaagtgagaaaagaaaaagtttttaatcattttaaaaatttaatggtgcttggcacaaattttttaaaactatttttagattttttttactaaaaaatcaatattttaacacctgtaatatcccgaaaaatat

SEQ ID NO: 395048 - DNA, 643 bp, Cannabis indica
aaaaaaaaaaaatgcttggtcgaaaagtctattggaggattgtcccctcacatatggactaatcataaaaatggcttcatcccaagatattaatgttttattactaattattattataatttgagcaatataagatgactaatgttgccacatcacttcacttttagagtgttctatttgaaagtaattgtgtaattattagttaattaattacacccttttttttaaaaaaaaaaatacaatcaaaatgcatttagatatgaaataataataatttcatttactcaatcaattgaatagaaatagcaactatagatcattgatttgaaggtaataaaataaacaaaacaaaggccataaatttacatttttattttataatcctacctactattaatcatcggccaagtggtagaaatataaataaaatatatatttgggtagattagaattttattcataagtaagcaataatatcatttgattaaaaaatcctaaattcttagaagcataaatttatcaaatcaaatatatttaaagggtaaataccattttggaccttatgttttacaaaagttaccaattagatcctgtattttgttaaatgacaaaatgaaccctgtattttctaaaatagtacaaa

SEQ ID NO: 395049 - DNA, 662 bp, Cannabis indica
acaaatcgttgcaaatatctcccttcagttatattttcatcatcttttaaataaattaattacttatatcgctaaaagtaacaagtataactgcagtacaagggcttatttaatagctctaaggctactaattaaatgcaataaaatatcaggtcccatttattttactttaataaagttatagaaaatcgctaatcatttataaggcgccacctcataatggtgttagacacctttgtgctaggcaccaattacaaactctccattaatcaggttacctacaattaaccattattaggctagagtaatccaaccctgagtgatcctatggttattccttcatttgcttaaaaattgtagagtattttttactaaaatatatgttgtttggatcctaaagtagttatattatatatttttatttattaaaaaaaattattattatttttcttgtaaaataaaaatatatattttctatatgtatatttatgccctcgaaaaaaaatctttggtgatatcctttttccctatgataatacctttgattgagtttaattttaatttataaaattatgaatctttcgatcttaagctttgtgtttaattcttgggtcaattttgcttaaagattaaattttgaaaaaaaaaattatttaattttt

SEQ ID NO: 395050 - DNA, 833 bp, Cannabis indica
caattatggagagagtgcaaaagagagtctccttagcactcctataactattaatggacaatatttattaaaatagttctatatatgatgataatgaatttaattttaaaatgttataataaatatcttcatatcaataaaaaattacggtaaaagtctttaaaaacattaatttgatgtagataacgttctcaaactcaaaaattaccgataattgtctctaaggtcccaattcttgttagtccgctaccctcattttaactggtttattaacttgttcaaaactaatacgcgtcgaagcattattggtacaaataataatttaattaaaaaaataaataaattatttaaaaatcataaaaaagatttctttttctttttctttttctttttattttttatcttttatcttttatttttctttttctttgattttcttcaccttcttcatccaacttaacccttacccctatgaccccgatccaccccaacctcatgacctacacggtcgtagtagtgttaattggatcacatctaatggatttagacccaaccgatccaatctaattatttattggatattgaattttgtcatctgatccaatccaatcgaattgagtcatctgatttgatccaatagatgtattagattggatcggttccaaccattggatgcattggctggttttttattagattggattggatccatccaatccattttagttaatttcattaaaaatatatataaaaacataatttaaaacttaataatccaacatatataataaacattagtttagtccaacctaattctcatgatatcataataa

SEQ ID NO: 395051 - DNA, 572 bp, Cannabis indica
aagaatgatcagtcattacacaacaacacattattacattctttggatttgtatcatagagaataagaaattacctttgctagtatattattaagaaggttgttgtgatgaatctttgagtccaaattctgttaaaagacaatgtaaaaactgagccagcagaacagaataatttattaatctcttgcaattatgaaaaaaaaatattgtgcaatatattagcgcctgaactttataccattgtaagagaaaattttactgcagagaattaatgtaagccaccaaaaggagaataattgataatgtctctaggtattgttcaatgaaaacttattaatttaatattttaacactttatttcctttagaaaatggttaatgaattgactatattattcatgtaattagcttatatttatacaacttaagaaaaactaaaatagaaaagtaccaaagcaaataggaaaaaaaataattacaattgaccctattttctagctaatttatagctaatattctaactccccttcaagctggagaataaaagttaatcatgcccactttgttacaaag

SEQ ID NO: 395052 - DNA, 931 bp, Cannabis indica
ctttattttaaaaaaaatagtttacttcgcctttgttgaagtatttcctcattcttgagctaataagtttgtttagacttatgaaatcttaaactattggtacagacatatgtattactaggcaagctgacatatgcagagaagacatgatccccatgaagaaaatagttggtttcactaacatgtggaatctaacacaagcagaacaaagttaacccagaaaatccagagggttgggtaagatcggaccgaatgggggtggcgggaatggggtctccacagatggaggagaaagtaaataaatttttgaaaaaaattattaaatataatgggatttataataatcattaaatattaaaataggattagtttgagaatattaaatttttctaaaacagaaggtaccaaagatatattttagcaaaacttgggtaacaaataagtgtttaccctaattatttttggcttttgaaatcttgggacaagatgctttaccattatttgtagattacataaatgagcaactttaccatcctttcaatacattttcttgtattttttattttcattttattttttgaatgaaaatgaagcttcattaaacagtcaaatcagccattgcaataaattaaagagtagaaagaatattgctctaagagaccatctaatcaaaaaactgagcaagacaatccataggaaggtgtcaatattgtgaacaagtataagaataatagtcatataagctttcaacaataaaaatctaaatcttctacatttttttagaaagggaaaattcggtggaactgtttggtttaccataaaaagaagaggaaattacactctatacccttttatattgtcctctttattttaccttctttttaaaatctatcattttacctctttattaaatattgtaccaattttgccc

SEQ ID NO: 395053 - DNA, 740 bp, Cannabis indica
ggttttttgttttattttttaagttcacctttattatgttttattagttaggcatccaaaaaatttagaaaaattacacttaaaattttttgagaaaagaattctcattttatgatagaaataattattttttgtaatatatatttagaaacttgtaaaatttatttacaaattcgtaatctatattttgtaaataaaatttgtatttttttttcaaatgtattgtatttttaacaattttttttagagtttttggatatttttaatatcccaaaagatattgcaatatatattatctaatataaatggtaacaaaaccagaaatctgaaattccaaaagttcacatgtgatcaataaagtgttctctctctttttttttttttttttggtgggggatttattgatagaaactttattacaaaagaaaaaaaaaaacattattgacattgtaagacaaatagttcttctggcttacccaaaagagaaaagaattattaagacaaataatttaaattgagaaattgaaaatatttattgaacaataaaaatacttttaaaaatgaaaataagtcaaatatgaggcccatgaaatggaggtactaaaaaacatcaatgtccatactaaattttacagagtcaatagtagtaattaataagggaaatttgaaattatatgcatattagggattaaaattggtattctaatctaaaactatacataatttgtaaaatgggataa

SEQ ID NO: 395054 - DNA, 753 bp, Cannabis indica
tacggaagaacatgactatgactactactatacatacattatagatacatgtacatatatatatagtgtgtagtaattagaattatatatcgaccacccattacaatttagttttttagagtttatttttcttacgaaagaaaaaaaaagtaaagaatacttcagagaacaaaagattggttaacagatccttgattttatttcatttttgactaattataggatcttattaattaatttttttttcactatttttagggtgcaaatttgatctgattaaaaggaatgatacgtttgacttattaccaagctgaccagttttttatttttattttttatttattttggtagacatttgaagtcatcttccgttagattaggacacatgagaatcacattcttatgttaattaagtgtatttgaatctctcttattgagtagttttgctttgaagatatgttaatatgttattcttaattcattataccctttatatatataaataaatatttatatattattattacgtagtgtagtagtagtgtttttatttaccatgcaaccaagaataatatctctcaataatagtactagtacttttcctttgttttattaaaggggctttcccttttattcacttatttatttatttattattattattaggggtttgcattttggttttattatttagagcatgtgatgaatgttagagattttataacagtggaagaaaatcaagatttattacaa

SEQ ID NO: 395055 - DNA, 633 bp, Cannabis indica
atttttatttttaaaagtacttggccaacccggttaacccaaacttacggacccgtgagcctaaaactcgcgaacacaaaccattttacgggtcgggtcgggaaaattttttttaacccagaacttgcgaacccgaaacctggtcgacttgcccgatattcagccctagccaaaacgtcccatacttgtattttttgatgctaaatgatgtgttgatatcacttaatcagattcaatgttctagtagaactgttcctcatttctccgaaatatccgtgttctgtgaaatcgggaagaatttaaggatatacggtagggaaaaaggctctagagagcccccctttagagcaaaagagattcaagaagtggtcgaggtaaataactttatttttattttataaacaaataactttattgataactggcatatatgatatgaccgaaatacaatgagtaatttatgttaaaaaaaaataataaaaaataaatacaatgagtaatatcaagccacaacagtattatattagcggtagcgactgttatagatataaagtaaggaaatttacacagtttactgtgttttttcattttctttcttttatactgttacactccaaaaataacttttgtact

SEQ ID NO: 395056 - DNA, 1026 bp, Cannabis indica
atattggtgggtctaaattcttcaatcttctttggttgacttttgcaataagaaaaatcagcgtctcatttagattgtccatgggaaaatctctgtttaacactagcagacaccttttgattacatcttcttcgactacactctagtatttgtgataaaatagtcctagaagaccatcgagcccagagccttcgacagttttaaatctttcacagaaactttcacattatcttctataaatttctccagtaacatctcattcatttcattcgtcgcttttgtttgtatcacatcagtaacacagtcaatgatcccagctcttggcttcatcgaagtaaagagctttttgtagtaggcttccacaatttcctccactattcctcatcatcatgccaaacttccatctcatccgagagccccaaaatttcatttttctttcttctcgttgaagctttatgatgaaagtatttggtatttctgccccctcccccctcccccaccttgagccaatctacacgactccttttcttccaatacttttccccttttctagtaatcaattcaacttctttcttacttttttcacattcatccaaacattatgatcattcatctcatagagcttctttaagttacattttacttcatttagctccttcttgtgctctttttcttcttcttatttcaactataaacacacctgcttagttttagctttaaatttgaggtcgtgccatctgcaatctctttactccatgccttaatcacaatatctatgctctcagcgccatcacaccaagcttcttcaaaatgaaacattgtgttcctgtttttccttctgcatttattctcctcaatctcaagattacaatttactacaagaacacgatgatctgagttgcaccaatccataacactaacactagcatttgggaaattttacaaccaatttaaattgcaaagatccttatccagcctttcaaaggtcataccattctcatggtcattgtgttgggttttatgccc

SEQ ID NO: 395057 - DNA, 869 bp, Cannabis indica
tgagacagctcatgctcttgctagacggggtttgtcttatatatttgtaatggtttgtttcgttatgggaggtgagtccctacgtgctcaccaaatttcttattttagctaaatgaaatttggtcttttagctaaaaaaaaaaaaaatatcaagttaatagtcacgtgacaatttttgatgggtctatattattaaatttttatttttatttaaaaaataatttaaatatatcaaagccagcccctgagaatatatgagcctatagcaatttaaattttttgggccttcaatttcaaaaatatataaaaaaaaatattaaaaaacaatattatgagactcaaatccaaactattgtgtaatgtatcatacacctcagctaactatgttgtttacaatacatttaattttacttaaataaaagtctaatgaaaattttattttttattttaggtccttagaaagtgtgggcctaggtacggcctagcccgtttctacctagcatgtctatgtctaggactaatcctacttaacacttaacgaccaggtacttacgaaaattctaaaagtataacttaattattattatcgttaaaaattaaacttaaatatttatcagcatgaatttaaatatttacgctataaattgctctaaataatgtgtagagtacgtatataatatttgtatctataaatatatgataaatacatgtgcaaaaggtccattaataattattatggtgaattaattaaaaatacaaaccctagagatatcgagttaataaggtagtctgcaatattattaattccattcattatgagatatatatatatatataaaaaaatgtatatatatatataaaaatgtata

SEQ ID NO: 395058 - DNA, 1600 bp, Cannabis indica
caatcatttatattgtttactttcaaaagaatgagaactttctttccacaaaatttggtaataattcaagttatatttagaaaaatcttgttacggtaaaggatttgattcgtaaagggatgaataagggaactggtaatattaatagagagcaaacacttttatttgatgctctgtgagttccaaatgagtcaatacagagttaggatagtttggatcctagtttggctaataaaaatgttaatagtctttttgtagtgagtgagaaagcttgggatgttgatgttgttaaagatttgtttgatgagaaagtggcggtcaatattcttagtattcccctctctaatttggttactaagaattactgatattgagagtttgactcttctagcgagtatacagttaagagtgtgtttaaattattataggtaaaccgtgaggatagtgtgaacagggcggttatggcgttttggaagaagttttggcaatttaaacttccttcaaaggcaaaaaattgtgtatagagggtagttggtgggtgtcttcctatgagggttcagttgaaggctaaacatgtggatgtctctttgttgtgtctgatttgtcatgggacaggtgaatcaattttgcactgtttagttgcctgtgattttgcccaaaattgttacaggtagcgagtttggctatgatttcagttgatgcagggtcatttggggactagtctcttcattttttctcacgactgggtgaggaacaaagtgttcaggcggtgatgttggtttgggcaatttggttcccacaaaatcaactcttgtggaagggtaagaaaattcgagtggagttcgttgccaatttggctcatatcactcttgatcagtggagaaaagctcaagaaagagtttgtttcctgcatttgatacttggtatctttcggatggagctaagctatggtctaaaccaagttatgaaaaactcaaggtaaatattgatgttgtattgtttaacgagaagggaaggcatggttttggtggagttgtttgggtcacaagggtcgagtcgtgactgggattacaagattaaaaattgggcaagttcttccaaagattactgaagccatagctcttaagaaagtgttatcatggttgaagcgcgattttccaagtgttagtattatcgaatctgattgtctgatattggtacaagcggttagaaatttgaatgttttgtcatccactttttgttgtatcgctgaggattgtaaacaacttttattttttttagtgatgtttctttatattttgtcaaatggtcggataatcaggctgctcatcttatgcctagagcagcttgtttatatgctaattgtattttttcagagtgtaatctcccatttgatactgctgatattgttgaggtccacttaatctaattgaataaattttacaattaaaaaaatcatttatattattttggagaataaatagaagcaaaaatctataaatgctatttttgttattactcttttttttcttaatttttaaaaaatctcatatataatattataaatttaatagtattatattgtattaggtcgtattgt

SEQ ID NO: 395059 - DNA, 1787 bp, Cannabis indica
tttaaaactaactgaatagtttacagtatcaaaattagaattcttgatattcaagtttaccacgtgttcaaaaaaattcaaatatcttttcggcaccataaagtactatttacatttaacttttaaaaaattataaaaattaatgatgttgtaataataatgaacaccgatataaaaaaaaattaaaaaatacttcgacatgtgtttcaggtagtggccgattcatgatttaaagtgaggtggcgtgatttttttctaagacacgggcaaaaataaacttaaaaagaaaaaaaaataactattggtgagattttaagccttgacctccattatatatatatatgcaatttaacttaactattaaattaatattatgtccataaatattaaattttattataaatatatatatagtaattaattaaaatatatactgtaatagaaaattcactcttctatataagagagagggtctacataaccttttaataaacttgtatacccaaaatcatatgtaagaatattttacagcacaacttggaaaagaaaatcatatcaaaaattatgattatgaaacggatgggatgacacgcaaatctaggcaggagtttaaaatagcatatcataacataatgtcgagagatttaaatgtaaaccgtactaatatttgttagagccaatggccaatgtctacaccgaaataaactaaaaaggaataaaatgccaatgaccaatgggaataattaatatctcatcctttggatccttaattaattatcctaaaatgactaataagccatttatagtgatggtttgatttttttgacacgaatcgaaacagcatgaatttggaaagcacaaataaataggatttaggtatgacactatattacagattggtataacatgatacgaaaaatatatccttaagtacaacaccacacaagaagttaaagacatgacacgtaagcacaaataaactaacccgaaaagtacgacacacagtaaatccgaaaaatacaatacgacataagaacaaaccttatagttaataaataataataataggatgtgaattttcatcaatatttatataagttaaaataataataaaatctaaatataatactaaatattataattatatcattaaaactcctaaaacatgaaaaattaagattgtaaattaatttatgtatagggtatgatatagaaatttaagtatttataattaaatattcaagttgtaatgatactaataatttttttatatgattatctataaaatattgttaaaaagttatataaatataactaaagctataaaatatacatatgttatagtaattgttaaaaaaaatataaaaaagtaaaatacgaatttaagctcagatataaaaacaggttgacctgtttaagaaatatgggtcgacatgagcaaagcatgacacaaatcgtaacatggcacgaaaatattagacctacgggccgtaccggacctattctttaaaaatgttagtacgacatggcatgacttatatttttttgtggcacgatatgacacgacttatttttcaaaaaacacgaataaatataagccggactaacatgagacttacgaacttagaatactaattgcatatatgattccataaacacgtaatgggtagtttagtacatatcaagtttttttactggtaaagttattttagttgcgagagtgttaattttattttattaaaaggaaacctacaacttaaaaataaattttaaagaatattattaac

SEQ ID NO: 395060 - DNA, 532 bp, Cannabis indica
ttatgtctttttaaaagtttgttactaactatggtgaatatataccctcaaaactttattgttataccagtaataatatttaagaaaacacaattcaaattagagctaacaacaaaatcaaaaactacaacttagatgaaattagacaagaataaacttaattggagaatgaatgaattaagaatctttattgattcagtagtcagtagtatacaattggatatgtccaaagattacaactcaatacagtaaacagttacaaagaaatgtctcacactcatgagagaaatcactttatgaatgatactcccattacatcgctccacacacacacacacacactcacttttatcttggactctctcactccaagcttgattctgaatctaaagtatgagccataaagattattaaagagactagagacacttctatttatagatagcgatattggcggctaaactgttatattatttataataatataatatatagattaaatatatgtaataaactaataaaatgtaacata

SEQ ID NO: 395061 - DNA, 558 bp, Cannabis indica
ttggtcttagagggatcccaagacacgtgagagggaactctccaatagttaggtttatcttttgagcaagaggtatcggctgagagactcctccaaagtaaacttgagatttgacaaagttgatcgagagacccgaggacttgctaaactcatcaagcaagaccttgatagcatggagagaaccctcatttcctttacaaaatattactaaatcatctgcgaaacaaaaattagtgagttttattttttactactactattattaaaacataatgaataagctatatatttactttgaagcctcatcctactactactatatattatgaaaacatacatgaatgtgctatatgttaataaatactatataatgagcctgcactaataatcaataataaatcatgttcatataaatcaagatcaaacatttaattttaaagtattagcataataataaatatagagaaatttacatggtatattaacttttgctatttttttataaaaatactgccaggcggtattttttttactttttactgtattttttttataagt

SEQ ID NO: 395062 - DNA, 955 bp, Cannabis indica
aaaaaaaaaatatctaagaaaatgagaaaataaaggatacgtgcttgacaggcgcgttgatgtggatgggtctggtttttttttttttaacaggtgattatggtccacctgccaactatacataaccaaattaaggaagaaaatttgaactaaatatatccaatgatcatttatattattttttaaaaaaaatgtagacaaatacaactacataaacagttcaaattttgttggaataattattttttcattaattattactattaaatttatttaaagatattaatttttatgttcctatttttttagaaactaataaatatttggccatacaacctcttgacggtaaagattcagaagttggccaggcagaggtgcctatggccgaccatagtgttagaaactagttgctggagaaaataaaaagaacgaaattacaaaattagaatttgggttgagtcgcggactaggtcgctctctttaagacgttcgcgacactgcctagatttgtgcaagcagactatcagcctcatcgtccccaagataaaacagtccagtcgaacacactgtatcagaactctattacacgatagagtactgtcgaaatactacacccaaaaccaactactgttcgaaaatataaatatgtaatatagtagtatgtatatatatcgtataatttttcagagtgaaaagatatatttttctcccactgttcagtcgcattatataggccatgcgctgaaaattgtaatgggaagaaagacgttactggatgggaacgttggaacatgggatcgtgggaacgatgcaaaaaatcaggaagatgctataaatcaggaagcctttgtttattgattaatcaaacacgtttaaaaaaaaattgttttaattaatttaataaataataatttaataaataaattttcttccaaaaaataaggtgacaccacac

SEQ ID NO: 395063 - DNA, 338 bp, Cannabis indica
gtcttagtttgttggacattagggtattttttttttttggttcttttaaaaaaataagtgttatttttaaaaaattactaaaaatttatttatatttttaaaatgattttttttttttcgattcctgaactaggtggaccttaactacatgttccgtttagtccaaagatctatagttttgtaaaaaattgtaaagataaaataaaacctaataacgaaataagatgataaaatattgtcaaaatttatgaatttatgtaaactttggttggaaataatataataaaataatggaatatagaataaaaagtagaatgaaataaaattgattttttttt

SEQ ID NO: 395064 - DNA, 1742 bp, Cannabis indica
ggctctcttcagtattataatgatgagaatgtgtgttgcaggtgagaagtatgagaagagagagagagagagagagaggtttatgccttagtatttctgagcttttaagtgcatgcatgaatttaggttgagttcccttttctttaagggttaagaccctttatatagtattagagtttataaggtgttgcatataataaatagaaatatccttagaaaatagaaaagttacattctggtgttgaatccctaaaattttgggcagattgaaccgttccgaagttgtaggagtgctgaagatgatttggaatcttttaaaaggcttatgggagaaaccacgacccattcaggctgatcagaatttagtacacctcttggccggccaaccttaattgaaggttgtccagtacatactgtcatccttggctggccagctaaggtccagccagggtcttgaagacttgcttggttcttcttgtttgattccttcttgtgatcttgatatcttgaaggttgaggaatcgtacaacactaccttgtttacttagtgatgagttgttctctacttgtcttttgcttttggccacgtggaggtgccacatcaggtaggtaaaaattgggataacatatagataatttgatagcataatagctctcttgggaatatcaaattcggtctcaggatagtgaatatgatccactatttatggggagaaggatgtagagtatttatatttaattacataataaaactttgaatatttgaatgagctaatcccacgaaatcctctcaatcactcaattataggaatattgattgacctatttgtaagaaaataagttgttggaataaatatgagcgtttcctcctgtgaactcgctggtcagacgttttttgtgagatggctcagttgcttggactactggtcagcataccctgtctagcatatgcctgatgctggacgactccatctggtctatactgtcgaccaacggcttttggagagtctcctcgaaggtccctcgtccgctcaacctcctccatgtttgtcacgccacaccattttatgcctaattattagagtgattttagaataataataataataattaatgattttttgattaaattattattacactattaaaaatatttgcataaaaaaattactgtaaatttctgagaactgtaaacgaaaaataaaatataaacttcggcgtctagttcactatgggatggaaagtacaaataataacatttttatttttattttgatgaaagtaaaataaaaaataaattaataaataaaacaaatcttgtttgccaagtaaaaggacttttttttttatgaaagccaagtaaaaggacttgaaataggcatatcgaatagaaaatagccacgtggcatgagaggtatggcctacttttgtaggtgacagaggtgaagacagtctctctcacactttcttattttataataaataaaaaatctgtggcttcggctttcgtagcacgaaaactttctataaattgcatgcaaatgcagatcctaacaaatctcttccagtcgcgctatcttacataacaacactctctctcactccttccggtcagtcaatcctttctccaaaattttcccaatataattaactcaaattttaattcttttctcaaaaaataacgaaattaatttatatacaaacaaattctttcgaaaaattaaaaacgcaaaaaagaaaag

SEQ ID NO: 395065 - DNA, 675 bp, Cannabis indica
acaattgaaagaatctaattctgccttagtctctacctgatgcttgcatggaagatagcagagttgcgatctccattccgaatccattcgaaaatagggtttactattttagactctatattttgaagaattactgattggaccctttgtttgttaaataacaaataaaatctatatttactataaagtaaaaataagatcccgagcttaattttgataattttttaatacaaacaacttgaagataatttctaacatgaaaagatgtagaagatgtaactagttttgtcataacaccattagagagagatatttaaagtttattttgataaaaaaattagttcagagtattatttagtactattttaaaaaaaaattgagtctaatttgttatttaataaaatagagagtccaatcaataatttttacaaaatatagaatccaaattaatatttaccctaataactattatacaacaaaactatatatcttttggaaaaatagttatttggcccgtatttcgcgtgaatatgcaattgatccctatcactataaatgacaattgtattttgggtaaatattattctagaccctgtattttgttaaatgacaaaatatgtaaagaccgcttagtttaatttggaaattagctgataatcacgtttaattatgaaa

SEQ ID NO: 395066 - DNA, 1452 bp, Cannabis indica
tgtgcattgaatcacaatgctaaaactgatgcaaatataacacaaaatatcttttcgtgctaaatatagcataattttcacatccctcattgtaaattgtaacaccctactagtttaggcgtgttaacatgatttataattcaactgtgcatctcgttgctaatcaatgagtttattaaaaatcgtgaataattaaaattttatttaactatctataattatcaaaataacatacttatattaaccaggatcccatttaccaaaaatatttataaaattttcacagtgcgtaataaaagtttgtcgcctagcgaccatacaaaatatgcccagctgtcccaaagaccgtacgctccagacctaacttgcccgacatatacaatctccatctactcgccctcacggctgctcaaccttagtcttgcctttacctacacatgcaaacaatatctgtaagtcaacatactcagtaagaaaagcatagataatatcatagcaataactcggattataatcaggcccccatacatccaaccataccctatcactgtgtccaacatggtactgagtctggatagttcctacgacagtactattgaccataatatcagcctatactcgatactctagtcatactctagtcgtactggtgtgatagcgtcgatcccgtacttgagcgaaacatgcatctatttgtatccaactttatgtatactgataccgctatcaatgtaatctaatagactacataaacatgcacgttaaacatgtaaatacatatgcatatcattatactaatcttacctcattgttgagttcaggtgtgccggccaacctttgtggaacaactgctcaacgaattacaggcccctaaatcacattagccgtaaaactggtgagtgacacactaaatcacttttcgagacttaaaattgaaactaaaagtttccttgtcgatggataacatggcaataacctaaatgttgctaaatctacctattctatctgtccagtctgactggcgtaaatttcaagctctagaaccttacctcatcaaaaatggcatatcccatagactatcttgtcccaccactcatcagcaaaacggtactgctaagagaaaacatagatatctaatagaaattggccttacattacttgcccaagcttccatgcctcttttcttttaggatgaaattgttataacagcctgctatgtgataaataggttgcctacactagttatagccaacgacactctgcacaaattaattcacaaacaacctgattactctactctcaaagtgtttatttgtgcatgttacccatgttggaaatatattaccaggatctagatttactaccaagtatgtttcattaacatcctaatatgaattctaaaacaatgaaataaacacataagagtttaagaaaaccttacattggatgcag

SEQ ID NO: 395067 - DNA, 948 bp, Cannabis indica
tttttttttttatttctcttatagtttcacttatacatatataatggcttggctttgttccatgccacatttctcctagatggaattctcatagggaaccatatgagatgtcatttcctttttggcaagcatcctaattataatgttcgcattatgtatgaatataatacaatcacaaatataattttatactcacaactattaattacaatctctattaattattactaaatagcaataatgagataatttacacttatatatatacataaatgtgtgataacactataggttgactaatcattaaagtatagttgaccatctctaatattataaaacttcaatatatataatatattattaattaggtttattattatgatgcaaaaaggatttgctaacaatatttttgaacatattcatggctgaagttgcaaggtattccttattcaatacatgatattacatgccctaaataaaatgttgttctcgaatgccctaaataaaatgtttgatctcgaattctccatagtacatgagcattgaaattagaatctaacactacactactattcgacatatcacgtaaataaacaattttcataatctgattaatctaacaataaattcttaatttcttaagatgtacaacaacacgttattagccttaaaaaggtacttagtgcaagcaataataatgtggcaatatgtaaataaaaatagccatatattttggtacaagtacatacactaacattgatcatggtatataatgtatatttcaactagaatataattggtagcgtagaataccggcaccattactaaattaattattacaacttttgacctctttttataacttttggaaatattattccttctaataagctaaattaggctttttttgcgtacatatttggaggactctaataataataataataa

SEQ ID NO: 395068 - DNA, 865 bp, Cannabis indica
cttgcacttttggcccactaggtttacgcccccctttactaaagcttccagctggtctcattttttagtgacaaatacactcttgctgacgtggacagctaaatctcgtgtttccacgtcactgccagaatgctgaattcgtttcagcattgcttcagcaatctaccccaatttcagcttttgttcccacttcctccttgtttccttttctttttcctatcaatttaattcttcttttttcaacaacaaacaagcacaattaattagaaaaacacacctaacaatatcgatttttacaagacttaaaagttagcttactaaatagaaaatgaaactaaaactaactaaaattaagcaaacaaatacattttcattactcttctcacaatacttttagtttaaaagcataaaaaataactctacaccataaatttatcaatagtaaatctttgaagagagaatgcttaaagtaaggattagtcaaaattttgttaaactactctcaagcaacaaatatttgtaaattcttgacaaataatgttcaagattttgttactggtttacgtttgatcaataagaaataataattatttgttaatgaattatttataggatacttttataaaagatgctaaatttgaagtgaagtacaactcaaaattagtagtttttctgatcattgctggactattagtgatcttttttgttgaaaacttcatgctatacaaatatgctgtgaagaatctccctctaagaaagaccaaaccaagatcgatttcgaaaaagaagataaaaaaggagagactgctcaagcagggagagtaaaaaacagagttgtgttgtgctagtttgtagtactttaatg

SEQ ID NO: 395069 - DNA, 772 bp, Cannabis indica
tctagctgccaaaccaaataacagttccaatgctaattaggccgaggacaccaaaacacatactaggtggtaatcgtggttattcatcttagtataactggcgaggaggtggaaaaggtagaggtcgtggtggatccaaaaactcaaagcctacctaccaagtgtgtggtacgtatagccactcagccgcttatgttataactagtttgatgaggcttatatgggacatgatcctagagtccaacacctcaacaacaaggtggaaatacaggcgatcactctgcctttgtttcctctttagaggtggcggataataatgtatggtatgttgatagtggtgtcagcaaccacatcacctcggatgtatcaaatttgaatttgaaattagattacagtggtaagtagaaactgactattgaagcaaatgagagaaaaaaatgtgtcggtacataaaattttaatccaacaatagattattgaaccatggggctaacacactcaagatttcaattcctatctaacaaacttggaataaaaatgtcacccctttgtttgagaggtagtgtgaatgttgattaaggtgcactacacctttgttattctctgctacactcaattagtgccaaatcaaattatgatttgcactacaagaaatgtcacttttaccagcacagttcgctactgcgctggtaaaagtaacttttaccaacgcatttcgcaaactgcactgggaaagaggtcaaagttttaccagtgtacatttgcagtggct

SEQ ID NO: 395070 - DNA, 745 bp, Cannabis indica
agagagagagggatagaaaattcatacagaaaagggaagagagaacttactcattgttctgcttaacatgtatagaaggaatcttcgagaaaaattggtttgcacaacaaaatctctgagaaaaagctcaaacacttgaagaacatctctcctttttgctttgaagttttgaagatgttatagtttcaaatcaagcttccttgaggtatatatagtagggttggcaatatgagtcacaacacgatgacacaatcaaaaacgacacgaaataaatgagtctaggtgacatatttaataatggtgatgtgttcgtgtttgagtttctgatacgttttgtaacgtcctaaaccctagggatgccacacatgtgctcttgaaacatagtttacaaatagtagattaactatttaatcaaattcgtgataataatttaaacttcactacaataaaatcatagcaatgaataggatgacatcgctaaaaatttatttcggggatccccaattacaaaagttttacagaaatggctatatacgaaagtaagtcaaaatacacatcgggtacaacccaaaataactcctgacaacttgaccacacaagtcagataagacgatatgtacatttttcgaagaaaatttttcatctcatggttgtcctgattttcccttgcccttacctacacttcaagtcacccgtgagtcacaaagactcaataagaaaagcaatataacagcattcatataat

SEQ ID NO: 395071 - DNA, 790 bp, Cannabis indica
acaatctcaatagtttgagaaaattttttaatgactgaaaaattcaaagcataatttagtacatgttaaaatttaagggttaaaaatctaaattaacttattttatatttatgaggaattataagaaaaaaaaatatagaaatttatacaatttaataaacatgaccaatatattttttttaatagataaaaatgaaaaaaatatatatatatatattttccatcaatattctttaaaatatatatacaagtgaaattaaccttttatatactatcataaaaacttatttaatatttaatatgatgtaactgttgatatgcttaaaaatattttaatatgattatgattaagataatttaagctgacttttgtatttttcaaaaataaataaaaaaattaacagttaaaatattattttagtaatttattattaattaatttatttattttgctatgtcaaaactcaaaaatccaaacatttacttggagcctagtataataagcgttacaatacttttatatatttattatttattttttctaaaaataataataaccgttagatgattattcatcatttaatctaatggacaacaaatatataactcttctcccgacctatagcaccccacttattttatttttatttttatttttttttataattagaaaaaacagtgagagtaagatataccactgactgcactaataataaaagatttaattttttattttattttttctatataatttcccataactatctcttttatttctctctctctctct

SEQ ID NO: 395072 - DNA, 607 bp, Cannabis indica
gattatgttactaaaactaactagctaactaataactaaataaaaactaacacatggaggtataattaataaaaccttttcagaaattaatatttataatattttttatcaaatcatgttagtattaggttacagttaatttattaattatttttagtaaatttttaaattaattacaaccgtctaataataattcaacgactaaaagtaaatgtaactttcatgattatatttatctacaaaaaaaaaaaaaaactatcatgattatatattaattgtcaccattgaaacttgcttcatatgtatatactactaagatttatacttgtatctgtttggttagaaaaaaataataaaatctttaaaggcatcgagtgttcattagaggacttatgggaaaaaatcagattcatcctggacgcaacttgggtgtacaagacaatattttgagcatttatcattcttagatttaattagagaatgaaaaactttgatgcaattttcatatttgtttggtcagatgagtatcttttactcgtgtgctattttgggttatgattgtttgagtgtctttttgctaacacttatgtaaccatggttttcctcc

SEQ ID NO: 395073 - DNA, 675 bp, Cannabis indica
ataatcgctagagaacaatgcgattccaagaaagaagaaatgagagaaaattgtgaattaaagaattttgattttgtttgttttggaaaatttatggcattttgagatatttaatattgtaaaataattatattttattattattgatattatttaatataaagcttcaaatattttaatttatataaaaagaccgctaatcactgaaatgttatttttagtgttagatatttttctaatttaatacaaaaaagaaaaaaaaaatcatgaaaaaattgttatactcagaaaatgttattggttacagtgttggcacttttaagtactatcaagtattttgaagaatttattagcaagtattggtgggggatggctgttcggagttggactgcaaatcggtcaagatcacaagtgttgattttatttgatatagacataaagtaagcaatagaaattaatatgcaataataatatattatatatgtgtgccataagaagaaaatgccttgacaaatggggaaaacggatcatggaataaattatatacaattgatctaattattagaattattaggcatgtagattttagtgtcaaaagtcaaaacaatgttgaaatttactcccaaatttagcataaagctaattacacctgactaacatatatatatatatata

SEQ ID NO: 395074 - DNA, 694 bp, Cannabis indica
gattgcttaaggccatataagaacttttttaacttacaaactatttcttttccatcaattttcacctaaaatccaagtggttgctccatgtatatctcttcttctagatatccatttagaaacgcagttttgacatcaagctactctaattctaaaccttgttgagttgccattgacaacataagtctaatggtcttacacttcactacaggtgagaacacctcgtaataatctatcccttctacttgagtaaaacctttgacaattaatcttgccttaaatcttactggctcatcctctgtcacactctctttaatctttagaatccatttgcatgagatcaccttcttgtcctcaggtcttggaaccaagactcatgttttgttctttctaagtgagcttaattcatcatccacatcccgagactattccttcttgtactttccatttaaagtctcttctatgctcaataattgtgtatgttgaaaaaatctattatatttgtacacattaaaaatgagtgtatcaatacatcctttcatccttttaatatttaaatagttttaattttaatttattttatttttatatgatagtactcattgtagttacataaacaaatttttaaatttttttaatctcaaatttaaacaatatgtaggatacatacttcttttaaattatatgcatgtga

SEQ ID NO: 395075 - DNA, 2143 bp, Cannabis indica
attacagaacctacttgatctacagtttatgaggccgagtacctctacttggggtgcactagttttgtttgtgaagaagaaggacaggtctttacgaatgtgcattgattatcgagaactgaataagttgacaatcaagaacaaatatcctttgccatggatagatgacctgtttgaccagttgcaaggaaagaccatcttctctaagattaatctttgatatggttatcactagttaaggattcgagaagaggatattccaaaaactgcctttcgtactcgatatgggcactatgagtttctagtggtgtccttcgatttgactaatgcaccagcatcatttatggacttaatgaattggttgttttaggaatttctcgttaactttgtgattgtgtttattgatgacattctagttctaaaccagaagaagttcatgaacaacatcatcgtatggtattacaacgactctgagaacacaagctttatgcaatgtttaagaagtttgaattcttgttgtcccaagtaagtttcttaggacatatggtaagtaaggatgggattctagttgatccagtgaagattgaagctgttcgagaatggccacggccaaagacaccaactgaagttagaagtttcttaggattggctaggtactataggagattcgtggaaggttttgctaagatttctactcctttgaccgagctgacttgaaagagttgtaagtttgtgtggactgataaatgcgagaataactttcaagaattaaagaagatattgattactgcaccagttctgagcctgctaatttttgatgaaaagtttgtgatatactgcgatgcctcaaggcaaggtttgggttgtttgttaatgcaatcaggaaaggccattgcctatgcctctaggtagttgaaggatttcgaacaatgttactccactcatggtctagaactggaagctgtgattttttccttgaaggtttggcatcattatttatatggtgagaagtgcaagatttacactgaccacaaaagtctgaaataatttttcacttaaaaggatctgaatatgagacaacgaagatggctagagttagtcaaggattacgactgtgaaatcctctaccatcccgacaaagtaaatgtagtggcagatacacttagctggaaaggtccagggcaaatctacaagttgaaggaaatctctccaagatggaccgaggatttggccaaggccaagattgagtttgtagtcggaaagttggcaaatactacgttgtagtctgatttactggaaaggatagagattggtcaacaaaatgatctcgaattgatcgaacttagtaagaaagttgagattggcgctacaaaggatttccttgtggctccaagtggactattgagttataaggaaagaatttgtgttccaacagatgaccagatcaggaaggaaatccttgatgagttccataatacttcgtactccctacacatgggaacaacaaagatgtatcatgacaccaagacaatatattggtgaccgggaatgaagagtgatattgttgaatatgtttcaaagtgtttaacctgtaagtaggtgaagactgaacatcaaggccgacagtagtaatttaaggtatcctacaaaattttcagaatttcggaataacttacattatagaaatcgatatttagacagtctatttcacacgcatataaaataaaataatcacgcgtgtaacacattatttgaactttattttcgacgtgtgttttgaatttcttaaaattttacaggatgtcttaaataattataacgtacatgaaaatgagaaaaaaatttgacaaaaaattatttcggataccaaaacagataaatgtgtatcagtgtatccattttaaaggggtgtattgtagaattttcctaatttgtttattaatagtacatttttgttgatacattgtttgatactttacaaaagaaatacacaaatatagaagtaaaaataattattttttaaaaacaaatgtaaaagtgattttaccaggaagagagcatgatctaggataagttattgggtttctttttgaaatttttacaccaaaaatacaaaatgaaacttttattacatatatactta

SEQ ID NO: 395076 - DNA, 688 bp, Cannabis indica
taaaaataaaaaagtaaaaaaaaaaaaacatgttatgtatgaaattgttcttttgtagaagaaaaaaatgcacacaaaaagaaaaattgttttgaggataattgtaattaaatctttgttatctttaataaattaaagtggtgtttagttattagaggtaataaatgaaatagagtggttagaaaataatttttttgtcatttatttatttatttatttttgttgtattttaaagtattataatattattttaatgaaataatttttttaccattttagtagaatggttattctattttgaaatggaaaggaaaataatttcaatacaaggtaagaaataatttaaaacttattttaaaataattttaaagttaatttcatttcattcatattcttattaccatattctcattcttattccaatgttttcattcctctcaatctcataagaaatatcaagatccagactacttagtagtgacgctaaaaaatggtcaacaccaactcattagattagcgaaataaataataagtttaagtaaataatttagacaaatacataaaatttatagtatttcactccctatgtcgtagtggtaatggaactacgtctacttcgagtttttatttctcatgagaattacaaaaaaaaaaatagctaagtctgaaagctctaatttttagagag

SEQ ID NO: 395077 - DNA, 1267 bp, Cannabis indica
aaaaaaagattctctcttattttttataggaaacatctttcttttccctaacttgttttatttttatttttattttattaatataaaaagaaaataacaaatatgctttcaaaaatcaaaactctataaataaaaaataattatatgttctaactatgataattttatcaaaataaaatattacgattgctttttttaattatgtaaataaaataatatgattttaatttttttccagacaatttaataaataacataataaaatattttctattttaaacttcaagtttattaaacatggcagtatagagtgcagcatgactattttcaacctaaaattaaataacaatttattctttcctaaagcaaataattaacaccttgcatttggtaggtatatcgtgtatgaattgattattgatgtatctaaaagcaagaatattgctttataaaatggtaattggacaaatcactctcaagtactaattaaatgataattagcggcaaattcaaagtcagatttaccggtggaattaatcctaatttcccacaaaatggataattaataaaatcgattaatggaagaaaaacggatacaataataattgtaatataggtagcacatacttcaaagcgaatccatgtgatatcaattagcaataacgacgaaaattctgtacggtgccttgaagtgaggacccctcacaccacaggtgtcagaaattgatgtgacaagctccattgctccatcatatcagctgaaactatagttcaagcttgcaaatttaaccatacaaaacataaactaaaacactatttgggttttggtatagctacaactgaatttgatggaaacattgctgataaacgcttgaaggaactggccaaaatgatcattaatttaagtgaaaatgatatgtcactaaagatgccactgcgtgaactgcagccacacacggaagaactgtacgaggcacagccagaagcaattaataatccaataaacaaagccatgtggaagttcctctgcaactaccgcccattcttgctccttttgcttccctttgatttgttccctctcttttcggacttcgacttggtcttcggtttgtgtcttacaactctcttcattggtttcttcggtgccacaggcaccttgagcttttgattagctgcaattggctgcacaaatggtctttctctcctttcacggggaacaatatcgtcgtcctcacgagtgatttcgcttgttgtcactgaaacttga

SEQ ID NO: 395078 - DNA, 1023 bp, Cannabis indica
caaacaataatctaaatttatttctacaaaaaacaaaaacaacaatctaaatagtatttcatttattattcaaaattactgtaaatgcaaataaaataaaataaagaatcattatttccttttttttttttgatttgacataaaataaagttgaattaggaatctacatgtatctaatttagtaaacaataacaataaaatcagaccaagatttttctggggtgagaccaaataatcaaatatacatacaacagatttgaatttttctaaaatgtgaattacacaatctcatcatgacaaaaatgtacaagttgtgcatgtgcccaaaactacgattgagtctaaaaaaaaagtacgacatttaacatagttgacatcgagaatatgccagattagatcacaatttgtttcaaacttgtttgaaatcgcattgttaagaatcaaatcacattatattctattctgtatatattagtaaaaatttagaacacctttcctgtacattttttttttattgttcgacatttatagaagagttttctctgtccaatttcttttatatatataatcatgtatatggtaataaatgtacaattaaatatttaaatttaaaaaatttataaattattaaataacttaaataattattatgtaaactattataaaaaaaaaaatatacaagaacaaccaacccatttttttgtgaaaaagggatagaaggaaactaatgaaagaagagttaaaacgcaacaagtaaataatatgaagtcttttgttaaattctctcaactattattttatttgtacttaactctctaatttaaattttggtagtaaaatactccaaactattgaaatattaacaagtttaaggtgtcatctatttttcacaaataactgctaacatgaattgcttatgtgtacactctagtacacgtagcacgtttatattgatacaactaatattattatttcaaaattaataatattttttagttttataattttatttagttttaaaat

SEQ ID NO: 395079 - DNA, 1176 bp, Cannabis indica
atctaattatcctatttttttttcctgtctaatctgtttatccacttatttggttttccaattgtttttatttttgttttatatttttatttcttcggtaaattattgaattatacatgaataagtaaatgtaaactagctgaataaaaatttaatcatgaaattattttaaaaataatttattgcataaatacttaaatttaactctcatttgtaaataaatacttaagtttaatttttagcggtaataatacctaaattataatttttggaatttttgttggtacctattactttagtgttaagtaaattgctacgtgacaattcctaattagcccaagccattaaatttttaattttgtaaaaaaattaatttaaatataccaataaaaaaatgacgcgtgaataatgacttcacatttaacggtcaggtacatacagagttccaaaaatataaatgatgtattattacgccaaaaattaaatttaggtatttatttacaactgggagttaaatttaagtatttatcaactagttatgtattataacaaatacttaacgtaactagttctaagatttagtttttaatttggttaatctacataatttatttttcgatgttatatttttaactagctgataaataaaactaattttgtattgtcaaattcaaaagtccaactctgatgacaattccaacatccaatatcggtgacaacttcgatgtctaactacgatgactttttggtagcgatgactttttcgacgatgatagcaattttatcgaatattctcattctattttctacttttattgcgaaaaatattttgttttaatagacagtgattgttttgcgtagtgggttgatggtcgagtcttgaaactgctcagaaacttgtaaatgattttgattttggtcttgtgttggttttagttttggtagttagttggtggtcaagtcttagagcttctaagaagcatgtaaaatttatatatgagtttcgatatttataatactagatttttcattcagaaaccaatttttgattgtaccgaattaattagtttattaatttaatgtcttaataaaattattttagtattatttcaatttcttttagttgagataattttttttttctttattacagtatttttattttctaaaaaaaaa

SEQ ID NO: 395080 - DNA, 2107 bp, Cannabis indica
ataagtaaaaaaaaaataagaaagaaataccatatatcaataaataataacggacaagttgaacaacataatacaatataacataacttataatgttaaacatctcaatgcatgtttcataacttaaatattgttcttcaacataaaaaaaatatatatatatatatatatatataatgaaagttccataataaaaatctaaaatgcaaactaaaaattagctatttagaagcctagttgttgataaatccatttctttctaagttctgggaacattgcagaaaaaaactcagccttcctctcatctgtatgaatgttaataacttggacaccattcatcactgacgtcctaattccataatcataggcattagcttctcgacattaactatttttaggttctcgttgcaacttaatttgcttttttaaatattgatgtccatctatcaacagattttgctaaactacttctaatggaagttttatttctttttggacgagatgtcaatgttggttgatcaggtaaatgtttttttcccatgctcttatcatgctgagttgattgattttgttcactatctatattattcatatcatgatcaagcacattttcagactcagaaaattgtgtatcaccaactacatcatcatcacaaaatttattttggaagtcttcaacatcatttacttcacaactatttctaccatcagcaacaacatctccaaaaattaaagccaaagtattatagtcaggtaacttctaaatcctatattgagcatcttttggatgagcctatcacaaaaataatagtaataattagtacatgtacctattctcctttatcattaaacaagaaaaatagttactcaccataagatattgctcccatacgtcatcctcaccagtgacttttcgatttgcttcatcccacccaaagccactatttagtagcattctcttcatggtagcataagtttttttcaaagttctcatcttattttttattttagtcttatctaatttatctccatacaataaactcatttctttttctacccccgccatccctcattggttaagcccccttgttgtatctttcctaatttaacttgttcagctataaaaataataaaatactcatcttgactttcattccatttggtgtatggctttccaaccttagaattttgagtatttgtcattcctatattaattaaaatttaatgaaaaaataatattaaaaaatatctaatttcatatattcatatcatttgtttttttttacaagataaaatgcactcaaaaaaatattataaaatagcatcatacataagaaaaataataaaattgtgtacatgagaaaaagaaaaaaaaatatgagggactaacctttataggaataggaggagaccaaaataaaaaataagagatggaatagattttttttgtggctgatggtataggtaggttgatttgagaaagtaggttagatgaatggttggtgtctttttgtttttgattgatgagagatggaatatatagaataactaaggttgtatggctgtatatgggaattgattgacgtgataattgataggaaaaggaaaattcaatacataatcaaaaataattaaatatcgtattaaataataaaaataatttgaatttatttttggtatgtaattacatagtgtaattacacccaattatcacaggggctgaaaattagagagagtaattgaggtctttgaattacctctaattacacagttatgatgtaattacatagccaaataaacacatacgcaaaaccttataattaccttcaattacatccaatttcaattcccaagtagcactgtggcccttagcatttctcagttacatgcttaataaagactaaagaagaaaggcaccagcacttgaaaggtagatgatgtgccatgctactatttcctttaaatatttggcataaaagagaaaaaacatgcttgatgaaggctataaaaaataatagagaaaattacatacattttttaatttgatgcttttgatttgtattttatttttaaaaattatttatttttatctttttttttaaattat

SEQ ID NO: 395081 - DNA, 682 bp, Cannabis indica
attcgtgtgaaccagattcattgtgtttaaatccgcagaccacagacggactataactggttttcgatcgaattgaaccactcctgcctctactacctgatatcgagtagcttcatcattaaatcgcaccatgattaatcccatggaaaatttactaacctgaataactccaagatggccccagactcttttatcaaatcctttgaatatagtaatgggtggattagctcccaaaaccttgcaaataactgctgatttccagcaattttcctcttctctgacctcctccaaatctaactgagcaatttttattccatctctgatcagtggttctgtgaagagaagtcgttgatctcgattattagttctttccttcgtaacctctcccagatcctccttgctgattttggtgactgttgaacatctgagttcatcatctgttcatctcacctcctcagcccaactctacgattgacttttgacagatcggtttaactcctctatttcgattaaatcctgagctttgaccatctcagcaatcgaattcaaaccctcagtaaagtgagctttgtcgacttcttccatctccactgcgattccttcaagtgcatctttgattgggatcgagtgtctggcttccgtcccacttttttcttcctcgccatggaaggagaaagcagag

SEQ ID NO: 395082 - DNA, 528 bp, Cannabis indica
tggagataaactctaaaaacctttaccccatgagtttgcagactttagttgagttttaatatgtgaattttgattttaggtgcggttagaattaggtttgattctagtttgattttttagtttgttttgagtagaattaagttgtttgttgttgattttgttggtttgagaagaggttgagcaagtttgaaaactcaaacttggcttaacaatggtgtttttaattttggtgcgattttgttgatgttctttcttattttttgttgttgggtattttatcaggtggtctagaaggttttgtgaagtttgagaatgatttgagagagttgagatgtgtttggggatttctggtatgaaccagttaaccggttctataggtactgtagaatcggttgaccgtttcactaggcaagaccccagaaatccagtttaccagttcaagcaattttcagagccttagtttcggtgtttccttgatatttaagttattttcatgctatttatcgataggaaaacttttagttttga

SEQ ID NO: 395083 - DNA, 798 bp, Cannabis indica
tatttaaattttttattgtcttatatataaaaataaaaataaaaaaaataagaaagttattaatttttactttttgtaataaaaatattaaataaatattagattttacattaaaattttgtaattatatattggtgcacaatactaaaatttgatgtaaatttactcccacaaactatttttttgtgccaaatgggaaatgatctttaagatgaaattttgtttggtttgactttctattcttgaataattttattagtttttttgttggtgttttattattattttatttatatatttcattatctttaggtaattagggataaggatattaattaattaagttaaattaatcagatcataagatggttcaagtaagctcaactaactaatcgagccaatgatcatggagccggctaagtgaactgatatttgagctaattatcaaaaataattttcttaattgcaacttgcctatatttttattattgtgattatgtagtcatgttaatggagatgtagtactatatatataggaagtttttttataggggctctaaaaagacttcatcagaattagaacacatcacgtcatttaatgaagttgtattttatttcagcgagaaacactaaattattgagcatctttatttttatatccttttttattttttatatatttctttttttgttttgttagttttcctctcttactttgtttttctaaaatttttaggaaaaaatttatatataatataaaggaaagcacaaaataaatttaggtgacatcttagattt

SEQ ID NO: 395084 - DNA, 536 bp, Cannabis indica
aactcacttatcaaatactaaaaaacatatacatatattaatatatatgacttgccatttttattaggcattggacagctcttttagtgtaccccatctcttccctaaatgcaatcatttccaaatagacatgaaaaggaaaaaaaatgataaatatgtatatatttatatatggtataggtcaataatctcacctctgctgtctcatggttcaattttcatcattttggtagaaaacttttctacctaaaatttaaatagcattagcatgtcccccaaccatttttgtcacataaaaggaaccacatattgcactattactatatcttcatctttttttccctattaattttttgttcatccatttaatttgattattatatatatacatacttagatggatattatgttcttcataaacctgtcccattttagtaaatttttatcttatttttcatcttttttttcaaataatgcatatttattttaatttttacatttaataaattttatatacttttttattttttattttt

SEQ ID NO: 395085 - DNA, 734 bp, Cannabis indica
atggttagcaaattttgaaattcaaactagatatcttaaataaaatattttaatatcaaaatgagatcattcaaattttaataataaaattatgtaatatctgatcttataattaaaataaaataaaatatttcttaaatttcaaaaataaccatagggctatttttgtgaaaaatcaaatttttagaattcaaagcctattaacatctaaaactaattttaattaattaaaaattaattttattctgataattagatttttaattgaaaatttagattctacacaaaattctaccaaaatttgaattttgtttcaatgaaaaatgatttttgaataaaaaaatatggcaaaaataattttggtgcacaagggtaatgcatacccctgcaagcgcagaagggagggactggccgagaaaataggctgcgtgcagcatgtgttggctgagggagctcggcgtgagtaggccttcagacagggccatgttcgagaaacctcggtcagcccgtgtctgaagacgcgtgctgtccgagtgaagccacatcccctcgcgcgcacacgtgcaatccaaaacgagatattttcatcaaaattctaaaaatcataactaattcataaaaaatccaaattgggtcctgtaaaagcctaaattcattaattttttgtctactttccagtaaaaatatttccagaacgaaataaaaaaaatttacaacagacattgcgatttcca

SEQ ID NO: 395086 - DNA, 683 bp, Cannabis indica
tagttagaatagtcaactgttaattttggttttttttttttttaattacattaagattatatatgtatatatttggggtggaatattgttttaatttatgtttatttgttagtacttgatggtggtgttgaatgttattgttttgattttcaaaatattaatgggtttgttctttagtgggtaggggagggaacacaccttcttcccactaaccaaacaagtgtaaagagatattcatgttttcttttattttcttctttgactttttggtcttttcgtactctttactcctttctctaaattttaatttaggaaattttatttgtactaaaaatatatatatatacactttattttatataaaaaaataaaattatctttctcttattttcttttcgtattacactaaaaaaaagtaaatatataaattacaatacatttaaatattttgattaaaaaaatcaaataaaaaatatattatatcttattaaattaagatatatatatcttttagttatcaaaaaaaacatatatatatatatagggtaaatactattttggactatgtgttttacaaaagttaccaattggaccctgtgttttgttaaatgacaaaatagaccctgtattttctaaaatagtacatataggaccctgaattgattttttgtcaaaataaagtt

SEQ ID NO: 395087 - DNA, 477 bp, Cannabis indica
tagatagtccatttgtcttgagcagctttagttcttagtaaaatacactgcaaccaaattgtctctttaaattcctcagtagtggccatgaattctgactctattgtggatagggccacagcttgttactgcttagacttccaactgatgcagctcttatttatggaagaaaaaaatgtaggcgcaatggaccttctgttatctatgttacaagcataatcaacatctacataactagttaggaaaactttttctggatctctctcatagactaggccatatttggatgttcctttcaagtaactaagaagccatttcaaggccttccaatatgatcaagccatgagttggacatgaacgcctaagactaggtgttttaccaagtaacatttcatgaggtattttcaatttcagaaccctactatagaacttctattgatcatgtaactgttggaattattttatcaggatcttaga

SEQ ID NO: 395088 - DNA, 807 bp, Cannabis indica
ccaacaaagtgaataattagcaaccacttgtaataatagtttccctaagtatataataaattaattatagtattaatattgttaatgctagcttaatccacaacctttttatccataatatatttttatatatatgtgtgtgcagcatcagaaagttgaaattaataaagctaattttttttttattatttttaatatttgttcttttcaacttgtgttccataattagctagttgatctttataatatatagaggataattatatataataatatacataaataaatactattgctgtatatagttactttgagttaaataataatcccattatatgctttatacttttctcttcccaatcccataggataattaattataattatattagatgataaggtgtcaaattaatgataattaatcacatatgaaaatgaattttagtgtcaaaattaataacatgtggagtttttttaaatattataattactggaagacatttaacttactatcgttgtcatgactatatatgttaccttaatgtatttagtttttttttaaagcaatgttatttttacatatatattttatacagctagtagctagaattggttatttattatcattattttattttattttattttctattcatgagtaatttataataattttattaattattttacatgataatatatatagtgtaattagtctcataaacttttaataaactcctaaaaaataatttaaaatatctaaattaatagaattaataaacaaacatatgtctaataattatttga

SEQ ID NO: 395089 - DNA, 937 bp, Cannabis indica
atatatagattaaggttatagccacctctttaaattgtattatcacttcataaattgtattaatatcattataaattataatgtacaaatatagcctatattaataaattataacctcgttatgataagagagaacaacaatatacatatataaaaaaatccccaagtcttttataataataaaaaaaagttttgatatatatatatatggcatgcatatatataaactacttaattacattaaatataatattttttaaaaaaatgagataaatcatcaaataagaaagaattaataccataaaaaaaactcaaaacctcatatataatttatacttttaatataatcaaaatcagttttttatgaaaaaaataatttcttgacaaaaaaaataatttcttgaaaaaaaaaactgatttcttgatgaaatcattataaataaaaacgattaccataaaaacttaaaaactcataattaaaaccagttccttgatgaaaaaattagtttgaagaaaaaaattagtttctgaaataacatacctttggcttctctggttatgtcaaacaaagagaaataaactttaaaatattaaatatgagatttaaaaagacatttacaataatataacaaacttaagcccataaaaaaattcaaaataaaaaataaaatgctataaaaaaaatggacaaagttaaatttaaaaaaaaaaaattaaaaatcctatattaagtgtagtttcttctttatatagtactccataaaaacatattaaacataatatggtcgaatgcattgactaataataaagaagagtgtgtacattatgtgaataattgtaatatgtagggtttaggatactttattagaaaaacaaaaaattagacaattttggccacaaatctataccaaccaattaattgacaagatttatatat

SEQ ID NO: 395090 - DNA, 471 bp, Cannabis indica
attattttatttagtaattagtagatatatttctgttattgtgttacaatttattattacaattctaaactatgacacttgtatttttgcattaaacatacgaacataaaaaatgcatatacacatgaaaaaaaaatatacatatattctaaaaatacatatacatattcccataaatcataattcttcgttaaattaatctatatatttttattttttatatgaatgtatacaaattttatagtttagagggaatttttgtaataaaataaaattcagtgggcaaatagttcaacgagtacaaattctatttattatattgttgcaaatttcgaactgctttaaaatatttaaacacgaggtgtcttcttaaaaataattagccgctttcaaaattagttatctatttaattacaatagatattcttaacgtattatttttgttgtaatttttttcatcttattttattt

SEQ ID NO: 395091 - DNA, 781 bp, Cannabis indica
gacgccgcgacgaggggacgggggtcgtcggacgttagggtatgactagggtttttagtagaaaaagaaaataaaaaggaaaggtaaaaaagaagaaaaaaaataagaaataagtatatttttatattattatttatattttaatatttaaaaaaaagaaagtgaaaaatatttagtttttttttttgatttttgaaattttttaaaaaaaatatatataaataatttttaaaaacaatattacgtggaccactaaggcaacagactgtgagttttggaacgaagggtacaaagtaaaacagaatgggagttcagtaggttttgccaccaaaattttagttttttagttaagtgttacaaaacgttaaattcaggtggtttagccgttaatatctttttttttattattgcagaagttcatttaactataaagatggttgcaaatataccactctaattatattatgcccaattctttaaatattattgatgtaacactaatataacattaatctatttaaggattcaaaagaaaaaattcataaataggagtctaataaattataagaatatttatatacctaaagtcaagggtggactcacatgtagacgagaggagtgttcattagaccacatctaatatttttaggtctatccagatgtgatccaattatatattgaatgttagattttactatctgatttgatctaattaatttaattcagtcatccaatcgatctaacattcactggatgttggattggatcggttctattcgtt

SEQ ID NO: 395092 - DNA, 1016 bp, Cannabis indica
gacataataagtaataataaaatatatcgtgatagttaatttgtattatgttatattgtgatattaaagtttggattacttttgattatgtgagatttttgtatcataatttagtatactattagagtagacttttaataaagagcattgttattaggcagcagtggtgcctagcatcttctcgacatgtcgtgttgcgattcgatacttagttgaactaatagtgatattgatacatagaaaggtgttaggcaccactggtgtcctttaatatttctctttaaataaaatggactatattttacatttatatcagttattggagatgctcttacagctatttttacatagtgttagtatttattgtgttttgattttgtatagcgtttttatttaggaaacaaaatgacgcgtggacaaaagaaagtaaaaacccataaaagtttttttttatgaacaaaaaaccccataaagttattgaaagaatgagtatgtattaaaaagctatgaccaataacaattcagcaaaaatcatacgtgtggcaactttctttgcacactcaaaaaatttactctctcatacatatattaaagagaagtgctatggagaatttttttttttttactctcttttacactcttaatataatttagcgataaatgtcattttttaagattactttatttgcacttagtagatataatattattaccttattacaactatatcataataataaaattaacctactaattttttactaggacaactccaatcccaaaacttaaatttagaattaaatcaaaactaaaagaatattattttaatactatttttttttaataatcacaatactaaaaattacattaaaatctatattcttttttataatgttattttattaatataataaaaaggtttacttcataatgaaatatttaatttaaaaaaaataaaattagaaacattttatggaaaaaataacactaaatataaaattttaaagtagtcattg

SEQ ID NO: 395093 - DNA, 997 bp, Cannabis indica
cagcgctttgaaagaatgcatgtacgaaccacatctttagttggtagaaacgagagaatgtgatggatcatgcatcaggaagtttcgaaattctgtcattatcacaaccatccaccaacattggtgtcatgatagtaaaagattcaagggattgggattgagatttaggagttgaggaagagactcttataattgttgtacagattcacttttatatatgtatttatttttgaaaagttgttttagagttctatatcaatgcatacggtttgatttagttagggatattctttatttatatgatattttttttgttttttgaattaattatgattttttttgtttattatataatttacttcataatttaatttttttcgtgtgtcagtttgtgataattttttttaaaactaaaaatgctataatattatatatatatatatatatattgtattatattatcatgtactattaaattgtgttatgacacatactcaattagctccacaaatgccacaattgtgatcacacttatctttggaaaatgaggtattgctattgctattgctattgctctcccaaattttctttgagtctaaccctacataccaacaattctaaatcacttcttgtttggttcatgattttcgagatcacggactattggagaatattgtcccacataaattaaatgtaaaaatattgagccaatatataagaacataagctacttcactcatcattattagttttgagataaaactccatatttcttgacagtgacataactttaaggtcataaacatagtaaaactaatgatcattgtacacaaacccgtagaccaagcaatttcttgtgttacttggttgtctatatggatgttcattggaccacatccaatgtttttaggcctatccagttccgatccaattatatattagattatagattttaccatccgatccgatccgatccaattaattttagtcatccaat

SEQ ID NO: 395094 - DNA, 657 bp, Cannabis indica
tttttagtatatttttaaagtaatttacatatactattatttatatatttttaaagtaatttattaataacttttagtacaatattttatccttatatgtaattgtttttattatatacacttatagttatatttgagatattaattttattttttatttttaaaagtgtatctaatttttaatttatagtttttattatattaaagagtttaatagtattttaaatacttttactttttttttgttctttaagtagaaatatttctatttataagtatggtgtatagtattttatttgttttgttatattttgtgatattatcctataagttttgtgataatgtactatacggagaatttctatatcacatcttaaatcatttgtagcagataaatttttcttttaaattttaaatattattattgtggatattactattttcatatcttaattcacttaattatatttattttataaggaaactcgcagttatttaatcttgttattatgatgatggtgttggattggtctttgaggcatggttttctttcactttttccaagattgacagcttatgtcaaaaaagattggcagtgtagtggatttagttatttgtattctctacgagattttttatttgtattgaattaattaa

SEQ ID NO: 395095 - DNA, 996 bp, Cannabis indica
ttaattttgtttatattatttatagtataattaaattcttaacaaattaagtatatatatgttacatgtaacttaaaatttagttttttcgaccttttaaataaaataaaattcgaaaaatttatacgtctaatttattacatttacataaatataatatatatatatcttcacttattatgagttcgatataaataccttggggaataaatattcactacatccatatatatgatattatatagttagttcatcaactgttaaacaatacatatatttgagaattttgttaaattaagagtactgataattaattaagagataataaataatttgtgtgtgtttttgctgtttaagataattcatagaaaataaagttaaaaaaaagaaagataattcatgaaaattatatttaataataagctttttctaataaaattaaataattaatttccatatatatggacgtggttgcacggttcatataattaataataattattatgtatgcaattaattaattaaataactctagatttcacgcgacaccaccgatattagatcttaattatatatcattacaaaattaatataatctctcaataaatattttatactaattttaattaatatgtgacaaaatcataaaattcattcattggtagaggaagatcgaagaaaagtagccataaaagagcattgttattagacatcaatggtgcataacatatctagacatgtcgccttgcgattggttagtgatactctctaaaaattattatattaaactatatgagacccgatacttaattaaaccaatagtaatattaacacataaaaaaataacaccactaatacattttagcatttttatactttataagttgagaaagtttgtttatagtcaagcacgtgacactccaagtgagactactaagaaaagtagctacatatgaaatatgctttacatccatattttttttaatatatttttta

SEQ ID NO: 395096 - DNA, 1016 bp, Cannabis indica
ctccacgtgtctatatttatgagataacagaaacaatagtaacggtagtaaaaaaattgtaacagttaggttttttttgacctccaaaaataaacattaggtatttaaagtgtataaaatttgaaacattaggtatttatgtcgcaatttaccctacatattattgtatcaaatttaacccacaataaataatattttttttacttactataataatactaattattaaaacttattgacttttactaaattagtaaattatacaattttttatttactatattaacattatttaaataataaaaaaatgtaataatttttgtatattctatataattaattattttattttttattttttatttacatcttggaacataaattataattagtgggtcaaatataatgtaaatatagggacacgattttgtcccgtgatgtattttcacagaatgtattcattggtacattagatgagtctcagggtacattgaatgagtgtcagggtacgttactattttttaaccctaattacccctagatcaatctcagttctcagatcaaataactctctcatctaacggctgtcgtacatcacggaatacattatatgaaagtacaatcacaggacaaaatcatgtcaagaaaaattattttagttagatgatcagtaaagaacaaatcaatttccaatatattttattgttttttgtgtttaaaaagattggtattgttctttagctgaaaaatcaaagttgagccacgccggccatgtttaaatttgaataaatgaatatggtaggagaaaaatgtatagcttatgaattgtatttcacgattttctatttcgagccgttgaaatatccaacctattattgagagaaaatttatatattcaaacttatacagcccttaagtcactaaaactaatttagtagtgatgaaggaattaaaccacttggggctagctcaagtggccataggtgggtgtgtgagtgttgaaagttctggttcga

SEQ ID NO: 395097 - DNA, 762 bp, Cannabis indica
tgtgtacacaagtgtacatgtgggcagtctactatggcctttaattgaggtttttagacataagtgtaaagaataaaacaaaatatgggttcagtaggttttgccgtcaaaatttaggttttcgttgttaagtgttaaaaaacataaagttcagatggttttgccaccaatatacctttaaaatatttatttacatggaccgattaaataatgtcatgtgtatattgtgtccatgtggacaatgcaatgtgttcacatggctgttggcagtaaaaaatgaatggaaatgctaaactacttatagaatatgagttttgatggttttgccgtcaaaatttaaattttgggagataattgctaataaagtgatagtattgggggttatactgcaatttactcgtaatattatttaatacaatacgaccctactaaacaagctctaaataaaattttaagtaattataattaatttttcaaaaaattattattataatgatatgtatatttcacaaaataacattataaaatgtctattttcactggttactaggggtgttcattggatcacatccaatggatttagacccattcgatccaatccaattatttattggatattcaatttcgccattcaatccaatctaattgaattgagtcatccgatccgatccgatccaatggatgtattggattggatcggttccatccattgaatgttttaactagttttttattggattggattggatccatccaatggat

SEQ ID NO: 395098 - DNA, 1049 bp, Cannabis indica
actaaattggtaaaaaaaaagtatatttttctaactagagtactggaagaattttttctttgacataatctcaatgtaatgcatattgagaaaaaatgtgtgtgacaacttactaggtaatcttcaaagtatcaatgggaagtcaaaggacaccgagaaggcaagaattaatttgcaagacttgtaaatacaacgtgggttgtgtgtaatgaccgcattttagaatatgaatagtaaaggcgattaccgttaattattgatattttttaattatgcatgagtttattattaactgggtcctatttttagaaatgagcactagagttataatttctcaattctgtaaattttattaaactctagaggtattatttatgttatatgtaaattatgtaatttttatgatttttgctcggtgacaatggaaaatgcgatggatggccgtttgagttgcatgagtaagtctagaacctatttcttagtgggataaatatttgagatagataaaatactgagtttgagtggggttatggcttttaaccatcttacccctaggcttaaaattacttaggttataagctaaaagggaattttgggaatttaacataatgggattgggtggcttgtcccttcaatggcagctggccattattagttaatggtttggttttcctcttccatcaattaagaaaattaaagaaataaatcaaaaatatcaagagtaaactcatttctttctctctgtttgttcgactcccacaagaccagaaggaatcctaacctagcttccatttttttggaaatttagcaagaaatcaagggtgattcaagttgaggtacaccgtaaaaactcttatttggtgaatttcttcggttttagttggtttttgcatgtaattttgagttttagtggctgttagggttaaattggtgtgtggtttgatttctaagtttaatttgagttggatatgagttctagtagctggtgttgctgagttttgtggagaatgattaagtttgagtttaaaaactcaaacttgagtcattaa

SEQ ID NO: 395099 - DNA, 687 bp, Cannabis indica
atttaatgagggtagcacgacccacttttgacaaagttttcgctttccaaccctgcaacttagaaatgagattatctaggatgaagttgaaatcaacatccttttgtcttgatctgaacaggagtagccccaaatacttgacattaccctctggagagccaatccccaaagcttccccgatccctcttttcaagccattgggggtaaactgaccgcatccttccctggacccagtcctagccgcaaaccctaaccttgcattggagctaaactgaaccttagcattggactatttctaaatattttaatataaactaagtgtaatgtttttattatgtccatattttgagccataaatatggacatgacacgtggataattggacacgaaaaattatagaaaactcattgtgtaataaatgaattgtctcagagagataataaataacgagcaatatttgtctcgtattatgcattgccaatgagacagcgagataaaacaacatacgacaagatgatatagatagaggccatcttgggtgtaatagaccgaaattgtatcactgaaaaggttagataacgagttctttaagagcttgcaactcattgacccacatactcgtgagtatgttaaaagattaatagaaataagcaaagtgcaacttatcttagaatctcaaaagactaa

SEQ ID NO: 395100 - DNA, 1083 bp, Cannabis indica
ctaaacggtttgatattatttttattttatactttatttataattgactataatacttgtcatggagggacggaggtagagagtatatgcgaagagggctagattttaaaaaataataataataacaataatttgagtgcgaggccgttaaataaattttataattgaaaaattgaaaagaaaaattgttttggaggccaaggctatttaataaaatttaatgatacatatttcattaattatagctccattcatgttgtcatgagattaatttttttattatttttgttgttttataattgctgtgaagttaatttcttgtcaaatgcttaatttttatgagaaaatcatatttttgtaactgaaattttgaaattatatttttgtaaaatatttaatgtatttcctacagtactgaatatctttttctcttatttttattattatatatagactgctcgtaatattttattatatattgttaagcatatggttggtattcaaaaaagaaaaaaaatgttaaagaaaaagaagaagattaagaagaatatgtaagagaatactggacaactgaaacaaatattacaataaactgtgaaatttttcagtaattattaatttctcgtgaaaaaaatctagagaagtgacgttctaatataatataaataaaaaatcaagggtcaattaatattgcagtcatcataatatatactataaaatatcatagaagttactaataatttaagcatgtggattagttaatgtttactaattattaggctgcataaaactgaaagtatatatataacgtctaattaattaattaattaattaagcttgttctttaagttttttgatagctccacatggtcaactactaaattaaaactagtgaaaattacatgaaatatgggatttcataacaaaattagaaaatatggcatttttaggtttgccacttttctatggcattttttctacatttaagttttttatggtatttgatatgccatatttttataaacttattatccaatcccatattttatgtttttgtttttagtttaattagttttatttatt

SEQ ID NO: 395101 - DNA, 1722 bp, Cannabis indica
cacacgagccattaatttagtatatattagcaggtcaaccgcatgccataaaagatatatataagtcaaacaggccggctgtgatgatatgaactcggcaactacctagaaaaggaagatagtactgtaatactactgtgctatgtatatatatataaaaagaaaaaagaaagtcttattgtatatacatcattaatactattatcattattattattaatggaagtgaagaagaatacttacttgtggtgcctctttttggtgttgttatggccatcaatatcatcagtagcagcagatcttactatggtaaactcacccaattgtgagacaaaatgtggagatgttgaggtcccataccccttcggaatccaccaccaaaactgtgccattaataaagatattgataagtacttcttcctcaattgcaacacttcttctggttctcctaaattaatatatggaataaacttagaagttagcagcattgatgtggaaaaagccaccatgaatgttaagaatttctactcctacgactgttacagtaagaatggtagcttatctataacattgagtaagttcttcacgctttcagattctgagaacaagctatttggtttgggatgccatacacaagctgtgaagaataatactagcgttgtggttgattgggttgtgggaaatcagacgtgtgagcaagctcaattgaattcatcatcatcttcctatgtgtgtggagaaaatacagattgttactattcagagaatggtggtggatatcaatgccgttgcaaacaaggatatgagggaaatccttatctcaaacaaggatgtcaaggtattttctaaatttctattttcgactctgtgttttgtaaaatttattaattggactctctattttgttaaataacaaaatgaacatgaattaattttttgtcaaattaaaatttaataataatccgatttagatgtgttatgataaaactgtttacattttttatatccgttcctattaagaatagttttcgagttgattatattaaaaaatattgttaaaaattaattttagcttaatgtttgattgtatattgtagatatcaatgagtgtttagatgggatggtagtagagaaatgcagaagatgcgaaaatacagtgggagggtacaaatgcatgtgcctacgtggtatgcacggcgatgaaagatatggaaattgtgaaggaattagctttattactattgctataggtaacaataaacaacattattcattataaattgggtaaatttgctcttttctttccaaattttttttataaatttcttgaaaccaaaatgataaagcatttacaaaaatactaatcaaatgtttttttttaaaatatatatatatttatggattttttttttttttgaaaaggaaagattgttttattattgttttaacgttgctgtcgtgtagtactattgttattttttgaactattcacgtacaaaaacttgtaaaagatgaaaattcataaaaatgtgaggagaaaaacaaaattcatagaaatatatatatatatatatatatttatatatatatagaaaggtgttttttaggtgtctgggtgtttaaagttactttatgttttactatgagacatcccagtattaattgctattaagttattcgaagttttttttttattattaaattttaggctaattagtaatt

SEQ ID NO: 395102 - DNA, 1499 bp, Cannabis indica
tttacaataatgacatttactatttttattgatctgccacgtcagttaaatgtagcattttctgatgttttatgtacgttttctattattttcattaattaaatttttatttactaatagtgttgataagaaaccaattagttacttttatttaaagaaaaaaaaaaattattttcatatcatataatttgagatatattttggttattatctaaaaacttatttgtatatattttagtaactagttagcttatttttaagttatatcatggtatattataatttaaaatatatttaggtaactttaaaaagtatttttaaaattaatgagttgtcatgtaatataataagttattatttttatataccgattattttttatgttctttttgttattttgaaaactaattagttatcgtataagataatataatttattaacaaattattttggataatttctcttatttttataatttctgtagaaataatagcatgattgaaatcaaaagtattattgttctcagaggaacttacatatttacgggtttttatataatgactacaaatacttattctccaaaaagttatttaatggaaaaaaattctattttttttaaaaaaaaaaaattagtaaaaaaacaatttatgtttggagtgttggataagtgagtttctttttaatgaaatataagatcattatattgctcaatcaactctagcttcactccatatacttgacaattctaacagtatccatcccctgtacacccagaaaaaacccattacaagctagtaagaatagctaacaatatgcgcttatgagttttcgatgtgtgctttgcatgagaaatccaatggagtaatcggccaagaatattagacttagcccctccacttgagtcaatccttaatcacctccaaacacctcttattgtatgtaaatgtgttctatgttttcatatccatctccacaaagtagacatgttgggattgtatttagcaacttggtcctttgtgttcaatctttcccccatgaaaatccacatgatgaaccagtgcttaggagtaatgagcctatcccaatcaaacttcctccatgatatttccacttcttgaggagccatcaattctacaccagttttaatggtatagttctgagagaggaaaactccaaaggagactttggctttgaatatatcattcacagagactatacgtttccagtaccatctacagtcattgggacattggtaatccttccaatcttgattcatcaagtaaacactgtcaggtcacttgacaaacagattgtcttttttctttgcaatatcccaaacataatttctcatcgcagctaggttccaatcaagtcttcttcgaaaacccaagccaccggctgactccggtaagtaaatattatcccaagcaattaatcttggcagggccggccctgaaacaaagtgggccacaggaaaaaaaattggacccttatgtta

SEQ ID NO: 395103 - DNA, 820 bp, Cannabis indica
gagagagagagagagtctattgttatgtttattgtttttgttttttttttttttgtttgtttactcttgattttactaaagctaagaataaaaacaaactaatacaatcagcccaaaaatcaaattaaaacttatgataaatttagagaaaatcccaccaataactaaaagcctaaaacaaaaaattatcctttaacttaacacttaagaaatctctaacttagggataatttagtcataagcaattaccctgaggtatcctgattgaaccaatactaaccaaacttatcaaaacaacaaactagtaccattgtgacatttctggccaccgattgcgtttccatagttgacaagcttaaaaatattttattttaccaatagtgttgacctcgattttagccaacaacaatgagtctaataataagcgataaagaagtatggtctaggtataatataagcaataagtaaagaacacaaggttcttaaagaggttcggtcccgtttatttcagtaatagcctactccccttgatttgtgttaactcaagaatgaagaacacagtgtttcccctcttaaagctcttacagtgaaatctctgagtatgctctcttagatctctccaaagtaattctctcaatcttcttactagtaagaatagatcactatatatctgtaattgttaaagaatatatattacatatttagaatacgcggattgtctttgcgatcaagaagaatatatattaaattttgtgccctaaataaaatccatttcaatataatcaaatttactaattaataaagatcagaaatcgctttt

SEQ ID NO: 395104 - DNA, 636 bp, Cannabis indica
tgtttaacacttagactcaatttggagtaattagtttggatttttaaggtgcttaaagattgaataagatttcatttgattcaaaggtaagtctattaatcttttattgtccaattctgataattcttttctggtttgaagtttatgttgattacttgttaattgttgttcttgttgttttggcactgtttttggccaagaattgagggtgttttcaccacatatatatagatgtttatgtatgtattttattgatcaagataatatgaaaatgattgtgttaacatcacagctattgtgtcgggatcaccggattgtttaattctagccacagatgttgaaactggttctgccattgctcgttctgaggatgctcgtgagtgagtttcgctttattcattaattctaactatatttctctcttttatggaaaactaattacactttctgcctgctctttttccaaggatgccattaacaagataatcagtttaacgaattccaccattgcttctggtgatgattgtggttgtattcaggttgtatctgttgggttttgtgccctaaataaaacccatttcaaataatttgatttacttattaataaagatcagaaataatattttatgttgcatg

SEQ ID NO: 395105 - DNA, 580 bp, Cannabis indica
attttataatatatacagcgtggtatggttaaaaaatttgatgaaattccaaccttaaaattaacaaaaattatgcaccacctacatataatttgctttttggtgatgtggcactgtcacaaatcacataaggatccagtcagcaaaggaaaaaaatattcatgacttgctcatgtgtgataaatttcatgcatatgaaacacggttctctctatctttaaagtcatataatgtgtattatatatattaatatatatgtgtaatgattcaatgtatgaaaatttaccaactatccatgtttctcataatgtgacaaatatacatgcatgcatgtggccatataaatccagtaaatatggaaatcatccctaacttattataactataaaaacaaatgcgaaatacatttttattatatagtacactctcttttgcacttatgcaatgaagaataagtttgaaagaaaaagtgtgatagaaaatttcaatagtaataattagaggtggcccttattcaatccatttcaattacaaaaatattagacatccaattacaatttaattggatttgatgctaaaa

SEQ ID NO: 395106 - DNA, 1706 bp, Cannabis indica
taaagcataaaatacataaataatcacatagtcatataaattagtgctaagtgtcccactaatgccatgtctatgtataacggtcattacactggtgatccctggttgcaggcttgtggcccatggttgcaagcttgttgtccccagttgcaggttgcgggagaggggttgttgcgtactctatgtcgagtcctcaaaccttacaggtccgtatacgatgctactagtacttcctcacatttgtaggcttcagaaggcgtggttgtatgctttcccttagacgccttatcccttgagtcctcacccaatatcatccttatcgatgtgtacatacctctcattttatgcttatagccccttgagacgcctttttcacacacttgcatggctcgcctgtaagccccccatgggctcgcatgtgagcccccatgctcacacacacacatgacactccctcccacatgcacacacggctcgcatacgagcccccacactcacacacatcactcgactacccccccccccacatgaacacacggcttgcatacaagcccccacactcatacacgcacacatcactccccccacacatgcacacttggctcgcatgcgagcccccacagtcctacgtttcccatgcatgttttaaggtcacatttccttagggccttcacatggactcgtacgcgggtgccccatgtatgcacacaagaatctttgtcagattcatgggtaacttctaggatagtacggacgtatcctgacatccaaaatactgcctttaagaaatatgcattgggtaagtaggttggctcagtgcactctcacgtgtctctttgcccttatgcaaataatcctaaaaattaagaacactaatttttggggttaatacttgcccccattctactagaattcttttaagtatttttgtagactaaaggatttggggagtttattttgctgcaaggtaattattatccccatcacgcttatcgaggatgtgtctactatgtatagagggctccccttttttgagctctaactccacatcattcctttagcatagtggcaagcctccttcctcttgtccaagagttcgtgagcttgattcttcctcaggtcactcttatactttttattttctattattttggaattggatacattcctatccttaagttatattatgttggtatgtcttttgtcattgctattggagtgaggctcaatttctttcacttttgttttggcaacaggcgtctctcccacttttaagcaacctatccatcctttgcgaccccgtttgcctcaagaggtatgtttcctttccttgttcttttcactcttgttatcattacaccatgagcctaggttgctagcaatagtgacttatgtgctaaccctaaggtactggtcgcataacttgaatccctatcaggggacacgtccctcgtgtataatgtctagtgagctcaataccttgattttacctcttaggtggaggtgtcaaggcagtgtgtcttccttgtatcatttcgctcttgtcatgtctagtgtcagctactaaataaatgtcttcctctgtcaaaatattgacatttcatcctttgattaggagaatactccacataacccatacactagatatgctaaattaatgtctaagagggcttcatattttttatatttttatgcccggtaacagt

SEQ ID NO: 395107 - DNA, 988 bp, Cannabis indica
taattaacaaaattatcgagtatgcacacgtgtagaatgccaaaagaaattaacgaaataattaatacataccaaataataaacagatcatgtaactaaattaacaataaagaaaagttataaaatatttaaggaattaaattgatccatcatttgcacccactaatcttattattcttttataattattgatttttttagagtaaatatgtattaaaatttaaatatataaaaaagaaaattatttaaaatactacaaattattgggtccaaatagaaattaagttttttataaaaaatattgtgctaacatactaaaaaaataaaagatatatataataaatagataaaaaatatatattaataaaataaaaagattaacggtcgttacggtcctctttttttgtgtcatttttgtcttcgcctcatttaatatttagagataacattggcgcccaaaaaacaagagcgaaaaactataattgcaccgtaattaacaaaaattatcgatcatgcacacgtgtagaacaccagaaaaaaattaatgaaatatttaatatataccaaataataaaaagatcatgtaactaaactcaaacaataaataaaagttaaaaaaatatttaatgaattaaattcatctattatttttgcacccactaatattattgttctttcataattattaatttcttttagagtaaatatgtattaaaatttaaatacataatcaataaaattatttaaaatactacaaattattggttccaaatagaacttaagtgtttttaaaaaatattgtgctaacatactagaaaaagagaagatatatataataaatagataaaaaaaataattaatactaataaaataaaaagattagtccctcttcttctgtgttattttagtcttcaccccatttaatatttagggataatattggcgcccaaaaaaataggagcgaaggaattataattacatcgtaatt

SEQ ID NO: 395108 - DNA, 740 bp, Cannabis indica
atctcaactatcttgatagaagatagttgggtagcctacttctgaagatttatttgttcctgctcatgacgccttttcaaaatggcagcagactcgcctacctttgtgaggtaatcatggccaagaataggcaacctcatgggtaagcagaatcctaatgaaggacttacccctacgacgtgctgagatggataaaagctggcttaggagttgtgcgcccatgaaggtgttaaagtgtaggagaatgagaggggcatggagtggaatgtgacgacacaatctgcaactaacgaaggggataaaggtttgctgctactagagcagaggcacttgcccaggttgttgttgttgtagttgttgttgcagttggtgttgtttttgcagttgttgtcgttgttgccgctgctgtggttgttgtcttagttgttgtggttattgtggttgtaatggtgggttagtcgatggtacgccaaatgcccccaagtctggaattgaaggtttgaccctcttcgtgttatgacccggggaagtctgtgatcccttgcatttggagttaacaagagtcccttttaggggaaagataagtccgtccaagttgtcgttagagcccaccgtgtttagtgaggtgtcttggattgttcctcctcgaaggggaatgacctgtgaagactgctctcccaaagtagcagcctcagaggccctctgagaggtgccagagtccttctgttgggttttgtgcc

SEQ ID NO: 395109 - DNA, 918 bp, Cannabis indica
tcatttattataaaaaggcttatatattggttaacgaagaaaatgtgttaacagtttggtgctttcattaagagccttgtaagaaaaatcttagaaaatactctccttgaaacatattcgaacttttcatccatggtagataatactcttggaaatgaagataatcaaccagaagaaacaactcagcgtccagggaaagaacatgaaaattctcataggacaaacacaactgagactcccactctgggagaggaaatggtggagaatttaaacaaattggcggtggaatcccataatgatgaagtgaggacgcttatgatcccatcagatatatgccattagtggaatcggaaaacaaacaactctgacaatgattggtgagtcaaatcaaagaaatgatgaattggagtgcgaggcaacagctgcaacgctgcacacagtgatgcccctcctaaccaacccggcacatcaaccaggaaatctcagggaagacctagatactcaaagaccagaagacatagggaaacccctaggggtaataaccctaaaaatcccacgaatcctcaagatgatcaacctgggaacacaagggatatcctagtggatgacgagggccctcaaaatccaagaaacactagaaatagagaaattcgatccaacaatccaggaacttcatgtggaaatgtacaacctaaaaacctaaagtcatctcacatgaatgcaaatgctaaacaaacacaatctggggatcatgggttcactcagaagaatgcgattggtgtaggtggtcagcctaagttaggtcgaccaccgagacattcgcgaaggccaaaccaaaacaatagagacagcatgtgtaatatcccagaaaataaataatatttaaatggacatattttattaaatatgtaatttctt

SEQ ID NO: 395110 - DNA, 695 bp, Cannabis indica
aaatttctcaaaaaaaaataatattgaaactaagtggtagtaatttgtgcccgtttaaaatctctaatttgggctaaaggaatattttaataaaatttcataattatgagtgattgagtatcaaaatgtaataggttaaatgcataattaggttaagagatatttttaatttattgatagattaaactagaattaataaaattaataacatgttaggttctcatttaacaataggggtatttggtctacaatcttgcatacaaaactgtttgaatattttatcgatatagttttttcgtgataatctaagaatactccgaaaacaatctcgatgcatttgaatttctaaaataaaagaggtgtcaccaaaatctttcatttcaaaatacttaaaaagaaatctcttagtttcgtgtaataagcatatattaataataataagtaatataccatcgacatataattcaaaaatatgcacttactctcagtatacttgtgatacatacaatcatcaacaacattcatctcaaaaccaaatgagagaatcacatatgaaatttctggtatcattgagaggaagcttacttgagtattttttttatttgcaaactattttctttgggttaccacacagagttttctggttgctctgtataaattgtctcatcaatatcaccattgagaaatgttgtttt

SEQ ID NO: 395111 - DNA, 1124 bp, Cannabis indica
tgtaaaacggtctgctaacgtagtcgttcattggcttgttatctcctgattcgattattagagagggcaattgtccctctgatttgtttgtcgttattggctgttgattgtctcttttaacaatggtttcactcttccatttaaaaaaaaaaggataaacttgagatatacgaaaattatggctaataacaagtaaaacatgtacccaaaataataagagactcgaaagtaataaaggaaatgtgagtgagataactatcattaatcattttggaatggaatggatttagtccccacattaaggatagtcaccaattctaaaaagtttgtaaccaattttaatgttgttagttatttaattttgtataaagttagtaacatgtttatatgtttaaataatcatttcacaaaaattgaataattaattttacaaactaggaatcatttttaaaaatatatattggacacttattaaaaatactagttaataatacattagagataagatggaaaaacattcatttaaattagctcatcatttactttagagtgtaagaattactaattcatgtgtgatcataatactcaaataacgaatatgaatcatatatgtgtcaagaaaattagacaacaaagtaacaaaatactctaacaaaggagaacctcttagaagaggtgtgcatgaatcaaatctaaatcactttagtcaaattactaatattacaaccataaaatgactataaaattttaagatttttacatcacatattaaaatttttatcttttttatttttttattgtaggacgatttttttttttcaaaaatactgtatactgtgttaaatttttattgttattccacagttgttttttagttgtttcactgttgttttaattattatattttattgttttacggttgttttataaaaagataatatttttgtaaaaaaaaaatatgtgtaacagtaaaattgtaaacttttaccaaaaattcaatatttttttcaacattaaaaaaaaaacaaataattagaccttataaaagtaataaaggaaattacattgtatacctactttattttacttattttaatttttacatttattttcatattctttaa

SEQ ID NO: 395112 - DNA, 635 bp, Cannabis indica
aacctaaaataactaaataactaaacaacaaacaaacaactaaactactgttacgtagttagttaattgttaatacacatactattattgtttaagtttttttttttttttttttgaaaaacattatgttaatttttttcattgttaataattttcattttccgacaaagttcacgtgtgacgataaatatccttgaagtaataataattagtaataaatttatatttaagaaacattaaggtgcatggtacaagtacccatcattcggaatcggctcatttatggggtaaaaaagacatgaaacataattaatcacaaaactgaaaataataataataataataataataaagttttttttttaatacacactcctatgtttggtagagtggaaatatggaatgatcgagagagtaaacgggagagagagggagagaaaaactctcttgattggtaagaaagaaaataggaaggagatgagaacacctccaagacaacatatattaaatgtccttgagagagaaaggacaaatataaaatgggaaattttatttagaccccaaaattttctaaaagcatctcattttaataattttaatttaatataaaatttatatctttagttatactaaat

SEQ ID NO: 395113 - DNA, 724 bp, Cannabis indica
actttggctgtttcttttgattgttgtatgtttctaggtagttaaattatgttgctcacaacttagccaatattgggctttatctacttcattcaagttctgggttgatggatgttcctccctaccagaatctttattctgtaatgaccgttaggttcttttcttactatatttcatcgttttcagtttcaaaaaatataatatcccaggccaacgattacaacctccgcggtacgcggcgggatgagttacgcgcgctcatgtattgtatttgttgggctgacaagactcctcatttttattatgtaccacacaatatacttttaaaaaaatttatctgctttttatgtaccaaacaatatacactttcgaaaaagagaaagctaaacatccggaaccacgtttattgggaaataactttgattgagaccactacgtagttaatttacatctctctagaagttgcaatataattttgagaaataatttaaatattattagttttattatttgattgatttatacatctctctctcgttctctttctctccttcaataatatcaactaaaaagaaaaatactaatcattaacctttatggcatgtttactaaaagaataatgagaatcaattgtatgggattgattctttactaaattttggaatgggaaaaattagtggaactcacataaattaaggagaaaacaaagagaaagattctcccc

SEQ ID NO: 395114 - DNA, 905 bp, Cannabis indica
aaatttttctcatctataaacttacattctatcaccttatcttttcatacatagatctaaagacccttttcttgaaacaagagccagatgtcaaaaaattactcaaaatttcaaagatcactcgcaaaaggccaaaaatttatgataaagccaacaaaaacaagaacaaaagagatcttacaacaatacccagaacataaaaatcgatgatcagagagaaagtgatgaactttgagattggtgaagaggagagagagaaagatctaaccttgatagtattgttaaacagaaagcagagaacagaagctgtttctgagattgttaggtgattttaagattgatttgttacaatacaaacttcgaaagcttcaaccttttcagttcctttgctttcattcttctctcttcgtctggtatacccaaagataaaataaataaatatataaataaattaataataaaatttagtttagatttttcttttaccattttaataatagaaataaataaattgatgagcatagttaagatgagtttctcaatgtcataaatttaccaacaagttttgatgagcatagttatgtagttttataattgatatattcattagctattaaatttacaccaataccagcatatgtttatgcttttttatatggaaaaatggacattattagttaattaataatatatatagttaattaaattaaaaaaaattgtggcgtaaatacttaaatttagctttcagttgtaaataaatacttaaattaaattttaatggtaataatatttaagttatatttctgaaatctttgtatgtatatgactattaagtgtaagtcattattcacatgccattttcttattagtatatttaaattaattttaaatataaaataaaattt

SEQ ID NO: 395115 - DNA, 713 bp, Cannabis indica
ttacttagagaacgcaaatcaagaattcattttcacttgcaagaatctaaaatttctacgaaaaccctatgaataaatgtatacaaacataaataatgaagtaaatataaatgaaatgaaaaacaaagaggatacctgatagcgatgaaatgaaatataagttttttcatatttaagacgatactataatcagagcccacgctcgattcggtaacaaatgggccaccatagctagactccacaatggaagaaagttatctataaaaaatcactggaactctgaaacgaaagtgttcaacaatgttggaagagacgcgggagaaccgggagaagcggaggtcgtcgtggtgaggagctcgtcggacagagtagtctagaattttgggtatattggtctgaaatttagggttagagacaaatgagattttgggtatatttgtctgaaattttcagtctttttggctccaaaatttcactccagaattttatttttttcaataaattattaattagatataaaatacttcttttgccaacagttagtaagtgttggctatactaattattcttcacagttagttataaaccgttgcatatccttactattcccaacacttaaaaaatgtagggataaactattttttttaaaaaaaaatctatttagtattgccaacagttattcaccgttggcaataactatcccaacagttttt

SEQ ID NO: 395116 - DNA, 972 bp, Cannabis indica
ggtattcattatttgggaatgtagaatgggaggtgtttagtcttttattccctttacaattttttctttctttaaagaatggaggtaaatagtttaaataatggagaggtaatttccattcaatttcttccatcttgatttgtttactatatgtatactatgaaactttgtaaataaagtttcaatttaccattcaaatgtaaagcacagttcaacttgatacacgaatgagggtgcaattcaagtatgtatatatgctggagatcggtatattatctcttgttcccatcattataaaatttcagtaaaaatgtctctttatcacaatcaaacttacaaaaatacatctgtcattatcatgaatactaattgtcaatctatttcattagtaaatttatctttcataatcaattttgtaataactttagtaagttgattctagtatttttgagttatcaatctctatgatatttatgaacatcactaattttaatctaattattcattaaattttaatacaatgtatataaattgtgtaatcatatctcatatatgaccaaaacaatgccaagcctcagaccaatctaattctatttctggatgtggaacaactaaacaagaggattcaagaaagaatttagggcgagttatgttacttatttagtttttattttttgaagaaaagcgtgcatatattagaactaaggcagttagacctcgcggtcattacaaaatatagtattgggcatcgaggaaattggcatggagccaaacctctgaagggaaaaggcccacttagccacattatgggccatataattacactgtctactaacatactgaaaactatagccaataaaataggaggagaagcttttacaaaatgagacgtagttatcaagttcccaacgggattccatcccattaagagcgttgatcaccaccctcgaatctgttagaatttattttacc

SEQ ID NO: 395117 - DNA, 531 bp, Cannabis indica
agttattattattattattattattattattattatatttcaggataaccattaacaaaggttattagattaaaggtacaaagtttagtccggtcaatggatttcttttatttatctttcttaagggtatgcaatttttgggaaatattgtgcttcaaagaaaatacaaaccaattagattacaacttgttatccgtgtttctgacaagggacacgtgtgttatacctattttttagactatttaatggaaaagtgaaattgagtgccagatggcctaaataataaattctcacaataaatacattgtgggacatgtcgaaaaaaaactcaggactcaacctctgaggtgatctcatctaaataaagatcgcaaggttcatgaagtgaggtatttcagtattgtcgggatgttatattaataaacattcaacatatctcgtagctgctcgtaatacaaagatcatgtagctactcgtaatacacagtagtgataaatcacctcgtaatacacagtagtgatgaatcacctc

SEQ ID NO: 395118 - DNA, 560 bp, Cannabis indica
aagtctatagtacactctctaaaatagtattttagtagactttttatctgtttcagcatcttaaaaagtttttcagttcaatttttgttttcttcatgatcgtgcttgttatagttatttaagactacttgtaaattttcagaaaatttgaatagtttacaatgccaaagataagatttacatattctattacatgcacgattaattttttttgatacgtgcggtaaataattgttttttttttttatttgtaagagtaaccattacatgtacttagagaaaaaatgtcgaaagacaaaagtggcgagatttttttcatccaaaaaagctaattatttattctaaggaaatgctaaatcaatatgtgggccaaaacattaacgttatgactacataaaaatatatagggatataatttttgtaagaccgcatatgattaataccttgaattattaaataattagggtttatgtatgagattttattattattaataataatacagttatgggaatttatttgagttcgtatatatttattatgctatttatgtaaatttc

SEQ ID NO: 395119 - DNA, 1082 bp, Cannabis indica
ttataattgtctaaaagttagtatacaaacacataaaataataacataagtataattatctcacctaaaataaaatgaatactactacatatcacttgcatcatcatcaatatcatcattgccttggccatcattatctcccacctctgcctgactagatccaacatcatcaaactgcagtggtgggaggtctagctgaaattctggaatactcgcacacaaatttctgctccaatgcccgcataattaggtttaactgtaattacatatttttcttttgcagcatcactcaaccactggctcttgtcattctttttcttgtagagttgttcaagagtgtcaataacacttggataggctccagttgttgggttaatctaacaaaaaaaaaattaattaaaagaaatacatattaaaagtaagatgatttatgaaacttttcttactttatcatggatatatctcatgatggtcttcgaactgtgcgcccctaatgtaagcattttggactgtgtcactttgtttctcttagaaattgccttcaaaagtaaaaaagaattcatatatgttaaatagaaaaaattcaagaaaaattaagtaaaaagaatcaagaattttgcatactctcattatttgaatcattagcggtgaaagtaagccatattttgtaaaagatgcaaagcaataggtgttgcaaatttgaaaaaggaaaggaaaactattggcttgatatgccattaaaaataaatacgtcaccactacaccattcgcactgcatgtaacaccggaaacagtctccttcatcgactagaaggattcttgaaaccgaaggtgttcgaatctcgatcattcttcatctacttgtaacatcgggtctcgtttagccaaatggtttttcaggaacgagatctacttgtatagatctttcagatctcgtctaggaatgagttttctattttgttgcagtgagttcttggtattttacattgaagaattggggtttttgtacaaattaaagggaaaattaaatttcttgtttgaatatggagtttatttatttatttatttattttttgcttgaa

SEQ ID NO: 395120 - DNA, 960 bp, Cannabis indica
tgaaagtcccccattccgtattgcctaacacaattctccttaatatctaaattcttcttcttttccatctgttttgacttcagcgaaaccctcaacccatgataggtatactacaatgatgcatgaatcaactgagcttgcatcgaaactgatggcatatctagaaaatgatcaaaacatatttccttaaaaagcttaagttgttctgtagacaattttttcttaatgacctcaataaaatctacttttgaattaggatagaaagaaatcttttcaatcagtttatctttaagcttaaagtaataatctcatagctgcaaaaaatttatgaagaaagaaaaattaagagaaaaaaaaaataaactaacaatttagaaaaaaaaaaaaaaacaaaagtaactcactacagaatcaaataaataattgttaaaaaaaaaaaagcaaccaaacatctaaaataaatcaaacataaactatatacaatatcctaatactctaaacatgctttatataaatccaaatacaaaataaatatactacagttatttattgggaatgatgaactaaaattgttactaaacacaataaaaaaattaaattatttttttaagaactaacatggcagtactataaacaaatagataattattgaaaaaaaatacaactaaacatctaacaaaataaaacatcaattataaaaattatcctaatactccaaatagtctttatattaaaccaacacaatacaaaaagactaaactcattcaacagttataatgaaattccatactaactcaccctaaatcctaatactcaaagcacccattagataaatcaaaacaaaataataatattctagagtaaagaaattccatactaactcaccctaaatcctcaacagaagacaaaataagaaaactaaacataaagtaaacataaacaacaaaaaagttacaaaat

SEQ ID NO: 395121 - DNA, 1504 bp, Cannabis indica
cttttattatggaaagataatgtggatgtaactctccttaactttaatgcaaatctttttgactgctacagagtgtgcgataatggacctacttggaactttttttgcattttatggtgcaccagaaatacacaattgaataacacttagatgctcttagaactttgtaaggatgttgctcctttaatgtcatggttggttattggtggttttaatgaaatcttatcaaacaaaaataagcttggtggtgcattgtaatgagactcaaatggataactttggaaaagtccttgatctatgcaatctttatgaacaaccactcgaaggtgatccatatacttggattaaaggacgacatgatgtgaatgcaattgaggaacgacttgattggtgcttcgttaatgatgaatggtaatggagttttgaacaaattacaatacaacaccttgattatttcaagtcagatcacatggcgatttcagtcaactttgttccattagctggccaaaatcactgcctccataggcactcacggttcaattttttttaaaaaaatctggcttgatgatcctgaggccacgaagttgattcaacttaattggaagaaacaccttactagttcaacaatagaaaatttctgcaataatattcaagcttgcaagagctctgttcaaaagtggcataatcagaaatatggcaacatgaaataaaagatctgaaaggctaaaaatgcactatctaatctaaacaatattgttgttaaattagatgctacaatggctgagctaaaaaaaaaatgaggacattttggacgaactactagcacaggaagagacttattggcaacaaaggtcaagggtaaattggttacaaagtgatgatgaaaatacaaaattcttttatgcttatgcctcttctagaaagtcaaataacaccattaactccttacaaaatcgatcgggtgttgcagcaacttcaatggaagaaatgactgagattatttattcttattttggtgatttctaactcaaaatcacctcatattcaacaagtaaactacgaaactagtaccataagtacccaaaaatagttttatgaagtcataatccccataactactctaaatcacaaagtcaatatataaaaccaatcattttcaacttaaaacaaactcaatccttaccttaaactttccttcttcaatgatttaccatcctactactaccggagcttgaattactaggttcgagttgaaaattaaagaaaattaattaagagaaaaagggtttcgtcgcaccataaaagagagtttcgttcatttttctgtttacgttttaaaaataaaaacttaatttatatactcataaagtttaaaaaataaattttattattaataatattaatattaatattatataaattaataataattattttattatttcttagccactaaaaaatctctacttctaggacactatatgttgcgaatattttaccagga

SEQ ID NO: 395122 - DNA, 784 bp, Cannabis indica
taatttttttttaatttaagtcgttatatattacattgcataacctgagactatatgttaagcgttgatattacactatgcacaaacaccaattcttttttttttttgtattgaaaataataatctatgcatagtgttggttgtgctatatatatatatatatatatgctttggttcatatttttttggtatagttgctttttttattttgttttactttttatatttttttttttataacatgtaattaattattttcatactaccacaactattaattatttttgtcatttacatctcatctcaatttttatgttttttgtcatagcttaatatttacaatatttttaaaaagaaaacaaatggtgtaaattattttcttactaccatatttttgtcatagcttaatatttacagtattttcaaaaagaaaataaatagtgtaaattatcttgtttttcgtcactttagcttaatgtttacactatttttataaagaaaaaaaaataaaattagcaaagacaactataaaataactaataatatattttaattattcatttcatatatttcaataatattaattattctatttacaaaacagtattattatcttactctttgagaaacatagtgttgggttaataaatttaaagatatttataatcttctattttgagagtattctaccttttattataaaactaaatatttatttttattttttaattatgttatacatgctattttttttttttgaattaatcaggagatttattaatta

SEQ ID NO: 395123 - DNA, 1277 bp, Cannabis indica
cattttatttatcgtattcgtgacaatacgtttatgacatgacatgattaaggtaaacacaaatacgacacattaattaaatatgtcataactacaaacacgaccacaacacaacatgacacgacacgattatcattataaatacaaaaattttaatttttttataaaatatataacacgactattgtgatgatcgcttgactttttatgataattagttgatatttaagaatttgtttaaatcttctatagttatatacctcttagtagataattaggacttattgttagaaataaactttagataattattttttcaattacgaagatatatttaaactctaggtgtattatgtatattagatattaagttttatgtttttcatattttatgcctagttttattggaatgcgacgatttggccattagagtcattcaggtatagttgagtaccttaaaattagcgaggcaaaatagttagacatttagaatgtcgagtttattcaggattataattttagactattttacccctaagtatatagattatttcttagtgaagtaaagggcaaattgataatttggccttagtttgtcttttagtgagtaagtggaagttgtaaaaaatttcttagtgcttttgtgttataccaagctgaacattaattaattcaaagttatccaaaaatcaaacctctctctctttccttgtgttcgtccaaaagtgaaaacccaaggaacccaatattttttcatccatttcagacctggattaaggggttttggcaatgatttcatgtgttatagtaaggtgttgaagcaacgtaagctcctctccctttttcttcttgaattttaaggaaaaagttaggttttcatgtagttttggggatttaggttctatttaacttgggaatgtttaagattatacctttactttgatacactaccaacttgttttattcatatcgtatcgtataatcttaattctcttgtacattccttataagattatacattctccatatgaataagtaattttcagatatttttactaattatactattataattaatgtatcatttatcttataattgtatttcatatattctctaatatattatccattaacctaacaatctctcatttgcactaaaagtaagtgttgcttattctataactcttataaatgttgtgttaattccatttttggtatatttaattgacaaaaatattttattgtttcctattaatttcgactggtatgtgtttaat

SEQ ID NO: 395124 - DNA, 738 bp, Cannabis indica
aaagtaatatcaaacaaacacaatctcttcactatcaaaccttaatttcaatcgtagaaattattcactatatatatatatattatattatattatattaaattaatcactaaaaaaactctttcttatatatttttcttaaaaaaaaataaaaataaagaaacttatatattacgaacccagaaaccaaattataatcgtaaaaatcactaagaaaatctcaaacttagaattaaatcaaaacaaaagacaccctttaattgtatacacacatatacacatataattatatatatattatatatatgatttacctgagaaacagcatgaagaacatgagattgatcagaagaaccaaaagaattaataagttgaccaaaaatcaaagtcataatgggctgagaaagcccattagccaccgcacaaattgagcccacaaccatcaaaaccatatccaaactatctgcgaatgtaaatagcttcaaaaacgacaccttttccacttttacgacgtcgtttaataccatctcttcctccttcttcttctctttactattaccactactactattattttctccctccatattttcttcttcttcttcttcttatttcttactttatttaaatttaaataaataaaataaaataaaaccaaacacaacacaaacttggtatgaatattgtattgcggcgagttatatataaaaacgtaatttgggttttgtttggtatgtt

SEQ ID NO: 395125 - DNA, 687 bp, Cannabis indica
agcaaagtgagtacggtaaatatatgtaactttttattgccctgttttcagctccatatattatgtacgtacagtattaattatcatttaatccatacaaaaattagagaaaggaccacactaatcatttcatcattaattatcaaaattttatttatgttttaaacgcgtacgtgcagtcggctcctattttgagtgtataattttgagaatatttataatggcagctggtcaaatggtttcttgtattaataatatttgtatagaaaaaaaaatcaataaataatcttttttttgaaagaattcaataaataatctaaaagatatatatattacacttatatagcgtttttgttggtaaatttcattttttacaccaatgtaatagactttttctgacttttgccgtatactaaattagaaagaaaaaaatgtgacttttgtttcaaaatattatttttagtaacttaagtgcaatatttcagactatttacttatttttaccatttaagataaactattcagtaacttttttgttaatagtaaaactacaaatttatttctttttttgttgaagagtaaaactatttagaaacttacaacttttcaaactatataatttgaagttttttaaaaaatactatattttaagtaaaagtttacaattttactgtcacacgaattttt

SEQ ID NO: 395126 - DNA, 1426 bp, Cannabis indica
gagcaccttcgcaaatactatcaataaccagattacagaactatactacaaagtaatgtatctatctactcaacattagagtacaaaaagccctagcacaaacgaccctttttgggcgtggtctcccattgttcttcaatagtggcctctacttcactaggcaagcaggggtagccacttgacatctagaagctaattttgtgtaatatatgcttgtagattcagtttatgtaagtttcacagcaacaaagacctattaatgagtaataacaatattcatattctgtttattgtctatgaaccagttactcatagattaattgtttaaagttattcttttagtttcacatgcatactatggtaccctcccgagatagaatccatggaaagtctatgaaacttagtgaatagcaagtgacaaagagacttgttttcatggtcacttggcgggtacccatagtgtacaatgcatcagactagcacaaagaacttatgcagaaaaatttcaatgcctagtataagctattaaaccaacctctaagtcatacaggcatactttagcttggcaaagtaaatttgatccttactggtcaaggccataagaagatagttaggattaaagacctcctggtctgtcacaaaatccatgataaaaagcaatagggctaaatactagtagtgttcaaaaatagagggctcatggccaaagatacaaacaggaaggccctgaggctaaacataaagtaatgttctaaaaggcctcaagccacatagaacatgaaagtagtgttctaaaaagacctcaagccacatagggcatgaaagaaaagttccaaacaggccacaggtcacatggaacacaaaagtgagtaatgttgtaaatttaaaaggccacaggccataaaaagccacaagctatgcggaacatgaaaacattatctatgtaatacaaatataatgctaaatgatgctattaaaaatattatctaaatgtgtgtaggggcagaaggagctgaatctggagccgcgagaccaagatccacagagtccaggccagccgaatcaacaccatgttggctggcctggtggtggtcagtgtcttggctggtgcatcctcgatgatgacccctctcgataagcatcaacctagtggttctccatttcgctctcgaatagtggctttccatgagccaatgtatgacactacaacatgagggttgtccaactagaactcataagtaaattcagaggataagtcgacatactcttccttaatggcctgctggccatcaagagcctcctacaacttcttcttgttgtcagcaaggtaagattgcaacctagagatgaaggcagcctgggtggtgctctctgttggaatttattttaccaggatcttagatctactcacaagtatgttgattaa

SEQ ID NO: 395127 - DNA, 1051 bp, Cannabis indica
acaatttaagtactaaaaacatgtgtttctatatcattttacaactacaagtgggtactatatacataactaatatatacatatatatgatatatttaatttatttgtatatatttgttgaatatttgagtattgccaagcattgctgaaaaatcaataaacaagtcttttatcttcgtgtgtgcatgcatgtaacaacatttatatttcttcgacaaatggatattcaaaatatttatttcaacacaatttatatatatttggtaggttacgtagttatttactatgatggaagtctattacaatagttattcactttctccacatattagtttttttttttttattgaaatggtgagtaattatatatgacctcataattttgtaagaaagcggttgagtttggttagtttgaattagatgggatatatatgagtagtgtacacgtatgcataatattggctgagaaattaaataataggagttggaattgcaactcaccatgatcatatatgtgagctagcttaggtatatataataactatatatatcacttaacacttacaaattacaatttacaatcatacctacaagtagctatatatatacatatatatttcagtacactgcccctcttaaatatacgatctcttttagttatagttataagcgtatgtaaacatatatgggaaaattgtttggtgagtgcgtcaatattacttgtatgataacattttttgttttatatatagagaaattatgacccttacataataaaccggctcccctgtcattataggtcaccaaattttttatcttccgtgggcaagcgtcagctctcatacatggtcttacgactttgcaaaattgtttcatgccacaaataaattcgaacacttgaaaaattcgtcgggcaggcaaattcacatctcttacaaccagggccggccctgaaaatatatgggcccaagacgaaataaattttgggccctcaaaaatacattaaaaaaaatataaaaaaaagagtattatggaatttgaacccatgacc

SEQ ID NO: 395128 - DNA, 1111 bp, Cannabis indica
ttataatatgaatcgaaatttgtatgtaaaagtcgtatatcaatgttatgttgtaaaagactacatattattatagatcaaaataaagataaaaaataataactttatgtatacatatatatacatttctatacattttctttttacattattttttaaaggataaggcaacatttattacgtttttattttatacacttaattcttttttttttatagcaaaatccttttatgttttatttttttgtaaatttgaggcatcagttagatatcagttggattaccactgtattgactttgaagttttactgtcacatatatacaagtgtacataggagttttaccaaaaaaaataaagaagttaagtatataaaagttaaaacataaagaagtttcggtgctaattactcatttcagaaactataaatcattatgttgtaatagctatataaaagaaattaaaagactgtaaagatagagttatgtttggatatagtgcgcagattataattacattctattatttgcaaaatagaaaaggaaaaagaattataacgataatcgtgagtaattaattatgcttataatatattatgttatttaaaatgtggcataaatatttattcaataatacaaatgttcaaaaattataaaagtgacaaactaacgagtataaatatttaggtgtttctaagcaccaaaaaagcactgttataatatgacctttggtttatagtttttaattttatatatatttggatgtttctaagtactaaaaaatactattacaatatgacttttgattttatagttttttttttttttcaagtttgctaattttatttattcattctttcagttttaagttttaatataagattacagttacaaataatactaattaagctactgtatcttatctttttttggtgtaattgttgaatgtcgaacgactcaaaaaaataagtcatttataactattaaagtattgatattaatgttaattacttacaagtataaaataattataaatatgtataggactcttctacggtaaagaattttctaaatggcttatttgtaggatatttaatagtttgttctaatgggt

SEQ ID NO: 395129 - DNA, 1495 bp, Cannabis indica
ttcctcaaatcttttgttcaacacaaactaccattgaataatctccagtttcgttataccaaattcccagataacgattgcttgatgatgcagtaaagaatcccagttgaaaccttccttctttggatgccaataaagttgttctgtcattataagtcggatgttctgatgaattataatctctgagaaacataacatttgttctattgttctgttattatcatactcaaatgtatgtataagtcctaattaataatggtcactttcttgacccttttcatcatggtggattaagcaaaggtgcaattcattactttaatacttacctataacatatattgttatataagaaaatgcctgagttgtaattttttcaactactaaaaataaaataattctaacattattttaatacatgctctcattttagggtgttataaataataataattaaaaacacaagttatagtatatgaatatcaatatagcacacatacccaataaaataaaaagagacaaaacatttagacatatgaataataaaaaaagtaaattaatcaaacattgagagagaaaagaagaaaagaagaagaagcaccctctgacttctcaaaggataaggaagaagtagaagaaaaatgaggcttttcacaccgatttagtagtagttagcagttttttatattaattattaaatcaaaatatatgggactttatattaaattacaccaatagcgttcaacataacacctgttgtggtatttttcttttcaaacacacctaatatataatatatttttcttaaattttatttagatagtacatacaaacgctaataaatatatatgtatatggatattcgaatacttacgtgtaagagctttcactatataactacctgcctaccacttgcatgtgctagtgtgtatatacccatatagggctatgagggtaggaattgggtattttacctatcaatagagatagtgatttatagcccttgatttcatccaatggctcaaatcaactcttgaaaattacaccaaaattaatatattttatttatttataattaatctttaatattattaattgtagattcaactaacaaactcaaaacctaactccaaacctaatgtttttatctttctattttatttctatttaaaatttagttttaattatatttttttttaattcaaatttacataaaaaatatttaattaaatttattttaaacaataattatacttataaaacttataacatattcaacttataataattttataataatcactcttaagataattaaaatgtcatgagttcaatactttagaagtaatattttcttttcttttttttattacttatattaatttaagatttcaattaatttaatagtttgaaaattctaatcatattatattaattaattttatttttctaagattataatgttctatgtatttaaaaattttaagtatataaaatt

SEQ ID NO: 395130 - DNA, 999 bp, Cannabis indica
caagacccatgtgggtcacatccattctctctagtactcaccctttatatttacaccaaatttaacctttattatatatatattttagtaaacacgttatttatctatacttcaaacactttcataaatatatatatattttgtcccgtgtaatttcacggaatgtattccgtggtacattatatgggtttcagggtacattaaatgagtgtcagggtgcgtttcacttttttaaccctaattaccccctagatcaatctcagccgtcagatcaaataactcccttatctgacggttgccgtacatcacggattacaatccgtgaaagtacaataacgggacaaaatcatatccctatatatatatgattacatttaaattattagactattagtcgtatcccctctacttgctacgtacttattaagggtacaattaatacaatatacacacatattatatatgtttcaacttcttgacatatgacatgccatatttgattggtcttttttctttctttataattatgtgattaattttttttttaattaagtgtttatatattataacatgttttatttgggactcgaacccaggatttttaacactcacacacccacttatgctacttgagctagccccaagtagttaattacgtgtattaattaaaacttggagatatttataatagataatatagatgtataccatagttattggcatatatataatataagaacaactcgttattaattaattaccttaccaaaaagggaattcaattcttaccgacttgtgttagtttctgccatctcacattgttgtataagacttttttaagctaatatttagttatttacaagttttgaagacccaaaacaagatggtccgcgtatttatagctctatgaactttttgaccaatttagttacttgtatacatattttacgcaacttagtttttttttttctgaaaaattttacgcaacttagttaatgt

SEQ ID NO: 395131 - DNA, 922 bp, Cannabis indica
tattcttttttctttttctagaggagcgactgactgctccctctcgtctttatgtgggttcatccatgatatggtgtatgtataaattctattatcttgataattttgaaaaataatatttttctccttttgattccaaattaattttatattatgcgtattttttaaaatagttatttatttatttaattaataattatcgtaaggtgtaacaaaataattaaataacatctaagtaaattttggcattaacattttctgaaatatgtaagccactaaatatgtttaaatttatattctatgctgtatatattatgatagtgagattaacataattgaaatcattttttttcttttttttttaaaaaaaacataattaaaatcaaatatggaaagggaataaaagggaattgtccttaccaatgctaaaagtttttggggactcatctgtgctctctgcatgaatattaataataaaaaaaaaaaaaaaagattagaaactattggagaatattcataattaaaatgaaaagtagagaatcaagatcaaaagagaaaaagttgggattaaggtaccttgcaatgccatgttgttattagtttttttttttttgttttttgtatgaataagaagagaatgatgatgaaattgagatttgagagaatatattagtatgagagaatgagtccttatttatatagtttcacttagctttataataaagctagtttccgcttcaaatgtaagctaccgtgttatatatcaaactcaaataaacttggttgggctcgcctttattaaacacacaaaaagcccattgggctcccatttccttacatcaccaataaatagggacaatttcagaaaaacacaaaaatacgttcgtacaaattggtatactcactttactttatttgtttt

SEQ ID NO: 395132 - DNA, 459 bp, Cannabis indica
gaaaatgtatgagtttataataaaaaaaaaaaaaaagagaggagatatatgttaagaaaaaaaaaactagcaatatacaaaaaagaaaaaaaaaaacaaaacaaaacaattagcactatgtatatacctatcaaaaaagaaattataaaactaacggtaaattccacaattaaaaacatgagtgttagttgtaatattttttttcaatattttgtttgctagtgtaattttttttaaaaaaaattgataaacgaggtagttggaagaagaagatgacgaaagttggtttttggagttttgaaggtgtatttcgaaagaataaatgctgaaaggtgatttaagctaataggtgtaaatggtattttagtaaataaaaactcattaaataaaatatcaatttatattttattccattaatagctttatatatatatactagcaaaaagttacgtgcgagac

SEQ ID NO: 395133 - DNA, 1543 bp, Cannabis indica
caaaaattggtacaatgtttaaaaaaagaggtaaaaatgatagactttaaaaaagagggtaaaaataaaataggacaatataaaaagggtatagagtgtaatttcctctaaattaaatagtatctgaaacatcatataagttacattaaaaaaaaaggtaacatcaaagtatcttaaacaataaaatgacataatatagcttaaaaatataaaaaggaaacaaaaagtttcttttaatattagccgtcatttttttagagacagaaaaatatctgtttctcacatattaaaatggttattttattatttatatatgtgtaaaattctgaaataaattttttaatggaaaagtaaccaattgatatcttattcacatcaaaagtaactaaatggttgcttttttttaactctcccgaacaaagaaaatttctggaaacgagatttttttaatttttttaatttttcggtaattattttgaatttcggtatgtatgctgacgtgtcacaacggtatttacgcaaataattttcttaaaggtatttttgtaaataaaatcaattttaggtataatattgaaaaagtccctataataaatacgacagcatatcatgaaatttggttattttaattaataatgttagtgattgggtatattaaaattaatttgttaaaattgtaattaatttcaataacttgcatgagaatgtaaattttcctaaaatagattatgtaattttaaaaagaattttttttttgttaaactgttgaattaagtgggttttagacacaaacttaatctgcttgtatttatagctgggcctgtgtatagagacaattttctacacgttggattaaagaagataaaatctaatggtggtgattggtttcattctaacagctcacatacaaacttaagggtaactaaatttttgaaaagtgctaaaatataaccatatactaatatatttgcattttattgaaaatgatcttagtacaacaaagctcagtgatggactgtatggatttatacaaaaatattagattttgaataaaaatttataattttactgtcacataaaattatttacaaaaatactatctttttataaaactactctaaaacaacaaaataaaataattaaaacaatagtagaacaactaaagaacaaccatggaagtgaaaacttaacacaatacacagtataaaaaatacacaatattttttaaaaaaattctaccccacaacaaaaaattagaaatttcatggtgtaaaaatcccaataacagagcttggacttcaaccaattatgccaaaaataacaagaggaaattatactctataccctttttatattgtcatcttttatttttaccctcttttttaaagtctatcatttttacctctttttttaaatattgtactaattttgccattgtcacttcaaaatactctccatgtgactctcttatatcaggttattttaggtacaatacatataaaaagaagtatgtttcaaaataaatataaaattagaggtaaat

SEQ ID NO: 395134 - DNA, 1960 bp, Cannabis indica
actaactaaatctactttttctccctttaggtagaagagccggaaatcagttgtaccgcacaagtacaaaaaaattctctttgcagcaagaacatgtatctaacttggacattccatatacctactaataagactcacaccatgcattatatctgggcttgttgctgtcaagtacatcatacttctaactatttgcttataaagagtgttgtcaatcttctttccttttggatctttgataagcttcaaaccaacctcagttggagtgcccacaagattgcaattcttcatttggaacctatataaaatttcttggacatatttcttttgagaaataaaaatattatcattagtttgcaccacttttatgctaagaaaatagtgaattagtccaagattagtcattttaaaatcaagcatctatggatcgcttaaatttttcagtcatggcactatcatttccagtataaatcagatcatccacatataagcaatcaatgagcatcttacctccatctctaaatttaaaaaagtgtgtgcttatatggacatttatgaaaaccttcctttaaaaaataagcttcataccaagcccgtggagcttgtttcagtccataaagagtcttttcttatttatacactttatgctcatttccaatcttaacgtagcctggggttaatcaataaatacctattcctccaggtctccatgtaagaatgctgattttagatccaactggaagataggtcatgagttttgagcagctaatgcaatgaccaatctgattgtctcatgtctcgccactggaccaaaactatatttgtaatccacaccaaactcttgcttatagcctttagccaccaatcacgctttgtgcttgtcaactgcaccattttccttcaacttcgtattgtacacccacttaacaccaatagtctcttaccttttagaagctccatcaactccaaagtatgatgtctttctatggtcgccatttcatcatccaacacctttctccactttaattctttagcagcttcttcataagctactggatcacaatctgaaaataaacaaaaatgcgtgagtgaatcctcttcagtatcatcaaaattagatacctcataatccatcatccatgcaggcatgcaggcatttccctctctcgttgaggcctttgttcactgggtgcttcattagcaggtggactttgagtgattattgttgttggttgttgaaatttctatacaggccgttgctctcttttctcttcatcaccatcaaaatctgttagaatttgttgttgaacaatgttctcgtttcatgcccaagttctttcttcatcagagattacatcgtggctaaaaatgattttcttggtgttaggattgtatagcttgtatgcttttaattgatcaccactactacaaaaaggagtttttgcgtcgtcaacgcatctagtcaaacttgttgactgacgcaaaagtcaacccatacttttttgcttcagttatccaccgatgcaaataattattaattagtgccagttatgtatccgacgctaaaacaaaaactaaagcaaaatataaaatatataaaaaaaaatgtgtatacactattagcgttggtctacaaccgacacaaaaaatcattatatacactattagcgtcggtgcacaaccgaagcaaaaagacattaaaaaaaataagttatgggctttagcctattttaaaaaaacctaaccctaaattataaatctaaacttctaaccctaattttctcttaaccgcccctctctcatctatctctctctctaacctaattccctctcttcacccatcatcaccttcatcttcttcctttcttcttaacccaaccaaaaacatgaatctctcaaactctaactctctctttctcatttttttgtaggtggcattggagctcatcgtcggccctca

SEQ ID NO: 395135 - DNA, 1084 bp, Cannabis indica
gtcgacatcatcttttttagtcgacattatttttcttttcttaaaaaacactcattcatgcaaaaccattgttaataacttaatgtatcgttttatcatatattttgaccaaaaatcatattttcattgcaccattgttgaaactgcattgtaatcattgttaaccatcatctttctgtattttttcaaagttaaaaaaatacgcaataaaagaaattgtacgtaagtggggttttttttaagagaaagatcaatgcttcattagcaaagaatctcaaggacaaatatctattataacgctcaaagacaagcaaacgcaaatcattctcaataaaggcaagcaaacggcaacaaaactaatagattgacataccaaggcacgcgcccaaaatcaaagtcgttaacaagtagcatacataattgtaggtaaggaaataaaccaagaatacaaaccctcgtgactctccacaaccgggacaaacaaacaacataatgcaaaaaacaaaaacaacaatggccacaataaatctcaaataaaataacaagaaacaaaagcaaaaatcactaatccaccaaagatccaacccacaagctttatctttccaactccgaaggaaccacaaacttagaccaccgatccaccacactagaaccccatgccacactagacgagttcaaaaacttctacccacccaaacggcagaacgaagggtgaaaggcacaaaccgaccgatggatccaaccagagatccatcgacatgcacccggacaaccccaaccaccctgtcattgaggcatagtcgtcgccgacgaagaagcccaacgcttcacagcacccctccaaacattgaaacatagtacacgtaggtggttgaaatacgtatattagtgtcttaagagcaagtgcaaggaggcactaaactttagatttggtgtgtgtaatctatccaatgtagcagcaaattgtacatcatatatgccgtgtagctacagtgcacggcatatatgctgtgtcattgtagctacgacattcttttttttgtaataattattattatttaatttatatttatagatattgata

SEQ ID NO: 395136 - DNA, 1078 bp, Cannabis indica
cagtcctcagtcttatgtcctaacccagaacagtttgaacatgtgataggcttccattcgtactgaattcccacatgacaagccgacccatactcatcttcaaattctaataagtttggaagctcttgattcatctgaacctcaatgagaacccttggaaaattcagcctctccctctctcttatcaccctatcaaccataatcggtttcccaacttgaccaacaatcttgaaaagagatttctggcccccgtatttgagttcaaggtcttcaagatgcatccaaattggaacttgtttcactaacatttttttatatataaccactaacattataattatagtagacacttttgatttttttttttattttgaataatgtacagtattgaaaataatactaaataatcagttgtgtgcgtgtattaaatttatttattttatatgcttaaaatttactgatttaaacatactatgcataatatataacaaaattatgtataaataaaaaattgcgaataaaatttctctagctaaaaaaaaaaaaaaaaaacgacccattaaatgcaaaagtaatgatctattataaattcattttagttagtttttttatttttacattttaaaataataattttttttttttggcattattacaaaaattcatataaaaactcacataaaaattaacaaaacaacttaaattgtaaccataatccacatagcaactcacataaaaattactaaagcgaccaaaattataaatttaaaaaaaaattaaaaataatatatagagtaatttccttttatttcattttatgtaccccataattaaacattttttcctcttgaaataaaagtagcattccaacttaaaaaaaaaaaaaaaaaatgaaaagtagtcattagatatatactgaaacacaaatttatacatctttctcaaactatagtttatgtatagaaaaagaaaaaatatatgactatactaaatacatgcatgatttatcactttaaaacaaatttatacattatcaatcatatttatagtttattgattttattgcagatgatcatta

SEQ ID NO: 395137 - DNA, 817 bp, Cannabis indica
cttctctctctctctctctctctctctctctctctctctctctctctctctctctcttattttcttctttatccattaccactctcacccactctttctctttcacatactttatttctcacatttttactattttttttttaaaaaaaattttaatactcttatttatctttctcactctcacaaaatttgttctatttttttaaaattagaaacacttctattttttttttacattttcttactagtcacattcgaatatgtccaatactatttatttttataaaaattaattatattttttttaaaaaaaaagagtattaattaatttcacttaagctcttacaaaattaattataattatttccattaaagtaatttatataaaattattaaattattttttttatggcttagcaagtatattattacttcaaataacaatttgtacaacctagtagcatcttccaatttgaagaggacttaaaaaaatctataaaacctttacaatgtatgaaaccaatctttttcactattagttacattcttaggccaaatacaagtaattcttctttttgttacatctttaattttatacactattctaccactattatccatagccttgccaaattttgctattttggttggcctatatgttgtacacaagggcagccaaagcagtcgagataaccttctttttaaacttactcttcttagcctttccaatccacttaataattcgtggcaaagaggtggaggtagttccccaataaaactattttttaatatgctccaaactgttggaaattatttt

SEQ ID NO: 395138 - DNA, 653 bp, Cannabis indica
ttttttttaattatttattaattgttagtttaatatataattatgcccttgtttattttttctcaacaaagtaaaataataatattaagagatatttgtgataaaaacattaaactattatgtatttaagaatactgttattgtgtactagtggtgcttaatatttgctataggtggtcctttacgattaattagttagtggtctcgatacttaattacaccaataacgcgcggtatgacactgaggagagtgctaataaacactagtggtgccttttagtaataatctatatttaattacttaatttttttgggttattggcggttaaactattcaaactaggggtgtacgtcggtcaatttagtcggtttatgttatattttattcaaaccaatatgaagatcgggttacaaaaatctatgtgcaacctacctaattaagaaaaaagaaaatagtaacccgcctaataaaattagtcagtttggtcgggttaatccatccaaaccgaccactaatattttttttatttacattcaattattacattttaattaattgtaataattaaacaaatatatataaattgaaattaaatttcaaatcaaccactataaaaaaaaacatattagtttcaataggctaattaggattt

SEQ ID NO: 395139 - DNA, 2069 bp, Cannabis indica
tttttttatttgtttctcaagtcgtttaattgatctcttgttatttctctcgtcagaaaatttatcaggcgtcactgactcatcagtactcttgagttgctcaaataaggtttcatgctctcctgtagcagtagtgctcatgataatcctatctaacgtttgctctaaatttgatcgaattcttcaaatgcaaaacttcacagcattggtatctctacaaaaaagaattttgtaaatgtaaatataaattcatgtaacaatatttttatttcataatggtatttggcaatatttacatgtactctagtttactagtgcacatacatgtattcagcaataatgttaattatatagctaaggtcaaataaagatggaaaaaccatgatatagtcaatttcataaagcaccacacttcaacaataagacacctaatgtatgaactttattttatttgatgtgtatcacacttatagtactttcgatactccatcacttcactaatatctcttacatatatataaaagagggaaaaaaaagtccatgtctgtgacttcccaaataggctctttcaacatgcatttaatcaggtagcatttggtcctaaatttactctaaaactaatgatgttcatgtgattatttacaggcccataataacagtgaaaatgtggttggtaagaagacctaaatttcagtttctaccaatgaacataaactattgccacatttcaattactgttcaatcctctaaaggtgggtttctattcctgtgcaatggctataaattaagcatttctatggatttgcagacgctattcagcattgataagttactttaacaacaaaaaataaagccataaagctaaattaaagtccaaataagaaaagaaaaaacacacaacacaagattatcataaaaacattcaagaaaaagagacaataaacaataatgacaatcaagcaaataaaacataattaaaagaaaaacacaaaaacaatagagaaacctgaagtagatctttgaccggcggcgacaatagaggcgagcagtgtagtgaatggccggaaatggttattggtagtgagtaaaaattttggaggcggctagagaagaaatatagaagagaataaaaatgaaataagggttgttttttttgtaactacaatttgttttttgttagggaggtttaattgataaaaagagaatctcccataaatgttggaggtataacagtttttgagtatagcttttctttttcgaagggatgtgttaaattcttgaataggttatattttgatatttatggtacatttttttttttgttttttccatttatactttttaaaattaactttttattcacttatacttttataaactttttattcatttataaaaatagaaactaacataatttcgaaagtaaaaatgaaacaatatataaaaaaattataagagtatattattttatggcaatttataaaaatagaaacaacataatctcgaaattaaaaattacataatatatgaaaaaattataaaattttatttttttatgacataaataaataataccatgaggttatgggttttgaatttttttatatttatatgtacttatttttgttaaaaaaaaaaaaaaaccctcatatttttaaaacaataataaattttaccgaaaaagtcaccgaaaaaattagtgtcgtcaaaaaagtcaccgaaaaagttaatggaaaatcaccgttgctggaaaagtcaccaaaagtaaatgtctcggctataaacaaaaatagaaccagttctataacataatgaataaaaataaataatacaaaataactaaaaccggtgaaatataaccagttctgtaacataataaataaaaataaataacacaaaataactcaaattagttataattaaaatagaaccgattctataacattattataatgaataaaaacaaataacataaaataacgcaaactggatataactaaaatagaacctgttatataacataatgaatgagtattttttggtagttatggtatgagtgtaattattgg

SEQ ID NO: 395140 - DNA, 589 bp, Cannabis indica
gtagactatacatagtatttagttacaagttgtcacttaatttattttagtcacaacaaatattatgactaaaaatacattaagtcacaataattgtaatttttgtgactatacttttagccacggacctttttagtcacacataataatcatgatttataattagtcacaatttttttcacttttagtcacaaattttgttgtgactaataaaagtaagattttttgtagtgtgtgctggaaaaagttacttttatcagtgcatctcgtgaattatactggcaaaaagttagacttttgtcagagcattaatacgctgagaaaagtcatttttgccagagcttttttattttgcaccggcaaaagttctaatatataaccaacacggatttatcaatctcctttcccaggacaaaaatacgctggcaaaaataaatattgttttaccatcacaatacccaacttttaccagcacatttaccaggacacaaatatgctggtaaaagtctcatttattgtagtaatttgagtgctttagttacaaagtagaataattagtacaaaatatttaccttcttaattcttatct

SEQ ID NO: 395141 - DNA, 827 bp, Cannabis indica
aaaaaaaaaggaaagatagagaagagcagttcaatagtttggtactgctaaatattgtaagtagcaagattcctcactcatgtgaaggtttcattttcactgtagtagcaatgaaattcagcttttgctattgttttattctaattgaactcatatttccccatgtatttgttctcttccttgtcttctctcattatcacaaaaatggtataggaatatattccatggttgtccttcaaaataatgcaagagataaaaaaaaaatgtaataaaaaataagaataagaacatttagaaactacatagacaaccttattccattactactgctactacaaggatattaaaatatttatcttgtggaatgttttagaactatttttggttgaaaaaagtttatatttttttcttgtgataaaatgaactgaagcacatgttgtcttttcgctaggcataatgaggatagtaaagtaggtttgaaagcaaaacaatgataatggactagggagacctaaccaccaagtgagtggtctaataaagagtatttactcccaagcagtttttgaaattggaggtcatggatttgaatcggaatgactctttagaagttttaaatgagtaatgtgacgcatccaatcttaggtagagggccttggcaaacatttgtagagattggaattctcatagttacgcacagagagaggaaccccacctagtagcccctccacttctcttcagaaaaaaaaaaaactagaaagataagggagacatcatagctacttttgtaggattagctggtgattgaagtataaggatttttaacaccc

SEQ ID NO: 395142 - DNA, 1350 bp, Cannabis indica
gttgttccgttagttgcaataaggattcggtaaaaatgtaaaaaaattgttttaaagtgtaaaaatgaaaaaacttcgataaaatgtttgaatgacacaggtgtggctgttgggtgcggatggcaagctttcgtggcgtatgtaaacgtgggttgttactatattattggtattcctttgggtgcacttcttggcttcacattcaatctcggagctaaggtaataataattaattcattaaataaatattaattatgcatgtgtgtaaattaactatacaacaatatattaataccttaatcttttttatttaattagggaatttggacagggatgatatgcggcactcttatacagactattatattattatgggtaacatttcggactgactggaataaagaggtatttttccaagttttaacacttatattgtaactttaaacttactattaaagggagcttgatgatcaactctatcaattaattattaacgttattaaaataactaataaaagtatatatacttgatcagatcactatatgtggaaatgattattaatgaaaaggattatacgtacgatgggtcgtaagttttttttttttctttggttaattacttatagagaaatgctaaaaaccgtttagttcaattaagtatcaaatctgattatataataatttttaaaaaatactaactaattatcattagccaacacgtgtggtgtgcccaataacaacgatactcttaataatatatataatcaatttttaaattagataaaaacacgtgcaatgtttgtcaaattaaaaaataataaaagagggatctatagctcattgttgatcatactctgaataatatctaactaattttgcaggttgaaaaggcgaaaactcgtttggataagtggagtgatcagtaattcggtgaaggatgagccatataaattggattaaatcataaccatttttctgaaatttgtaaacaaaaaaaaaatatctatatagacgtcggttgatctgtataattaatattcagatcttatttttctatatgcatgggagtacgtatcattggagagtaacttatttttgtgtgattgaaactaaatatgtacgtaccgtatatatatacgtataaacacgtacccgcaaaaaaaaaaaaccctatactatacaattaatttatatttaaatttatagcctgaattattttttaccggccgtaaccagtgacgaagccagaaatttagttgagtaagggcttgaataaaatattaagtcaaaactaataaaaataataataaatgtatctttcaaattttcatcttcaacaaaataaaataa

SEQ ID NO: 395143 - DNA, 766 bp, Cannabis indica
tttcacaaagatgaaaatatgaagaaaaaaaatgaagctcaaagtggtgagaacaatttagttgctctctatgtcctatttagttcataaaaatcctaaagacagtcacaaacacgttttcataattgtacaaatatttccaaaaataatttctgatttgtagtaacacgattggaatccgtagtaacagattgggtcaaaaaaggaaactttcgatataagttcaagatcatggtggtcttatttcctgtcataaaaggttaggaaatttgctagatacatagcaaaactgaattgtcaatcacaatataaatagaatcaattataccaaaaatagaccaatttagacgaacttttcataagaagcattaattttttatgcaaagtttcctaaatagaaaaggaatctataaaaaaaaaatatttatgctcataaaagattcataataaattaaaaatattttgacaattaatattgccaaaaaaaaacctaataatagtggtaaacaatgattagtttcataggatcttaataattttattaacaatttaaaatttcatatattttatataaattttgtgggagttttttccttaaaagtatagcattaaactagtaaatatcccgcgcttcgcgtcggataataaaatattgtaaattatatgtaaaaaaaataaattgtgtattttaattaataataattacttagtaaaattatattaaaattttaacttgattattaaaaaatttgtgacataaatactt

SEQ ID NO: 395144 - DNA, 1062 bp, Cannabis indica
tattagtagtgtgtgattagtgagtcactactaattaattaattaaataaacatgtcaaaattagtaaaattactccaaattatatacttcgttctaattaatttattggaataattttcagcacaccctttaaatgagtacgtgttttaaattttcatttattttagaattcaaaaaagtatttttagcttttttttttaattgtctacgttatagttattagatgaggtgtttaaaaatctaatacaatctaatatccaattgaattaattagtactttcattaggtttagataaataattatgttttatattgttatatacttaaaaatatatataaaaattaaaattaaaacttttattatttttttttactaaaatacttgatggatttgatctgatccaaaaaaggtaagataaatttaaaatattagataaattcaaactaataaatacacatgagatgtttctattggatatagaattgatccaaattaatatttcattgaattggatcagttcgaatgattaaaattaattggatcgaataggttaaaaaaaataccatctaatatataattaaatcaaatttaaatacacttaaaaatattggatgggtaaaaataataaattccacccacttcttactaaaaattaaggaaaaaaaaaaaggactagatattgatatagtcactcaaaattgggtacttatcacattcgtccattttaaataaaaaaaaaaacaaaaagaaacaaagaaataattcacattctttttttaaaaaaattattttggactatatattttgtaaatattataaattagacctggtaaatactattttagacctagtgtttttgcaaaaattatcgattggactctctgttttgttaaatgataaaatggaccctgtatttttcaaaatagtaaaaatatataggacattgaccttaatttttgataaccttttttttttaaattataaccagcttaaagataattcttaatacgaacaattatagaaaatgtaaacagttcactacaaaaaatatcactttttc

SEQ ID NO: 395145 - DNA, 658 bp, Cannabis indica
aaaaaaaattatttataatttactatacattttgttaattattagaaatatattctcatttttatatataaattatatataataatacacgtatcatatctaatctaatttgatgattattattactaattaattaatttaattataattttatcatatctatttttttatgctatcacaatttcaaccttattaccaatcatattaaataaataattagattataatttttttattaaatactaaaaaatataaatattctaccggcagagataaaaatggtgtcactatagtgtgtcctattcataataattttcttctttcaagagttttgatgatgtattacttgtgaaaagctaaaaatagctatgattaatgcaagaagataattatgaacaaattaatttcctttcaaaaagaaaaaaacgtgaaaactttaacacaaacataataaggggaaaaaagagaaatttaactagaaaatttaaaaaagcaaaaggaaaaatattaatagtttttttttttgtaaagcaaaaagaaagttttataattttaattctctaactataagtaaaatatatttttatttaataaacaattatatattatatttagtataagtaattttccatgatattctttcacgttaaaacaactt

SEQ ID NO: 395146 - DNA, 882 bp, Cannabis indica
ttagacaattatatattaaaaaattttcaaaatcataagtaacttttattgtaaaatttatgtggggtcttgtatgataatacttgaatataataatatatttttgtaaatattgtatgtttacttttaataactttttttcgatttttaatgaaaaaaattaatttttgcataaaattattttttttatatactttttttttgcttatttatttattatttgtaattgtttcgagaacttaagaaaaaatataattttatctttaaaataaagactaattagaattttagtctcctaaactttaacatgtgccaaattatgttcctaaactttttaggtcgttaaaaattccttacaaactattgagattataggatttaaaaacttgcatgtgtcaaacttcttgctcttctatttcctatagtccatgcttcttttttatatatttttctcaatataaataagattatatattagtaattagtatgtcttgagatatgtactttattttatttgtaccaattataattacatgttaaattaattatatatttttgttgtctttttcctttttttttattctttttcttacatatttctttaagctttattattatttttttctttatttttaatgagttaaaacattccaattaaaacatattattgataaaaataatagagaaaaacgggtgataggtgccatcggcagcatccttcactagtatatatatatataaaaaaaaaaattcaaattttcctttaatcaatgccataagtttcaattacagcacataaatattttatataaaattaaaaaacttcaatcgcatgctatatctattctatataaagtgtgcctatataacagaattcttggt

SEQ ID NO: 395147 - DNA, 1987 bp, Cannabis indica
cattatctttcatacaagcgtccggtgagtttattttccaaatatagcgcttgttcgatctgactttttagcattgaaagttataatagaagtgtgtggagcattcgatcccctaaaatggtatacccacctcagattagagaaaaattgagagttagaatttcttaattggagcatttcttatttgaaaagggagtaattaggctacggtttaactttttttttttccatttaatttatctaataatatataaatatttttaaagaaaattaactaataatatttattaaactaaagacgttgttattatttttatacactttaaaatgacactaaatttaatattttgtgtcattttttacaaatgtcattaatatattttaataatattttaaaatgatattaaaactaaatattttttgctcaaatgtggctaaatatgcttatagtaacttttttttaaaaatgccacaaattaaatattatatattctcaataaaagtgacatttttgataaaatgtcattaaattactattattgtaacatttataacaaatgttattaaaatctagttatagtttacatttttctaaatgtttaccaaaacttatttttggtgacatttaaaaaatattattaaattctaagtttttgaaaattgtaatacatttagtttacattttttttttgctaaaatgtcatttaaaatattattttttgtaacattttttttaaacaaaatgtcagcatatcaaaatgtaaacttattttgaaattttagtgtagtgaccatatttataacaaaagaaatgaaaaataaattaaacgacagtaaatttgtctaagtctttttttaaaaaatatatattaacttataaatgtgatacatgataacaaatatataattaatggtctaccaaaattagtaatgtagaaatattttattagaataacttaaagaattatgtataaaagtaattatgcttttaaattaattataagtagctatatggtacgcacagtatacaaaattatatactctaattaattttttgaagagttaattgtggcataatttttaacacttttttttttcttgtacttaacttccaaaactcaaattttagcggtaaaattctcaaaattggaaattttttagcaatttacaatttccatctattttaagtgttaagtgttactattcatgtgtagatttacgtggacacggtgtacacataacacaattttattggttcacgtaaaaaattatttaagaaattaaaaaattataaaaaaaataatttgaaattaaaaaaattgtaaataaagaaaatacatatgatttttgataattttaaattaaagagactacatgttatttttaattgaaatataattagagtgaaaaataaatggaatgaattttgaaagattattatttttgccaaaagtttattttgaatgagagaaattattttattattctaaattgaaattaagatatatttggggtcctaaaatgtgaatgaacattttatttttacatcaaattataatttaataaaataaaaaagaaaaaaatagtataaaacaaaaagaaaatcctagtttgagagccctaactcatctctttctccctctcttctacatgcggcagccaaatccaaaaccagcccttgccggaattggtagtccaaacgtaccatgcctccattcttgcaaccctaaaaaaaccaaaaccttaatcactacaagaataatagtttataggcaccacaaagtttgacaccaatataggtggtgcctaactttctaaaggttacaaacacagctcccagatcactcaaactttctctatttatatatatatatatattatatttattattgggtaactactattttggactctgtgttttgcaaaatttaccaattagacactctattttgttaaatgacaaaatataccctgtattttctaaaat

SEQ ID NO: 395148 - DNA, 600 bp, Cannabis indica
gccaaacattctcaactaattattaattgtttaaccaatattaatcaaacggggttccttccttcatctttcgatccatttatataatgctgtgattatttacatacataaatatgtctatatactaactacacaccttctaaaagattatttcggtaaatttttttatctcatgttttggtatttaatagaattttttaatctatctttttatgatcgtataaatattataattatttagaactatatataaatttttaaaaaaatttaaaaaaatttacaatatgctaaattttgttatatgtattattaatttactagaataatcttttaattagggtgtactacgtgtacataaattttcttatatgtattattaattaacatgataaattaattataattaaaagtaaaataaagtcagcaaaagttgggaaactttggagttaaagttgggagcaatagtttcttagagctagggttagaattaattcacatatgaggcctcaaactttgactaagtttctaattatatatttatatatatatatataatttttttaaaaaaatagattttatatatgtattttatttttttta

SEQ ID NO: 395149 - DNA, 604 bp, Cannabis indica
atatttatatatataaatatttctcttaccaatgtaagaaatattagaaaaattattaccccaaaagcgaaattcatcacaaaaagttttatacaacatactaattatatgatctattttaaaatataagatgtgttatgaactcttcctttgaggcgattgctatgcccatcaatgagtgatttgggcccacaacaaccatagcagcgcgtaacaaccatgtacatggtgggtgagagagaatcagaaagggagatgttttggcacccaaagtcttgatttataactcaaagtcaggtgtaatttacattggttgcgtcgatgggtgggtgagccgagtcaagtttgttatgaaaaatacctcaacaagaacaacaacaatgcaaaatcgattgaaaaattaaaatgaaatagtaaaagaattgattacaaagtaataacaaaaggagacgatattacgtggttcgaacaaagataacaatgtgttatcttgcttactccatggccagaaattgttggaaattattttatcaggatcttagatctactcacaagtatgttcattaacaccctaaatatgaactttctaaaacgaatgaaataa

SEQ ID NO: 395150 - DNA, 1063 bp, Cannabis indica
caaacttcttctcccagataggtgtacgtcttacggactttagaaacttttccatgaaatagaaaccttttttcaattgttaactccaagttgtataaggctgcagttacttccagatgactcctggtttctgttaaggaggtcacgcactcgcagatttcagtctatgcttttattcttggactagataacttagcaaattattaattttaggcatgacaatagaggggtttacttccatatcaaagcgtctttgatttcaggcagagctctttaattttgtgcttagcccaatactaatttgcgttttgaaaatatctaaaaatatttcaaattcaagaaaaaatttctactcccatgtttttaattaacaatgtaaagcgacaagatgtaaactgtccttttaaagtatggtaagaaaatagctaaaaatattctaaattgaaacaaagtttccactcccatatttatggcaattgatttttttttttttaaaaaaaaaatatatggtaagggaataacttactttaggttccttcaagttccaatttcaggcgagacctcctacccccatacttaattaactttgtaagaaaattaaagaataaaaaatgaaagacattatacattttcatggatacatagttgtgtatcctaccccccaagtgagctgggaagtgagacatctctaaattcctagtcacttcttgaaatgcaactaaagatttaacagaatacattaatgaaatacattttttgagcaatttctactgatttcatttaatttatatttaatttggaggcatacatgaaaagggagaagaaaaaaaatgtaattagagaagaatatggttggatttgaacacccctagtatactgatagtatcggcgcaggtggtctgcattccaagtttgtggaatctctgatccatccattttttttctaactgatatgttccattacccactttgtgctggattttgtaaggtccttcccagttgggtcctagaacccccacctcccaactcctgagaagctaggaacactcttctcaagatgaga

SEQ ID NO: 395151 - DNA, 1154 bp, Cannabis indica
aatataatttaagaattattatattaaattatatgaaatttttatatacttaattgtaaactcataagaagatcataatatatagtgatgctctttaacatttctcgtttaataagtatatttttttctggttaaaaaagaattaagagaaaatctattgcctatattgtaacaacgtacatgtagcaattagatcgagttttaataaattaattaatttatgaattattattattattattatcaaataagccaaaaaggccaatcaaattaattataatatgatgaaggcacgtagtcaatcggtttaattggttaaaatctttgaatgtcataagcttattgaactaattagtatttatatatacatgtgacagatggttcattctatagccacacacatttatatataaaactttacatatatatttgtaaagctaagaagtacacaacacaaaagcaagaaaaaagggtaagctaatgataaaggaaatgattattacttgattgagggagaatatagttaaatattttttaattatatatatcataatgtgtggtcaagaataaatatcatgaatttgtatatattattatattacccttcaaggcttcatctaaactgttttaaaatattagacgtaatttatatatataaacatttatagagatatatataaggggacatgaatgtatgtatgtaaggtcctcttttgcttttaattttgaaaaaccaactcatcttttcttgtctccccatcattatatttattagtgttttacttgcttggccagaatatatacatatataaatatatatatatatatactagatgagagttacgtggcgagccacgtaaatattagttttatataagttttagtggtttttgtttaagaatccagtaactgagcaacggcaacaacaatggtagatagatctatttaagtttttcatatttgtaaagattataaatctaaacttttaattttcttgatttgagattttgaattgttctgatttatttgtttatgaatttattgaaatacttgaatatttattggttttgattttgaattgttctgatgtattcatacttgaatatttatattaatgaaattagtctgtagctttatggatttagaaaaaaaaa

SEQ ID NO: 395152 - DNA, 644 bp, Cannabis indica
tataattttagtgtaattttagtattttgatgtaatagaaaaaaatttagagccaaaattttatcatttttgtattgatttaacactaaatttaacatttactattggagttgcccttaccaaaaggtatacatattataataatttttaaattaaattaaaattttatctttgtacatttttttttgactaattagaatttttaccacttgaattttaacatgtaccaaatcatgttttatgaacttttcaagtcattaagaaattcttacgaactattgaatttcttagatttaaaggcttttgttcaatttcactaacgaaagtctcacacagatgaaagtttaaagagcacaatttggtacatgtcaaaatttgaaagacacaatttgaaaggtatcagaggacacaatttagtacgtggacaatcatcgcgtaaataaaatcgaacggaattcgacaaaaattttaaatctaacgatctcaataattcaaaaaaaaaaacttttaacaaccataatagtttgacacataaattgatacgttcaagacaaaaatcttaactagtaattattttttcttgacagaaggatatatattatatataaaatgtgtctatataaccgaattcttggtttatgaga

SEQ ID NO: 395153 - DNA, 525 bp, Cannabis indica
aagtaattgattagttgataataacatgtcttaaaatttcaatattttttattgccttcatatcaagtgttagatgttcaccattaacattttttaaaactaatatgtttacaattattaatgatatttataattttctttttattttcaaactatatattgaatacattcatgatattggtttataaaactgatatacataagaagcatggatcatactaagtaattaatagataaaacatagtattacttatgttaataaatttattagtttattttgacatattgaaacaaattttatttttatttttgtatattggaacaacaattcatttcatttcatatagcctacaattacatatattaataaacttactatttatcatttgttggggagcaatattttatttttgtaatacagagtaaactataatgaaacataatgatataaaccaagaaacttattagtctatttttcgtgtatattgcaacaacaatttttttttttttgtttcaaacacaatg

SEQ ID NO: 395154 - DNA, 979 bp, Cannabis indica
ggtaaagggaccactaaagttgagcagccatgagtgcgaggtcgtagcagcaatgtacatatcagccgcggtgtatcggcccagtcatcaggatgctcttattttgaaagttattcttgggagtacaaagtttatgctgtaaaaacactattaaaccagtttgtgaaaattttgaaaacagggggaccccatggttaatactacttatcttttatcatatagtttatatgtcaaatttttaattatctaaaacttaattaaccacacttttggtataattatatactatctatataagaattttattaaattgcacacacgtggcgtccctgttggacagggcgttacacctactttctgttttgtttgcgaaatcatcggacattccaagagattttgtctgagaaggtttgatcaacctcttgatcaaattgttaagtcgtatgagattggaatgcgggctcaaacaaggaaaaagaactacttaattggagcatagtggcttcgttcgggtatggagtcggaggcgatggtaggtgagggtggggtttctcatctgagtggggctgaagatggtgcaattatgcagccgaaaatcatggagattgacagtgttgatgggcgtgaggatcgtgattccatgattgtagggaagaataaaagtgttttaatgggcacagatggcactaataatgaacattctggtgatagtagtaatggtggaaatttgactaaggcagtattgaatgaagatgatttgttgatgattatggagaataagcgtagacgtactgaaatagaaaaggcctatgctgaatctgaattatctggtgtcaagatgggccgaatgaatgaagacttagatggatcaaaaaacgtttgaaggtggccttggttctcaggccacccgattatcattgagcgatcatatcttggaattgtccatgggcttgggaacccatgggctcagtcaattcat

SEQ ID NO: 395155 - DNA, 546 bp, Cannabis indica
tattagttttttttatggaaacaaaattatatcccgaatattatttttttttcttttgcttaacatatcttgaatattatttagttaatttaaatgatgtatattgttatggacttgcaagaagtagtacatttctttcattggtttttgaatatttttggactcacaattaacaaaagggatattagtggcaaaaccattcgaattttattttttttaacactaattacataaactgattttttaacagcaataattacagaactcacattccgttttactctttactcttccgtccaaaaatcataattaagtatcatagtagactacccacgtatacacaagtgtagacgtaacatattgttagtggtccgcataatattaattatttaaatactataaaaaaatttaaaaaaatataaaaaaataaattatttcttaaggcagacgaagtgaatgtgactatatcttaaggcaaacgaagcaaaaatttcaattaactgtgaagtgaatgtgactattgttgtaaatattttaccaggatct

SEQ ID NO: 395156 - DNA, 622 bp, Cannabis indica
agagagagagagtcaacaaagcttttagggtttgaaaattgtattgtacaattttcttattctaatctcatgtgtttcttagaatacgtattatgtatatatcatatatataatcttttaaattaatccaataaaataaatatatattattattctttatttgaaattcaaattcaaatataataatatctataactgaataactgaattcatttatatctttattttaataattctttttaattttaaatatgttatccaataaaatatttaattaaataattaaaaagataataattatttattttcgtttatcttattaaataaataataaaataatcaaaacaaatccatgggcctttatatgtcaccctacatgtgtgggctatagccctacatgtgggccatattttaaagcccaaaattaatttctcaactttgtcttaaataaaatttattatttatttatcaataaataataatttattaattctcattaatctcttatttcacttggattaactaaatattattttacactataataatatttttctctttgataatgttattcaataataatattatatttaacatataaatatagttttatcaaataaaa

SEQ ID NO: 395157 - DNA, 1392 bp, Cannabis indica
ttttttcaattaagaataaaaaaaaaatgagaaaaataatcatttgatcattgtttatattgaacaacacttcacataaaataaattttgaaaattaaactagattgtaggcaagatcacttcaatggtacaactcccattatattaaattaatgaagtttttttggtaaaaatagtttttttacctaaaaataaaatgatataactcttgtctcttttgacaacactcaacatcaatatttttaaaatttatcttaaaagttaaaccacataatatatatggtaagatcactccaatgaacaaccttcaagatggtctatcaaatagcaatcctagttgttttaaggtgcaatgcaaatatcatcttcttggtaaaatatactaatatcacatagcacaaaggatatttttcaaatcacaaaggaacataatatttatttaattattaaaatattattttggaattaaaactttctaactattaactactaaacataatataaataccacaaattattcacacaataatataccatatatatatttaagaaaatcataacaaacataataaaattttacttcagagttacttttaaagatttttttttaaattatactcaaaaaaaaaaaagatttttttttaaataaacaaacgtgagagttgcgtagatgatgtttacaacggaaaagatttgttttcaaattgtgtctttctaaacttaaaagttgcctaatgaaaacactttcaatacaattgttaaataaaaaaaaaagagaacacttccaatgcaaactagccccaaaaaaaggccattatctgtattcaaatttgttttcaaaattgttttcaataattttgttgaaaaaaggaaagtttgttaattgtttccattaattttgttaaaaaagggaaagtttgttttcattaactgaataaaaactatctctatattacctgtgcttaggtcttattattattacttgtgaaatttgaatgatttgagattatccaaaattgacttggtaaaaatgtaaacaaaaagatttcggcttatcaactgattttaatccaagtcagcttgttacaatccaaaatctatttttgatagatacagtgaagaagatcttatctgtgtaaataaaattagttcctctttaaaataaatttaagtcttcaaatattagatttgcctggtagagccttgttggtcattttccataatataataatattatatatatgctgcccgttacgcccattacgtaatacatttctttcccttcattcattcattcattccttctttccctatatatatattctcttccaccttcactcttcaatctatgtcccccaccctcttcagatttaaatagatatatatatatat

SEQ ID NO: 395158 - DNA, 941 bp, Cannabis indica
aaaatttgggaatttctaaaaatttgaaaaattagattttgtttttccatttatgatttggggttataattttgtgattatttatttgatatatatcttctaaaatgatatgtaaaatttttttttgtcatgagtgattgttaattatttttatacaattatttttttgtatatttttttttaaaaaaattttttacaacttcttttatttatgtatactttttttctataatatttatttttggtgaatcatttttctattattattaatagaatactattatgacactttaaaatgtccaacactatatacatatgacacatataattagttaacagttttccatattatttactaaattaaaatttgtgagactgatattgaaatacaccaatagcggtatgtcacgatttatggtacttagcacctcccttggtatttttgttatcctctctaatgaatggtgtataatatctaagctaaaaaaatgagtcaatattatttttggccaaaattttataatggtggtccaatacatttagacaagaattaatcatttttttgatatataagtgtaaaaaaatcaactaaagcattaaatttttattaaaagtatataaaattcctattaagtatatataaaatgtaaaaaaaataattaattatattaataagtgacgaaagagtaaataaaaatataatatttattgtgtgtaaaatttggcccatgctatatattgtgtcaaatttgactcaacttttagcatgtgctaaattttatacaccatcattgaagttcacttttataaagttgcactaaaatatgcatatacatcacacttttaactctacattgaaggtgttcttaataagtacatatttttatttactttaattataattttaattttttttttctaattatacataactttgtaag

SEQ ID NO: 395159 - DNA, 546 bp, Cannabis indica
atttataactggaccaaattgggacttgatttttttataacaaattaaggtattcttaaatgagtattcttaaataagattcactctattacattttaagtccataaatttaatttaataataaataatataaaaaaaataataacaattatgagatgccacatagttatatgagttcattattatgatataattattaaatacatgtactgatattttgatatataggttctgaggaagaaagatcagctactgcaagaagcagaaagaggggcacatcttcgaaggatattgcgagggtacattagcattcaagccaacttataagtacaatgtgggaacaaacacctacgacacaagtcacaaggtacgccctacctttgtacctacctacgtacggtacctctacaaatatatacttatatttatatttatatttatatagtcatcatatggtacaatgcttctacaaaaattcttaaatttaaccatctaaatagtttagaaaaatttttaacggaaaaaaaagttcaggggacatgattt

SEQ ID NO: 395160 - DNA, 1724 bp, Cannabis indica
atattattaataataaattattgatgataaaattattcaaagcggttaatttgacaaaggcgcgcggtttctatttataaatttgactgtttacctgttttcacctacttgttgttaattttggtcatcaagtgcaattatctaaagagttatttggtacttcaattttttctttgttcttgatatcatgaacagatatgtggaacttattaattcattatcactaaggttaatgttaataaagacaataatttaatgtttagaattaatttcttggatttcttgttgtaatagatcttaccaattcgttttccaaacctaacttaatttattggatggtacgtacaataattccttaagacataatatatacaactgaaaccaactatatatctttacagttttaaaccgtttgtctaaaaaggtgaaaaatatgtttccacatataatataataaatggaatagttacaccgtatattaaatttatacttttcctaccttttttatttattaaagctatctataaattttttcttatatatctgtttgtatttttgtatatttttttctttctctcttctctctatttattcttttctcttttcgaattctctctctccctctctctccctacactattttttttagagacatactaaaaggcacgcatagtgcctagcaccctcttgtgtaagatcaatattggtgcaatttaatattgagttccacttgtcttactttaataaatattataaaaaattgctaaccaattataaagcaacacttcatcatagtgctaggcaccataagtgtctcatagcaatattctttttttttttttattctttttatatataaatatatataataagtgtatagttttatatctttttttctaacattttttcactctctcacaaattttattttattatttatttataaaaaaaaatataagtacttattatatttctttttctttcttttacattttcttactatttacactcaatctcttactatttgtctttaattaatcacattttaaaaaaaataataaaaaccttaattaatttattttaaccttcactaaaatatgattctttattttcatactttttctcttattttttttaacactctttctttctctatcttagaataaaattaggagcactcctcctatatctttctctcttttatatcattaataaaagtagtaatttttttggatattttgtagtttattctgaattaatttatgaatattgatttacatattttgataaggttaatgtcttattatttttctattgatttatagatgtctttttgttattttatagttatttttatgttgttgtttgagtattttatagttatgtttttgtacagttgttgtgtagtttatatatgtgcctttttatagtgtatatttttagtttattccacacaatttttttgttgtatatatgtgcatttggtttgttgtatattttgtatagaatattttttaattcagcagttgttttttattcatgtgtattttttatggtgtatatttttagtttagataattatatttagtttatttttttgacacattttattaaaatacaatgataacattttttatttttttaattgacacaatgtgcagtagtagatattgacatatgaaaaaccgtgtttttgcaaatgtcagttgtatataagaaaatat

SEQ ID NO: 395161 - DNA, 904 bp, Cannabis indica
taagtatcactatagatgtgatacatcattagtgtattttgaaatagtatttaacacaatttgatttaataaataatatacaaaatcacaatacactatattgatgtagtgttgagtgctaatactatatcaatatgcccaacactacctagaggtagggtcaggtcaagtagtttagagtgttgggcgaaaaattaaaattaagtcattattaacaaataagtatttgacttaacttttacagaaaacaaaaaatagaatagacaatgagttttagaatcatgtgtgtattttgttgttatgaacaattattatatgaaaaatgctaaaaggcattagtgtgtctaacatttttctatatattagtattgttattagttcaaaaaagtattgagtctcatatagtttaatataatgactttaaggagtatcgttaattaatctctagacaatatatttagaggtactaagcaccactggtacccaataacaatattcttattatatatgcattataaaaaaacttattataaagagatgataaataaaataggagcagtaggcattgtataatagccaaaattactgaacatttgggtcggtcatgcttaaaggtggcgacttataattaattaattatattttatataaattttaacttaaatttaaataagactttaaataatcatttcaaaatttcatgacaaatctattagttatattatttaaaatatctaaatttattatttattttttagtaaaattagttagatataattttttatgaataaatttaaaattagatcatatttatatatctaaaaaaatataattaaattgtattagatttaattttagggacttttttatttttacacttcaaaacaggttttttttttttttt

SEQ ID NO: 395162 - DNA, 509 bp, Cannabis indica
ctccccttcattcagaggtttcagagggcatgggtatacgccttcctccacacgccgtgtccccagagttcttactcaactttactcttatccatattccctcacttccttccctacacctgcatccctccttgcatggaccccccgtcacgcctcccatcacacacacacggctcgcccctcatctccacttcacatcccctcgtcatgccacccatcatgcacacacggttcgtgtgcgagcccccatgtctcgccctcatctccccctcacgtccccctgtcatgccacccatcacgcacacatggctcacgtgcgtctcgccacacaactcgccacacggctagccacttttatactatctccaagggtaatacttgtaacggtgcggacgcgccctaacattcaaagtactatttttgaggggtggtgtaacgccctaatctataggaacgccacatgtgtgattttataaactagtttaatactaatagaataattaattatt

SEQ ID NO: 395163 - DNA, 686 bp, Cannabis indica
gttttgttagttgcgatattcatttgtcgaccctaatacccttactattagaagcgattttttatcgcctcaagtattgtcgcccctaaaaattatatttattgtagtgaacaacaaaaaattgtttctcaatgactagcattaaattgctgcttttaagttaataaaagattatagcatgtgacaggacagagaaaagggccctaaaaaacaaataaaattgctgcttttaagttaataaaaaaatatagacagagaatagggccctaaaaaacagtagtatatataagtggccaaaagtatattattacattgatcggaaaaaatcaatgatgccatcatttcaattatagttcttattcaactattttaatagaggagaaatacaaaaactaattattgggtggatagtgagtagtgctataaatatgggtttgacgttttgacatcgtggaatcaacatgagcttgagtgcgggtgtacaacgagacatgataaaatactaaaaatataggcttaagcacgacacaataagcttaaaagacaaaacgcataaacacagatagactaaccgaaaagtaaaacacgataagtccaaaagacacgttaaaaaacaatgttaaaacttacatataacacaatattgtagttttatattttagaaaatataaaattaaaactatata

SEQ ID NO: 395164 - DNA, 1229 bp, Cannabis indica
agtagaaataataaaatcttatcattcaaaatggggtacataatataagggggaatatataattaaacaacaaaaattaactagataataatataatttaaatatgtaatatctactagtgcacatggtgtcaaaaaaaaaacgaaaaaaacttttcattgtatttgaaaaaaaaaatatgtcaaacaaataattaattatatgtatctacatctacaacgcaagagagatacaagaaaaaaaaataggaataaactaaaaatatacaacataacaaatgaatataaatccaaaattaactaaaaaataattgtacaataaaaaaaaattctaaaaccacttaaaaacaacaaaaccacaagataaaaataacaaaacaattaaaaaaattagaaggaataaactcaaattacacaccataacaaatacatataaataaataaaaatagcctaaaataattgtacaacaaagaactattctaaaaatcactaaaaaacaactaaaacacaatataataatatcaaaacaaatacaaaaatacacaacaaaaacattgtcaggaataaactaaacatataaaccataacaaatgcacttaaactaaaaaataattgtactacaacaactataacacgattgtagaaaaaataaacaccaactaaagaataactataaaacaacaaaatgacagttacagagcaactaaaaataacaaggcatcgacctcgttgcaatatgcaaaacattcatagattaactctgaataacttataaaatatctaaaaatacactactacttctactaatcatataagaaagaaaaagatagtaggaatgctcccaatttttttaaaagaaagggaaagaatgtcaaaattaaatttatatatatgagaaaaagtgtgtaagtataagaattttattttagtgaaagcaaaaagaaattaattaagattgttttacaaaatgtgattaactaaagaaaaattgtatgaagtagtttgagtgtgagtaataacaaaatacaaaagagaaaaaaaaaatataaaatgagtgctaataatagaataatttttttgagagagtaaaaaagtgttaaaaaagtgatgtaaaagattatacttattacatttatatttatatacatatataaagaaaagatgtagattagtgtgagaaaagaagaagaagaggaggaggaggagatcattagagagagagagagaga

SEQ ID NO: 395165 - DNA, 976 bp, Cannabis indica
ggtgaaagacagacattgtgcaaacaaaaagcaagcatcatgaaacgtgaagtcgcactgaccatggtaaagacaaatcataaagtttccgaacctagggttttctacctatcttctacaacaaggttaagatcgtattcagaaactaaatatgcaaagtaaaaagaggaggaaaatttctcttttttgctctgaacttgcttaacagagaagttagtgaaaatgaaattgtgaacaatgctcagtcctatttataggcagaacaacgaaaaggttaatcatttcaaaaacctcagatgcctcggttccccctaaaagcaaatattggaaatcaatcataatcaagtgtaaccgtcaaacgttgtgagagaaaatcagattttgaagcattaatttcatcagagcatttattagcaaaaaccaaagagatgcctagtcagcctcacattgaatcgcgaacagacgcacttgacacgtgtcactcatccaaatgcaaagacagctcggatgaagtctacacgcaacttgggaagtcccatacagacttggggggcaaatgttatcctaatttttgtactctgacatggaatcacgtgatggtgacacgtggaattaactctatgtacctgctctcaagaattatgccaaataagacaccatttacatttgctcgggcgaagtcctctaagccggacagtgagcaacccgcgcagcacgccaacacttaacagatttagctttcgcattgtgagtcaccaaagaaatccctataactgtgggatcagatcacagagatatgacaagctgtctgaatcccatgattagtgtattctgtatttactatgcaatctttctacttatatcaattgtaaccagaagggaaagacttccctcccaagcttatagccctataaatagtgattcactttcactgggcaaagggtcgaaaacatttgtaagagctctaagaaaaaga

SEQ ID NO: 395166 - DNA, 641 bp, Cannabis indica
aaggaacaaaagaagttcttttagaataaagtaatgtgcattaattaattaaaataaggttatgtgtgtaatttatgcaatatatatttatccacatgaagaagacgacaaatttcctacacaaagttgaaaattagctaattaaaagtccaaataaaataaggtacttctttatttgattttattttctaacttccattacctaacaaagaaaatatgcacgtggttaaaaacaatttggtctataccgtcaatgtgactcattaaattacttttttttttttttttaaaaaaaagactaattttaaataatatactttaaataattagtatatattataaatgcttgacaattctataaagttataaatttgtaagttttagtcaaaatatttatgatttatcccctctcatgtattttttataatttattattttctaaattctataattttggtattttttccttcaaaattaattctgtatttttcttatatatattttttaacaatccccttttatattaattctatataatatgatactaagttacaaggccggctcaagcattggacagcttgggccattgcacaaagcctctatttttttaaggcccaattttttattttttttcctattat

SEQ ID NO: 395167 - DNA, 570 bp, Cannabis indica
cacaataaaatttgtgactaataataaattattattcttatgttgtgactaaaaagtccgtgactaaaggtattagttacaaaaattgcaatttattgtgactaaatgtgtttttaatcacaatacttgttgtgactaaaaataaattagtgacaacttgtgtctaaatggtatgttttagttacaaataattttttgttatgactaaaaagttgtcactaaaagtaacaattttttgtagtgacactattgtatccacgtatcctatctcaagtgaataatagcctataactctatacaaccattaaaccatacattcattaagtctcactctaaaaacaaccctaaaaattttacctctcgatttcacaatttaaaattatttcagatacctaagaaatgtttatctctcgatcttgatcacaccatctaagtttctacttgatgtctggttattcaaaagtttccatctcgagttataaatttcacaatctaaataatagtcataattataagggtaaataccattttagaccctgtgttttgcaaaagttacagattggaccctgt

SEQ ID NO: 395168 - DNA, 1016 bp, Cannabis indica
cgatagttaattttattaatatgttctaactactaatgtaattagtaaattactatatggttctacttattttcattttaaaaataaatatgaaatgtttgatattagtcactaacaataatattttgtttatcctttccacaacttctgaaatgaatttgcaaaaataacataataaataatgcttccacttctttttttttgttctgatgctaatgttacttctatatgtagttcatacggaacgaatttggacacaagtagatttattggggagacaatcttttgcattcttttatgcatgattggtttgattttgttctcacatttgattggaaacatgcaggtattatattttaattgatttgtcttttcacaattcactttttttaatgtatgatattaatgaatgttgtattttgaataatggttgaaaagacatacttacaatcaatgacggtgagacttgaagaatggagagtgaagcgaagagatacagaggaatggatgaggcatcggcagttaccaccagatttgcaagagcgtgttcgtcgattcgtgcagtatcaatggcttgccacacgaggtgtcaatgaggaattcatactccgttctttacctttggaccttcgtcgtgaaattcaacgccatttgtgtcttgcacttgttcgccgagtaagtttttttcatactccaataactcactattcatatagtaagtaatgtagatatcatattgttattgatgtaatttaatattagatttcacttattatactttaacaaaattgttatttatagaccaccacctcatgatggtattacacaactccatattctaaaaaatgtgattcaagtaattagttgtacgagtacttattttattttatacacatgtgattaattattcagaattttattttgatgtcataaattattcaaaaaaatatacctactataaactattatgatggtataaaaaaaattagaatataaagcatgtttggtattatttt

SEQ ID NO: 395169 - DNA, 749 bp, Cannabis indica
gtataagtaacaatgctattttcctattcctccgttttttttttttttttaagtaaaagtcatggaaataagcattgtctcatctcctttacacaaccaagtgaccttgctcctttgtctcagaaagctatgatacatcttttcttgggaattaaactccatagctgcctctttctctgccagctggtaggacatgtcatgactatgttcttgagcttgcaatctagtctccctataatactccttggcctcatgatacctctttccaacatccccaattttctctctgttgaaccttttgataatgtgtttcaaatgcatgagctttaagtacaaagcattcattccctctctcttcattggcctatgccaatcttcaagcaccacagctttaaattcaggatgatctgcccagaaattgtagtacctaaacggtttgtgcccaattttctcattagaagccatcgagataacacataagcaatgatcagatatagtctcccagctatagtgagctttagctgagggaaagatgtctgtccagtcttcattcacaagggtatgatcaatctttgagtagattctcttgtccccatcttgattgttggtccaagtaaaacccgatccagttttaaagagctttgccatatggcttagatccatccaattagtagcatcgctgatgtcattcatgttggaatttattttaccaggatcttagatctactcacaagtatgttgttttaaca

SEQ ID NO: 395170 - DNA, 1107 bp, Cannabis indica
agagagagagagagaatagggtcttagaattattgccctctggagcgagatgatctttctcagactgtttccactttttatgtcaagaaccttttgcttaaggagggatatgtagaagggagaaattgaagcttggggaccagaggagaccgatgaacaagctaaagcactagaagcagctaagctcgcttggacatcaatttcaggttgagcagagcttgggcgaggacaattcagatcaaccccaaaagtaaaaggattgttaccttccaaaataaaaatacattctattcaagtcagttgtagaactaaaaatcaaacgtcggtgattcttagaaatccactgatcatatacatcaatcttggtattgagaagttcagtctgagcatgagtaatttctgaaagtgttgggttttgtgccctaaataaaacccatttcaatataatcagatttaccaattaataaaagaccacaaatcacttttatgttgcatgattcacatgatttatttcataattatgtttaatgtataaattctattaagtccagaacatatgtaaatatatgtatatatatttattcatgattatagtgtcatcaacacagtggaatataatcttgattatatcttcaaaagtttaattcccatgatttgttagtttgctggatttagactggcatgataatcagcgataaggtatacttacaccttggataagtgttatgtcctttccagggtattggtaaagttaccagtattagatatatgaagtatacattggaagggaccgatattgatcttagataagatatcataaacttaccgttatatctttataagccaatatagatagttaatcttaggtctatggatcttaatccttatatggttaggttcaatcttagttgtattatttatgctcttcaatttttttcgtgaaagtcgaccaattgtatcttcgtcatgacgaaacatattaaaggacatggtagttcaattgagtgggagcgctgatcacagatatgaaatctataacttctataagtatttagaagtgaaacgatgattccttcgagcttgaccgaatagagataaatgattgag

SEQ ID NO: 395171 - DNA, 794 bp, Cannabis indica
gcaccacccgcaccgcgaacacttttaattgatatcattctgagaaggctgatcatcagtgggcgttgattgattttcagccagatcaactattttctcctaaaaaaaaattaatctgaatgcaaaagaaaatgaaattgaaagaaatgtacagaatttgataaataaaaatgtaaacatacataagattattacagtgtattcattatgccaagtgttgtctttaattcctatcgatcttgaattttcatcttatcccaatttttttttgcttttatcttaccttgcctgaaattaacatgtttgaattgcaattaattatttattgttgactataacgtaaagtattattaaaattaattttgctaggtgcatgttctttctttatgctctaatatttaatgcaatcactctacactttttgagttactctttctggaggtgtcctattcaccatcaactctccaagtgactacttattttcaatccactctttcttagcttcggcccaccagtcacgcaaaccttttgatatttcgtactcagcatagtctacaaaaacagaattatctcgtgggtagtaaaattgtctgtaaaaaaattacacattaaaattgatacattaattataaatgagttatttttggttaaaccctctaaactttcattcctataacaattaatccccctaaacttttttattagaggctcaattaggggtgtttattggatcacatctaatgaatttgtacccaactgatccaatctaattatttattggatattggattttt

SEQ ID NO: 395172 - DNA, 1334 bp, Cannabis indica
aatctttagcgcaaatactattgcagtgagttctaggtcgtgagtagggtacctctgctcgtactccttcaactgctgagaagcataggctattaccttttcagcttccataagaacacagcctacaccttgtctcgaggcatcacagtaaacaataaacttttccttatttgaaggaagagttaacattgtagcggtaatcaaccgttactttaactctagtttaattttctcacaccgatcagtccaaagaaacttaagttctttcgagtcagctccgttaagcgtacatcaatctttgagaaaccctcagcgaaccaatgataataaccagctaaacccagatagcttctaacttcagtggccgatttttgtgttgtccaatcccaaacaacttcaatattggtcggatccaccatgatcccatctttatctactctatgtccaaagaaagagacacgagataatgtgaattcacactttctgaatttagcatacagcttgtgctcttgtaatcattgtagtacctatccgagatgcaactcatgttcctcttctaattcagaatacaccaagatgtcatcaataaacacaatcacacatctatccaaaagacatcacaaggaattcataatgtctataccgagtacggaaagcaattttcgggacatcttcctctcgcattgtcagctgatgatagcctgagcaaaggtcgatcttggagaagactatcttccccttcagttgatcaaaacaatcatcaattcgaggtaaaggatacttatttttaatggtaaccttgttcaactcccgataatcaatacacattcacagtgacacatctttgttcttcacaaataatctcggagcaccccaaggggagtaggtcagtctaatgaatcccagattcagtaactcttgcaattgtatctttagttctttcaattccactggagccattcgatacggtgcttttgataccggttctgctcctggaactaactaaattacaaattcgatctcccgggtaggtggcaatcctggtaaatcttttggaaagacatcaaggaactcgcacacaaatcttgtgttctcaggtccagacgtcatatgttggctagtatccactttagtgactatgaatcccagacaacctctactcatcaggtccttagcttttagaagtgttattcttggtatacgttgttggaaattattttaccaggatcttagatctactcacaagtatgttgattaacaccctaaatatgaacttttaaaacgattataaaattaaacacatataaagtatgagaaatcttacattgggtgca

SEQ ID NO: 395173 - DNA, 864 bp, Cannabis indica
tcaagcaagacttggttcttgttggaggtggtgacatctgtgtgatgggaattcttgagtgtaatgggaatttttgaggtgactaccaatgacctaattaaagtagactgaactataaggttcctatagttgacacgtgattctcaaaattgattaaagaggtaaagaaaaaatttgcaccacgtgatcccttttattcaaccaaaataaaatccctcgtcaaaaacaaccaattctccaacaaacttttggtattacagaattcacattattccaagtgctgagaagaaggaaaaatgcaaaatgaacatgttttttatgagatgaaaacatttatttgaggagtcctgcttgcaaaaataccacaatagaaacgccaagtcgagttatttattgtatgcacatatagtatttatgacacaaataatattaaattaacttaataattgatcttgttaaggccttatgataaactgagttagcaattcattgatcatatcctctaaagcttcaaagctccacatttgttatgcaagtgagtacatcagtgtatacctactacttctctcaaaatctgttttaatgaaggcatggtggggaaatgtaatatcatggaattaagaatggattagcaaggccctaattagataattatgaataattgaggaattatattattatatagttcaatatatgagaattaatatgatttataatatggtaagaccacgttagtgagctgggggcattttagtaattatgacccgagaagggtaaaatgatgaaattaatttaataacgtgcttattaaaactatattataatatagtatgtctgtgttgtcttttcaggtgtgttctgaca

SEQ ID NO: 395174 - DNA, 1040 bp, Cannabis indica
gtccatcaatcaactgctcagagctcactgcattcatcatcatcatctcactctagacactataaaatggttcaaaataagcaatagcaagaatctaaattaatatccattaaagaaaaaatgaaacaaaatatttggagctacacattataaaatatgaaattaaaaataaaaatgaaaaagccctcagatctcatagcttgagaagactcgtctgcggaagaagctaatgggtgttcttcagaagccctaacacgcaaccaccgaaccacctttagtaaatatgtatgtatgtgtgtgtatataagtagtagtagtagtagtaatagcagtagctacaagatggtggcaatggcgagttaaagctaggtgaaaaaacacgaaccacgctccctctcattttgatttgagcatttccatcttcggaccaaaaaaaaaaacacgaagaagaagaagatgacgaaacagaacagggagagaatattagggcttgaaatacgtcaaatgtggactactttgggcccaaaactagaatgatgaacagcccatgtacaagtttgaaaaggcccatacataacattttacaacattttacaacttgctaaactaaacatattgtcaacttgttaaagatttgtagcatagagcccattacaaaattggataccttttcaataattatagttagaacttaaaaaggtattttccaaaatttggaagccttttgtataagagaaaaagagataatatttacgtatagaatgaattttgtactataaatttgttttatgtacttttattaaagttttttttttttttttaaaaggaaaatcgatataggttaaaataacaaaggtaacaaagttatgcaagcagaggaggattttcctccatctataacagttcattgtctatcctaagggcatgcagagacacccccaggagaactagacaataaaaccattaaaacaaaaaaagaaaatctcaaaaactgagagttgtcacttccgatccgctaatagaacacctacaaaataaag

SEQ ID NO: 395175 - DNA, 1520 bp, Cannabis indica
aagcatgcctcacggccagacttttgggccctcttgctcaaagaccgatgtggaggtggagtcctcctcaatggaggatctacaatcatcgggtgaccaatcgctgcaagccccgaaggagggggaggtaacgaggaccatgtggcatcactggacctggtggtcagggccaccattgacttaggacgacctaaagaagctttatcaaaaggctcttcggcaagatccctcaatttggaagccatatctacaaaaagaaagtaacaaagtcaggatacaagttacaagtatttaatgcaagcaaaaacaaaaagttggtactattaaataccttcatcctcgaaggaggaattatctgaactgctatcacaaacagaagccttacccttgcctctagaaataggcaaaggatgggtaggcctagcagaatctgggcttcaaggcctaattgacagagtggcatcactagtggtgactccacaagccaagccttggcagagggccttctttctcctctccatggtcctcgcaagcctaaagagggggataatttcatccataccaatagtatgcctgtaacgccctaacaatagaacgtcatgcacagtgacttaacataaattaatttcgttaaactgaaatctattagagctaagtgcggaaattaaactttaaaaaaatacaaattaaaaataataatttgtaataataagttttgcaaacatctaaaagtacacattttaattcgaggatcccttaaaactttttcaaaatattactagctattcatacaccccaacctaagcggcaaaagtggagatttcaacatcttcccccagtatacccaaccctcgcgatctagtttggcctgaacatgtataatgcaccgctaaagtcctcgacttcatgactggtcaacaaaagatttaccctttcctacaaaatagagcacccatgagccaaggcccagcaagacagtataaacaacaatatgaatgtcactttaaaatcacttaatattaacgccactgcatctattgtctatttgacataaacctaagtgttacgctcacacgtctatttatgtctatatggcataaacctacgtgttacgctcacatgcctatttatgtctatatagcataaacccacgtgttacgctcacacatttatttaagataaggccttagaatgatttatctcggttctgattatcgagtctaatctaattatgccttaagtgcataattctttatatcaatatattcagtataatatgttgggttgtctgccttatataaaacccatttcaatataatcagatttactaattaataaaagatcagaaatcgcttttatgttgcatggttcacatgatttattttatgattatacttaatgtataaattctattaagtccacaacacatatataaatatatatatatttgttcatgattatagtgtcatcaacacagtgaaatataatcatgattatatgttcaaaagtttaattcccat

SEQ ID NO: 395176 - DNA, 786 bp, Cannabis indica
ttattaggcccttaattatgattaaaaatacatatacagtatactgtaaagctatacatataaaataataagcagccaaaaaaaaagttaagtatatctttatagatttgcatgcatgcatgccttacatgcatacgtacttacgtgtaggttaaaagatgagacgtttagctgatttttttattacttatgaaaataaaatgtatgagacccgatatacattataaaatacactaataatttttcacatcttatggtgtttgacatctattaacatttttctctacagtctagatatttatttcttggatgtcacttaatatatattttgggaaaagtgttctatagtacaacccccaaaagattattttggtaaattttctatctgttttggtatcctaaaagatcaatttagtactctataatacagctccttaaagtgtacgttttagttattaaaattatttgtaaatttttaaaaaaatttcaaataattcacaatattaaaagtaaaacttaaatattttgttgcaaattcatgcacgatcttgaaaaaaaaatgtttaaaaatttacacactacaaaaaatcttacttttagttgtgactaaaagtaaataagctgtgactaattattaattatcattcctatattgtgactaaaaggtctgtagctaaaggtattagtcacaaaaattacaatttgtgactaaaagtaaataagctgtgactaattattaattatcattcctatgttgtgactaaaaggtctgtagctaaaggtatt

SEQ ID NO: 395177 - DNA, 1226 bp, Cannabis indica
aaattttactttatatattatatactcatcatcatcatcgtcattagcatatataattatgatgattaattatcatcatcactctcttgatgagaggctaatcaattatagagaaaaaagcaaaagtcaatatattttccaaaagaagataaatcattatttcacacactccgtttataaattgtaatatcaaatatgcataaggtacaattaatgatgtgtcaaataatatgcatatagttttataatgagacatgttaaaacatatataccagtagtatttaatattattatagatattaatatcactattgatctaattaaatataaaatattatataatttaatataataatttttaaaaaatattaatcgcaaaaatatatatctaaaaatactaaatactattaatattcaataacaatctcattctctataaaacacaatattattatgatcaaatacatgatatagctacatatttttatttgacacatcttttaatacatttgatatatacatcgactatatataaagatttcatagagagagagagataaacgacaaagctacatagagtatataggatgatataatatatatatatatatagatatataggccttgttggatgattacacagatttaggcaatcagtcttttggaaattggaaaaggagaaataatcttatatatgcaaaatatatattgtatgagatatttgatttgatcacacttgcttatatctatccactactactctataccttattacctttgctctcatcaaaaaacgtgattcattctctttctctctcaccactttcaccaataattcaattcaatccaaaacaatattatatatctctaattaacaatattaattataatttaaatgtgtagctagattaatgtatttaatgtctttatatacaatcaaaatctaaataataaatacttgtggtttctagctatatattttatagttacattataaatgggagtagtacgcattgcctttttcgaagtattattgtttagattgttctattaatttttatgtcgattgttatgttaattttagttacgatttaagttccctgttaattgctatgtacagattattacaaaaaattgtaacatttagtgataactttttagtcacaatataatttttttataattaaatgtgacttttagtcacaacaaaatattacttgtgacta

SEQ ID NO: 395178 - DNA, 1143 bp, Cannabis indica
gcaactataaaaaaataattatctttagtgattaatttttagtgacaatataaaattttttgtgactaaatgtgaatacaaaaagttacttgtagactaaaacatagtatttagatataagttgtcattaatttaatttagtcacaacaagtattatgactaaaacacatccgtagtgactaaattttgatttttgtgactaatacttttagtcactgaccttttattagtctgaacataagaattgaaatttttataagttttttttttttataataatggtatgttttcgagtgttcttttttcttttttctttttttcaaattattttgtaatcttaataaatacatttatctatattttgtgtatatagttgtaatctaacctccatatcccctgttgagaaaatctccaacatatatatgaaaaggagaatctaagccataatatttaattagttattttattgactaaatcaaattattgaaattaatgtcgaaatatatatgatagtaaagataatgatgataagtattctattctattatattttattgcaagtgtttgccactacgtacccaataaatatatatataataatattaatatatacatatatatatatatatttatatgaataaaattcaatggaattcattttaaaacatataaatataatatttaagatattggattgatcagatacatcattgaccattatcaacagtctatgcacgcaatacatgtgtatttaatgtaattcaataatattgttaacattacaaaaaacttattagttactagtcatgtttatcactataaattggctataataataataataatttttattatttaagatttttgaaatatatgtattataataccttatatacttttcaatttgttataaatggttcatgaattatttacaaaattgtaaattagttattttatcaaattttatcacatgtgacaaacaaaataatgatataattactgcttagttaattattacattaatgccacatatataattttacattaaaaaataaatacaaattatgcatttaaaaaatcattaaactaaaattaattaataattaaaaaattatgtaaaattaaattttaaaaaattttaaa

SEQ ID NO: 395179 - DNA, 1313 bp, Cannabis indica
cctttgataagtggcccttgcgtttttcaagtccaaaaggcatgactttgtagcagtacaagcctacatctatcataaaacttgtatgttagtagtctggtggatgcattttaatttgattgtagcctgaataggcatccatgaagcttaggatctcatgaccagtcatagtatctactaattggttgatccttggcagtgggaaacagtcctttggacaagccttattcaggtcagtaaaatctatgcacactcgccacttgttgtttggtttggacaccaagacaggattggatacccaaaacgggtagaaagctttaataatgaattcattggcgtgtatctttcagaacttgtgctcactctttatccaataacttccttttctactgtataggccgaaagtttggatttatgtttagggcataagaaattatgggcagatcaattcccaccatgtcttcatgcgaccaggcaaagacatagaggtttgcccttagaaattttatcaatgataattttatttctagcgctaaacctttctcaatctttaatttcctggtcagaagggtgggatcgatctttactttttctaattcctctattggtccaaagttttctgcaggattcccaaagcgagattctaggtctgcttcctcactttgggctgaacttcattacccctggccagactctttgctagagctcttagaaggcattttttctttcttggctttggaaaaagctaagctatggtagtgtcaggcattcttttgatctccccttaggtacccttccccatgccttgttaggaactttaggcataggtggtagatggatgtcacaactttcaggtcgtatagggctagtcgccctatcattgtattgaacgctgatggcacattgatcactatgaactgagccatcaatgttcttattgtgggactttctccaactttcaaaggcaattagatgtatccgaaacgtgcaagaccttgggcaaagaatccatacatcaactgtgtatagggttctagatttgtcaattggagccccatcttatcatagattgacttgaaaagtatatttgaagaggctctattatcgatcatgcacttggcaactgtcatgttccctatttgtgttgttatgtgttgggattttatgccctaaataaaacacatttcaatctaatttgatttgttatcaatgaaagattagaagtcatttatatttacatgtagttctcatgtttatggtttaatatatacaaaatctgttaagtctagaacatatagtcattcacaattaca

SEQ ID NO: 395180 - DNA, 708 bp, Cannabis indica
tctctctctctctctctcacccggttcctatctcacacttatttttatttttattttattctaatattatattagaaaataatcatatatttagaaaacttgaaggtagaaaacatgcttaacttgattagcaagtatatacggctcatcttgataccaaaatcctcttatatttatactggtatattattttcagtaattattttctttcttattagattagtgttatccacttacattcaaacaatatcactgtatatgcatcaatataagatataattattacatattcaagtgtatcccaaattaaactcttttgttctaacaacactaactccacgattttgtgtattttgctttacatctctttcggtcacactaaattctagggctgagcatcggttggtttggtcggtttttttacaaataaaaatccaaatttcagttttcgatttggatttgtaatgtctgaaaaccaacagactaatccggaaacatccttaaaaccgaccaatgtgaaccgcggttcggtcggtttaaactgccaaaatcgaattttttttgtgtaaaatataatcaaatttattttataagcacaaaacgataactataaatactagagttgaactatagcaaatctttcttacaataaatctcaccaaatccaaacaaattaaatgaacttataatgattattgtccaacccca

SEQ ID NO: 395181 - DNA, 552 bp, Cannabis indica
aaaataaactaattaaacgagtaaacacacataactgaagtcatttaagctaaacaaatagaactagcgcagacatttacgctaacttatatagattaaggaaaaaagaaaactccctcaagagttggactcttcaccatcaattggatgccaaggttgaagaatctgatttggaaagtttggatatcctgggacaactttgcgcaagtttttttgcagcgcacgcctcacccacatgtctatttccctttcatactcctagtttatagatattttttttgaacccaatactcccagttgttgcagcattgcttcagcaattcattctcttatgcatccccgtttcaaaatgctgaggcaatgctataactcctgggacctgctgcttcagacaataaatcctgcttttcagcctattacaacaactctattttatgccttgcacttgcaataacattcaccataccatgacattagcaattgaagaaagttgaaaattatacatatatatatttatataagtatgtatataatatttttttttcttttttt

SEQ ID NO: 395182 - DNA, 1085 bp, Cannabis indica
catataagaggcattaagttaagaaaccataaatgctatctaaactacataggtactctcatcttatgtcgaaatttatccatatttcactatagcataatcaacactcacttcttagatttttgatcgaaattataaaaaattaattgatagacaattaaacaaaattaagaactaatgaaatagatgcacataaaaagttaaaggaagaattaaattatattaaaataataataagatgtcaaataatctcccttaataccctaaataaaattctagattaaataagaacataagaagaaagtagaagaaaagaactcgtcaaaaaaatattgttaaaaagtcttctatgtcgcttctgctctctaatttcttgccaaaaattgttgaagaagacccctttatctagctaaaaaatagaaaacatctatttttcgaaattctggtaggcaggccgcgacactacaactgtagtgttgcagcccgtgtcttctaagcatttcctttgcaatttttcccataaggccgcgacactacaagccattttcccatgggccgcgacactacaagccaatgtcgccacccttgaagctgttttttaggcaaagagcgattaagatttcaatgcctcaatattgaacccaaatattgacgggagcctatggacttgtcaaaagtcgaccttgctgccaaattttgtcattttagcgccatgacattgaattttcatgttgaggcgctaatcaatatttttttaattccttggtattagaagctctactcgcaccaaatcttttggatttaaatttgatggtgctctagtggcaagactttatttaaataacctttttacaaaaaatttctcgagatttcttcagttttatttcttcaatactaaacctgtaaaatattgacaagcaaaagcgttaaattgcacaaaatatatctaaaactatttaaaactactttaaaaatatacctaaaaaaatactaataaagtcctaacaaattctcccaaactagacctttactcgccctcgagtaaagaactaaacaactaaacacgacacaacataaatgaatca

SEQ ID NO: 395183 - DNA, 841 bp, Cannabis indica
aaagtattatttttttagggggcgacaataattctatatgtttctcttttaattgctaaaattagtccttaactatttttcgccaaaaaaaaataataaaaggtacaatttaaattgtataaaaaggtaaactgagaatttaggcacctaatctttttataacttaaatatcttttaatcaaaaaaaaaaaaaaaaaaaaaaaaaaaaaaaaaaaaaaaccttaaaagatctagatatatgtaattaacatgttaagaaataatgaaataattacacaaatttgtaaaggctataaacatttctagacaaacttcgatcgggttcacctccatgtaatcttacaatagaaaaaagaaattaattaaacaaaataaataaaaatgactatttggttgattttctagtgcatagatgagatgtgctttgttttacacgtataattgtccaaaaagaaaattgagaataaatatcataaatattgtctcgagtctgattattttgctattatttagacaattttaactagctttacaaaatatatatgtatatatatataatttttttttgaagaatatatataattttttttagtttagtgattgttgatgaatggtgttttttatttaatgttagtttgaatttttaccctttgacttttgacaggtattaaattatgatttttaaattttttgatagttaaaaattttcttcgaactattgagatcgttagatttaagaatttttatccaattttactaaaaaaaaatatgacgtggatgaaaatttaaatacatgttaaagttcacgaagtatgattttataactattaaagtttgggag

SEQ ID NO: 395184 - DNA, 1015 bp, Cannabis indica
tttttttaagaatatgaaattgaaaagaaaaaaattaaaagaaaaactaatatattagggctcgtttggaacgccgtataagtcatattgtattgtattgtattatattgaattggattatatatcatattttttatataatactatgttaaactttaatttatattaaaatattatatatttaagtgttcataaaagttaataccacatatagttttacataaaaatattgcataaaatacaattcaatataatacaatacaatacaatacaatacgacttaatacgacattccaaacgagcccttaaagagatattttatgtaaaactaaaaattattaaaataaggtgtatttataaattttttgggtgcaaataaagttttttttatataaattttttgacttattttgataaattaccaatttagatcttagacttttacaaattttattttaaaccttgtattttttaaaaaactataagaccctaaagtcaaaataattttaaatatgactcagatattcttaatcatggaaagagttatattattttaattttttaattttattttagtctcactatttcaaaaattaaataaagaactagtttcttagatgaaatatttttaaatataatcaatcaaatataaatgaatgaattaaccaaaatattaatttaacactcaaaattgaaacaatttttttttaaaaaaacaaattatttttatagcatattttgtaacaaaatataatttttaaaagtgtagagtggttagactaaaatatagctagctcgtgactgaaattatacaactcttactataactagggttaattttgtcatcttcaaaaaaattttgacgggtgataattgtaattgtttacaaaatacaaggtcaaaaatataattttcataatgtaaggtctaaattggtaatacgtcaaaatacaaggttaaaaataaggaaatttttatttgcaccctataaaattataaatacaccccattatta

SEQ ID NO: 395185 - DNA, 1309 bp, Cannabis indica
ttttgggtgtggatttgcttgagaattgggaagattgtggcttggcacttgtttgagttgaggtaactctttttactggtttttatttagaattcttgctgagtttttatattggaagagcatgtaaagaggtgagttgttcttgagattgcatgttaggagaattgatgtttgatcttgttgaaattgagcctttattgcttgatgttgttgtaagttctattcttgagtattgattgagtttttaaggtgtttcctaggttggaatttatattttaattagtgttatgttgctggaaaatgaataaagatgagaaggtttaagctcaagctcttgaacttggaattttgttagtttaaggcatgattttgtgtttattgtgcaatctgaaattatgaggttattgatggaaattgatgcttgaaatatgaattttaactctctaatatttgctagcaactctactttgtgatttgagagtttggttataatttggggatgaattagatggattttgttgctgaaattcgtatgtttgttgctggttttctgggtttggaacccaagtgtcgtggcatggtattagcatgccgcggcccacccctctgattggaacctgggagctggtcccaggtgccgcggcatggcttttgcatgccgcggcccgccctcgaatttctgggcagttttgagttccaactttgaaattgcataacttcgtgatccgaactacgttttgggagttctatataccgctggaaagctcgtttcgagctctatgtgattatttgaatttttagtgccatgtttatatattatgaatgtggaatcaggggttaaccctatttggtcaaaatcccggtatttgtgactaggattaccgatacctggtcaggagcacctgggatttggaatctctactattgcgggacatcacgtaagacagtatttagcacgtcgagttatgcacggtggcacttgtattagaaatgatatgtgtgagtaatgagtaaccgggattagggttattaccctaacgtgagcggtttaattgcctagggttattaccctagtgatatatgttgaatgaatgctatgccatgatatatatttgagtatgttaagatttagggttatgcgtgcaaggcataaccgggttggactcggtaactagaaccgagatgaaccgtcctaaggccttattgtatttagacgtgtgagcgcaacacgtaggtctacgttatatagacataaataggcatgtgagcgtaacatgcagatctgtgtcatacatgttggaaattattt

SEQ ID NO: 395186 - DNA, 571 bp, Cannabis indica
aaatgggttcatagagttaagcttaactcagatggcagtttggacaaatgtaaatcaagattagttgcaagaggttaccttcaaactcctagaattgactataaagacaccttcaatcctgtggtggaacctgtcactgttagacttgtcctctccctgactatcaatgctaactggccaatcaagcaactagatgtaagtgatgcctttctgaatggcaatctaaatgaaattgtctacatgcaacaacctcttggctttgttgatgcatccaaatcagaccatgtttgcctccttcacaaagctctatatggttttaaacaggctccaagagcttggaatgacaagctaaagcaaacactacttcattggggttttcaagggtcaaaatctgattgctccttgttcattcatggttgtaatacccgataaaaatatacatatattttaaattttatttgttatacaatttgtatgagaataagtattttatttatttctactaatagtgaatagagataattgcttagaatagtattgataaatttctaaacatagttgaaattatagt

SEQ ID NO: 395187 - DNA, 867 bp, Cannabis indica
caattatacattacatattaactattctaagacaattacttctcaaacttaaaatcatcatcacatcttcatatacattcaaatcaaagaaaaaaaaaaaactatattgcatctttgcagtagttccatctttgcattagccctttgaaaaattttcatattggggaagctcccatctgccaaagaaataaagcaatttcaaaagttattgatgagcaatatatttaattcacaatcttatttttcttagcctaaaatgaaatagcagaaaaatccatatgaaactctaaacttataacaagaatcaaaacagcaaataatagatttgtaaaaaaaaatctcagtagctctgtgaacaaataagaaaaccctttgaagaaccaaagagagcaaatggagtgacctctttgaaactcagtcgaacgacgttgcctcgttggaaaggagcaccgctggccgaccattgtgttgccttgttgcttgccgagaactaacacctccaagagttttactcgccgccgcatcacctaccatacagaaggaggtgagagaaagagaaagcagcaaaaaaagattattgggcggctagggtttgtctaaaacattttgtgtgatatatttatctcttattaatttatttaaaaattaatccttacaaaaataaacattaaatattaataaaagtaattaatatttgtataggaaatagaaaaagatgtatggagccccgtgcctattatatctctatatttacataaatatatatggaagaggtttcaatggttacatttttattgtaaccatcatggttacatttttttaagccattggattactattaaatggttgtgattaatttggaaatta

SEQ ID NO: 395188 - DNA, 1582 bp, Cannabis indica
atgtcttcttggggaggcatactcaacaaggcctgtatcttttctaggtttgcctctatttcgcgctggcttactatgaaccccagaaatttccccgatttaacgctaaaagtacactttttgagattgagtttaatctcgtacttcctgactacttcaaagcatattgtatggttgtctgcatgtcccatgcttgtcttagatttgaccagcatgtcatccacgtagaccttcatgttacaccccaggaggcctttgaacattcaattgatcatgctctaataggtggctccatcattttctagtccaaagggcatgaccaaataacaatatacccccttgccggtcctgaagctgataaactcttggcctacgacgtgcatcttgatctggttgtaccccgaaaacgcatccatgaaagataataactcaaaacatgaggtggcatctaccatttggtcgatcctgggcaacaggaaacgaatcctttagacaggatttgtaaggtcggtgaagtctatgcatattcgccatctcccatttggtttgggcaccagaattgggttttccaaccattctgggtaatatacgtcgcaaataaagatgtttgataacattttgtccacttccttctcaagggcatcagccttcactagatctagcggatgccttttttgttgcactagaggcatgtttgggtgaacattcaggacgtgagtgattatgtgagggcttatcccgatcatgtccccatgacaccatgcaaatatgtctgctgatgcctttatggtgacaatgattttactccgttccttcgggtcaaggctcttgcccaagcgaataactttagatggatcttgatcgcataccctcacctcttcaatatcctccatcggttctaaccccgcctcaaaaccaatgcaagggtctaattcgtcttgccccaccgtagatgctagtctagtcccttagattgccaagacgaacaagtgtaccgcagtgttataacactgtctcacctcccctggttaccccaaattgtttctattccctcctcctgggtaggaaacttaaggtacaagtgtcggattgacgtgattactctaaagtcaactagggtcgaccgacctaggacggcgttataagcagtgggacaatctacaaccacgaaggtgcaatatttgaacgtactttgcgggttgtctgtgttggaattattttactaggatcttagatctactcacaagtatgttgattaacaacctaaatatgaacttctaaaacgataataagtaaacacatataaagtataagaaaccttaaattgggtgcagcggaataatatgtctccttccactcagatctctaacccttgaatcctttctgatgcagagtataatcaagatctgagtctgaatgtgcttctcttggatttgatccttcacagtctactactctctcactaggatttcgaaattgtatctctcttgtgtgttcaaagaagaaggagataggcggctatatatagaagaaaaagggaaggctcaattttctagaaagaggcagtttcctgaattactga

SEQ ID NO: 395189 - DNA, 817 bp, Cannabis indica
agatccaactccattattgtcattctcagctggaacaatcgacaaacacctttgactctgttcttgaaataccgatgcatagactttgttgatgttaggcaaaggatcttgcattaagatttgagatcgagtaccactgtaggactcatttagacaaaccaagaatttaagaactctgtcttcttcctaatatccttggattgtcttcatagctccacaggtgcatataggttgtggccgatactcctgaattagatcccatggagacttaagtctagtgaaatagttggtgacactattagatccctgtgcaagagactattttgttcgaatagcttcaaaaactctaggagcattcttttgattgaatcgctcctcaagattcaacaagatctgagttgctttatacatatacatgacactttcagctatttcattggagatcgcatgaagaatccatgaaataacagtgctattgcaacaattccaaagctcgaaatcttcatcatcttcattgcatgaaagttttccattcacaaatttgagtttattccttgcaacaagtgcgactatcatagctcgacgccacgagctgtaactctcacaactagtgagtatttttggaactaaactaagtccaggatgatcactattagaaaggtagtaaggatttcttgcttcatgtgaataggatctaacattggtgtccaaagcagagtattgattggaatttttagatgagcttcgagttggagctcctccccgaggcatggtgtaatgaccgctttagtaatgtggattagaaaaggcaattagc

SEQ ID NO: 395190 - DNA, 1329 bp, Cannabis indica
gttttttttttttttgtaataccctctctagcttttctaatttattttcttttatatattttcaaaatttaatattacacagttaaattaatatttgtttttattattgtatttttttcttactgttgctcaattttaattgggggtgcctttgtggctattctcaagatccactcatcataagagcttcgtcatccaatagtacttagttactcaaattataagtaatcgattagttaagatattatagctacccaaaatataagtatcttgttatccaaaatataagttcatagttacataaaagtataagtatctgtttacctaaaatataattaattgattacctaagatagtataattatctaaaatataagtatcttgttatgcaaactatatgtacctagttaactactaaaataaaagtacctaattacccaaagtataaatacttaattactcaaaatataagtaattggttagccaagatagtacctaattgcgaaaaaaaatacctggttacccaaaaatataaatacctactttatcaaaaatataagtatctagttacccaaaatataaatacttagttacccaaaatataattagtacatgactacccaaaatataactacatggttatccaaaataaaagtacctaattacctaaaatataagtagatggttacccatgataagacatggttacctaaaatataagtgcctagttacctaaaatataagtagatggttacctaagataatacttggttaccccaaatcttacttgattatctaattcgcaaaatataagtatgttgttacccaaaatatatgtattggttattcaagatagcacctacttggttaccaaaatataagtacttggatatccaaaatataaatacttagttacctaaaatgaccgtaactagttacccaaggtagcaatttgttagcaaaaatataagacacaattcataattataattggttacttatggtaatatattatttaaaaaaattataaaaagatatatgtaacttattactcactaaatcgtagtagtagatatcaagatcttaaaaaaaaatcatatgtgaaaatttaaaatagctaattatttaacgcaagtattaagaaaaatgatttcaaagggaaatctattcattcagtaaatattctatccaaaacaaaatcattcaaaaaattttaaaaatatatattgggtatgctcttaatgggtattacccgtttatgcgtattttattcttgaccattgaatcaaatatctaatggttgatgtttatagtcattaattaaatatt

SEQ ID NO: 395191 - DNA, 1160 bp, Cannabis indica
ggtggtgtagtttcttagaattgtaaaaaacaaacatgcataacacactaaaggtcagagtttatacaattttgaaaattcaattaggttgtcatgcttagtcacacttagaaatgatcatgattattataatcatactttgaacatatatgttaaagatcaattgaaattgggtagagaagacatcctaggaagttaactgctacggtactttaatagaggtagtacaaaaatttgttagcttaacaagcttaaaaaaagcatgccacaataactacttccccttcctagataagattatttgtttttcattttatttgaaacatacacgaaaataactataggggatgtcatcaatacactgaaattttaaatgattgcaatgaattattcaaaaaaaaattgtcttcaaacattttagtattttgaatgtttgttaatctaagatattttgtcttgtgtaataagcttttacaatgatgtataaacgaaagaggggtcctggtgcagagaaaaatgatgcaactgagataaaaaaaaaggattcgaaggaagcttgggcgaactatttgtaagttatttgtcgcagtgtttgcgcgctaatattttttggttttgaaaataatatttgtaaaatcccccccttaattaattgatgcagccaagccaatttcaaagcttatgctgctgcacatgcagataaatcaaaagtagatgtgagtgacttggagtgtgttatggatcttttatttttgatcttttatttagcgttctttacttaattgagagtcttaattttgcaggtccttggtagttttaaagatcaatttaagctgcttagtgaggaagagatttagaattgggcttcatatgaagttgaggcttccccttcaaaggttggtgttaaagggaaaggaaataagttaaaggagacattatctggtgagctaggaattgagaacaatgaaggggtaggggatgttcaagtatctggtcgttgctccttcgaacgtttgggtagcatagtcccatttctgaatgacgctcaaaaataaatggtcagaaatgtcggtttctctaaattcttaagggaggatggcccgtacatcaatgctgagatagttagttggcgtatcaatcacgtggatccaaccacttct

SEQ ID NO: 395192 - DNA, 1141 bp, Cannabis indica
agagagagagagagagagaatagttattgggttagaggaaatgggtaattagatctccaccagatataattttaaacactctgaaaccgaatcattactgtcgctaccgctcaaccgctttggactctcgaatagaacggtcaaacctgtcctttttccttcctatatgtctctccttctatttctcattcaaataaaagtaattttgttaatttatcatcatatttactctcatatagataatatacattttggtgaatgaatatatattctagttttgtcggctctctttattatcacacgaacaagagaaactatatgagctgatgagcttggattggcatttgatgagctactcttttgcaaagatcatcccaataagtcaagccaataccataccacctttcaaagatctttccgtgattcaaaaagataagaagaaaaaaaatgaaaacgacagctgatttatctataaattaatgctaattaacactaattatgctttttcattttaaatatataattattgatttgtgataacggttatatatttcaggttaatactagctagactactaagtgtttttccatactagaaaatagaaatgggttactacttatactaaataatagtctgataggtatttcatgactgagacaaacagcgttataatctaaaaatatataaaagtcaaagtgggaagaaaattaatgatatatattggaaagattaattggtaagtgttaaagtaatggttattaatttgccaattcttcgatcaatcacgatcgatcggacctattttaaatatctaaatgtgccttttaaagtgcctttagatattgggagcaattaattaagacgatcttgtcatttaaattagaacgcctagtaagtttaaattaagatgaaagtgtctttagtttgatgacatacacttccatgctttgccctaaataaagtacccttttatgattatgtttaattaagaatatatatatatatagttgctagaaaaatatatatattatttatttaattagttagaaacgagagtaatgtaaccttttaaacttttgtcatagaaacaaaacgtgcttgcatatatacaataaatctatctcgtgtaaggccactaag

SEQ ID NO: 395193 - DNA, 637 bp, Cannabis indica
aaagagatgaaaatgagtctcattttctgaatcacaaacagagcagttggtggaggggagagccaaaatagagctaagatgatccctagttaaaagctggttgttaattgcatgtcaacagataaatcggtacttgggaacaatcagtttatgccaaacttagggagcataattttagataaataattgtgtttttattatatacttattaaatatggtattttcaaaatacaattaagtcttcttttttttttttaagaatgtcttaggtcaaggtggggcagtcttataggcgacaacccatctcgccctacacttgggtcgggtatgaaggccggcgttacttctttctaggagaaaatatgttacaggtgcaccaagatagtactttaactatggtcttaaggtaacacataaaagagtgataataggatcaagttgacaatgttgggttttgtgccctaaataaaactcatttcaatataatcagatttactaattaataaaaatcagaaatcatatcttatgttgcatggttcacatgatttatttcatgattatctttaatgtataaattctattaagtccagaacatatgtatttgttacatgattataatgttgtcagcacagtggaa

SEQ ID NO: 395194 - DNA, 897 bp, Cannabis indica
caggacgatggattttctctttataatgattactgttgtgttgattgtaatcagtcatttaatatggatttgtatttgtgtttatgatgagggatttttttgaatttttatcactaagtctcctaatgaaatcactaaactgttaataattttcgtcaattaaataaataacttttttttgtaactttagagttcgtagaattattttaattatttatttaattttttttttgtttttaagttagtttaattattaaaatagtagcaacatgttattgggcgatgtttataacaaaaacaaaacagaaaataatggaatatgtatgagtcccgcaatattgggcagtgggcgaaatgtgcagtgggcgaaatgaagcctacatcaacggcgcccttatcgatgaaactcaacaaggaattataatatccatcaacgttcaaaagccccatcttattctatacataactatttatatatccaatccttaccaataatatatacatgatcagtgtttgagaccttaagcatacaatcctatctttttattctaattaattagaagagaatcttttctcccatttacatggagatcgtttaaatatcaaattcatttatatatcatatatgtatatttagtatctgatcttataaatataaaagaatgctttatttgattaaattgcaaatcttccctagagcgctggcatatcttataagtaatcttttcatgtgtaccatatttagaattaaatatcacatgcaatgatcattatattaaatatagttatgtaacataatttttagtttaacgattgtttttgaatttttaattatattctaaaatttattagtttgaactttaaataaaataaaaaaaaaaacatatatataaatat

SEQ ID NO: 395195 - DNA, 661 bp, Cannabis indica
ggagaatgcattatagaccaaaacaagagctaataagagtttgttgttgtatattattatttattttaatattcccacacattatattttaaatctaattataatcacaatataattctgtaattactagctgagtaattatatagttactacctaaagaactaaaagaaaaaaaaggtaaaaacaatgatggtaatcataaggaaaaaaaaaaggacaaagaactaaaaagtaaatgaaatgtgaaattatgagttgtaaattaaaacaagggttgagatttactcttcattttactctcaaggcttaaagtagttgttattatcaattaaggataactgttaacaagttacatgtattatagtaactagttactaaatacttaattttattctcatagatatcataacacagctagatcacatttcacaaactcatgtgcgattctaaatcttgaatatcattaacatatatattctaaaatattttacatataaaacacaaaatatttagagtaatttgcgatgtaaaatttaactctaggttgtagttataaatacttaagattaattttaaacggtaataacacataagttatatttttggaactttcacggttaaatattaaattattatccacatgtcactttaaagttattat

SEQ ID NO: 395196 - DNA, 825 bp, Cannabis indica
ccgattttggtttttttttttggagttattaatttcaggagataatgcatagtataactcttgatctcggtctaaattttagagcaaatttagataaaaaaaaattaggggtgacaattaaatgtggataaatgtggtaattgtaaaaaatttaagggaaatttaccaaaaaaaaaagaaaaaatattggaatttgagttgattttcataaaaatactcttccacggacattttttttaaaatattgtacttttataaaacaatagtaaagcacaaaagagaataattaaaaacaacagtggaacaactaaaaaacaatcgtagagcaatagaaaaaattcaacacagtataaggtataaaatttatacagtattttttttttaaaaaaatttacttcatagtaaaaaagtaaacaaattagaaattttcagtaagtatgtggtgtaaatatctctaatttcattgtaccttacccaatagacaattaaaaatgtttaacttgcctaataattttaccgatttattcagttaacctgcctaaattgtcataattttttttttattattattagttttaagtgttaagtaaacatatttaatattaataaaggtatagtatttttgtactttaagcttaaaaatagaataatttgttctataaataattaaatttaattctcgattgtaaatagatactaagtttaatttttaactgtaatgatactaaaattatattttcagaatttttgtaagtattcggtcgtttagtgtcaagttattatacacacattatttttttattgatatatttaaattaattttaa

SEQ ID NO: 395197 - DNA, 593 bp, Cannabis indica
tctggaccacgaattctcgaaccgaaattgatgaatatggactgctgttgctttgtgctgtggtacaagaaagatcagggagtgatcagaagaagagaagcccaaatttgtaagagttgcagctgaaaaaagatgcaaccagctgtgagtaacaagggcacgatcaagacgaaattctacccactgatcagtacctcgagaccattcccatgtaaagggatgtccttccagatcaagatccaccaaatcgcagctattaagagctgcctgaaaaccgttgattaaggccgcagggtagggacgtccgccctttttgtcattgtggctggtggtgttgttcaagtcgccgatcaagcaccaagggagactcgaggtagagtgaagattgataataataataatttaaactcttagttacattatacttgtaacaataataatttaatattaaaaattaggtatgtaattagatattcaattaaaaatcgatacaattcaattaataatttaaattagattagattgaattaaattttaaatttaattaaattgaatcaaatattaattttttaaatttaattattaattaaatt

SEQ ID NO: 395198 - DNA, 1040 bp, Cannabis indica
tgatgatacagcttagatcaacttcttaacagctcagaaacacattttgtatgctgaaatttttcattactctcttgtcactttcactataaagttgctgaagttattttccagcatgtaaaaattgcttaaataactgcaatgaaactacaaaaattcaataactaaacaattctcacaaattaattgatatcaggtgcccttcctaaaatttttgaaaactaaagtaagatacaagccttacccagtgcctaagaagccttgaaccaaatatagtaaaagtgtgatccatggactgcaacaaagagcccaattcagaccaaccattgttgttctgcaaaatctgaaagggaaaggaattaaaggatgaaagctaaatataagacatcaagttaagtgttaaataattgattaacataatttgttttagatcccaggattgtataagttgtgaatgagagaagataatatgcattgttatttgaaacaatttactgtaaaccaaagacaattttaaagcataccactagaggctgcagttagtagtaggaagattgccgatattagcaattcacagtccaaactatcatcatgtggaaacttcaaaatagaaacaatgtttataacataactaataaaagagcatatacctccaactgttgaattgcattggcagatagggtcatctcgaagttgttggataagggcctaaaagaagctccttgagaaaataacctttcaaaactaaattgttttagataacgaatagtcaagggtaacgcttggatgaccaaatctgtcatgttcatgttcccctttaaacattataacaaaagatagcaaatggaataaaaataaagtttaacagtagctaatatatttgaacaaaaaaaagaccatgacaaatttttaaggcaaataattaggattttgtaatttcttacacatgacaaagagctataaatgtagtttcataataattcataaggattatgttagacttttatttgggcttacattaaattttattggttttatta

SEQ ID NO: 395199 - DNA, 1081 bp, Cannabis indica
agtaaaataattagttgattctgaaagtgctaaagtcctttattgagcactcttctcctgtcaccttcacaaccaaaggagatatggaacatgtctgctttgaattcaattattaccactgggaatcggcctccccaatgtcttggcatttgttcaaagaaacctggtttgtagataggcttagatgaaagaacacgggcaataagagagaaaggcaatttgtgtagggggttaggggtggtagcatcaggcaaagaaatgacgttcctctcatcatcagtaagagagaggtggagtgtagggtgtctaaaaacgggtccatgggttgatgcaggcactagaaaccagaaaaaataggggagagaaaagcagaggaaaaccaaaaaggtagtgatctggggaggagaagggcggaatggaggatggaaaagaggtgggaatagttacatgaggctggagaattcaaaaaaagtgaagaaaaggagaagaaaatcgttaaaacaaaaaaaagacagttaaaaatcaaaatttgacacagacccaaacagggaacctacaacaaacatatctattggtaaaacttaatatgtaatttcattgaattataacttgccattttgtttttttgaaaatataatttgccatactgcttcctcttcttttgttttttttaagagaataaattttgcattaagtatattctacatcttattatataatatggtacgtgggttattttagaaatacataaaaatatgattgtatagaattttacattttttaatatgttatatacagaaaatacagttttttaatgttttcatgttatttttatattatacttttgttaatttttttatttgattttttgtttattagttttatgttgtctagatatcatttaggtgttgttttcttgttatttttatattattcagtaaacaacgtaaaatataaaaaaatagttcaacataaacgtaaatttatttttaatcagtgttttgtgtaatttttttccttatctataccccaaaatgggtcgatcaatctcacaacatcccaaaagacttgttttgcggta

SEQ ID NO: 395200 - DNA, 526 bp, Cannabis indica
gagagagagagagagaattgtataaatttttcgaagaatgaaaaaaaataaggactcttaaaattctgattgtatttttgttttctatgactttttgtttttacaaactcatatttttagtttaattagttagataatatcatatttagtggccttaactttttgtgctatatttatctaaatttcaattatttttctaatattattatcaatatccccaaaaaaataccatattcttattaatttgagataattacataagacactattttttataaaagaaattatatttttatgtttaaagaatttttttatatgtatatttttacggtttttcataaaaaaaaaatacgaaaacaacaaaaaatctatgaaaaagtaacgttaaaataacatcaaaacaaaaataaaaaataacgtacagataacaaaaaatcaacaataaatgaataagagtacaacataaaaagaccgtattttctgtaaataaaataaaaaattaataaacatatttaaaattccgtaa

SEQ ID NO: 395201 - DNA, 1422 bp, Cannabis indica
aagattgaaacggattcaaaggttgttgtaattactttttaggctggttcaatcccactttgctggagtgtttttcatttgttttctcaatgtatcaagttgtgtaaggagttccaaaatgttgaagtgacttttattcttcatgctgaaaaaactttgtagctgataagttagctacttgggctagagtaacttcctcaaactgtaggggtgttctaacggaagtggtcccctttgtggtcactagtttggtgtagtttgttttcttcaataaaattatccacttataaaaaaaaaaagttaatatcaagtgcaaatgggcgttttatttatttatattcttagtttttattttggttatgtatatttttagttatatatatattttggaacgttatttaataaacaatattattttttattaaaaaacttttaatttaagtgctatttataataaaaaaaaatataaaaatattcaaaatttattgttaattataattttagtttagccgtaataatttaaatattataatacttttcatttttttagaaatatcacacactaattttattttattttttaaaaaataataatagaaagatatatatttttttttttgtaattgtaatagataatgacttcacaatagtaattcttttaaaaaatatatataaacacttttgattttattgtttaaaaagaaaataataatcgaaatatatattttttaagtatattgattgagtaaaaatactgataatagaaagatatattttagatatgtgcaatggatttaaatttgaattaaaatattttaaaaaaagttactttatattatatagccacatttaataaaagataaaagataaaagataagagagatatgtataatgagtttgaatttaaattgtaatgcttttagaaaaaataacaattgttatatagtcacatttaatataatatagaaaaagaaagtataaaatttgacatgcggagcctatatatcattttttttttgtaaattctcgttgtcagatttaattagatttttttttttgaaagaaaacgaaaataatccattaaacggcacaaaacttgaaggtcaaaaaatacaaataagaacataaaagcaaacaattagattcataagaagttcgggccaccaaacacaatacccatctaaaacaagcatcctctttgctagagaatgagcaaaagaaaaagataaactaaagaaatatttttgaacatgagatatatcattaagcactatgacgaacatcctaaccattgaccaccaagaataaacaaagggaatcagaaacagttgcaacatttttgaaacccaaccaaagacaaagggaaagaccatgaaacaatccattgcctccgcaacatgaggctcaaaagtaccaatcaaa

SEQ ID NO: 395202 - DNA, 596 bp, Cannabis indica
ctttaagtaaaatagtaaattcttcgtttttttttttttttatatttattggaattttttgttggttttttttacattctacaaaatgttgttttctcaaaagaaaaacaataacatataatattgtagaaacgtgaaataatgtcttttttctaaaacaaccaaaaaatgacgatatgtattttgttaaaaacaacaacaacaacaacaacaacaacaccaacaacaacaacaacaataataataataataataataaagtacttcatatttttttggtatttttgaaataagtcatactcttttaataagggtccaataaatcttttttgtccgggccttgggctaacgcaatttaacctgcaccgtagggcccacctagcccaagctcaaaaattttgttctttataaaattacatattttttctagcatttttcaaaatagacatattttttataataggggcccaatacttttttttttaacaaaacccacagccggccttagttggattattggggtaagttgaaaaataccccttttattaatcaattaatcaaatttgtctttaattttatatttatttgaaacatac

SEQ ID NO: 395203 - DNA, 1062 bp, Cannabis indica
gaatattcaaaatgttctaaccaaaagtttgagtattcaaacgttgtcgcaaagaggatgcaagtattcaagtcataggtaagatttttttagaaaaactccctattttaccttattctctcaaaatttcatttttccacaatctatcctacgtattttcatacaatttctacccctaaatacccagaaagtatgcgattattcaaagaaaatacattaatagagagttatgtgaaaaaatactaacctttgtatccaaatgctggactcttttgagctctattatcactttggaaaatctcttagaactttgaaacaaccttttacaaaagaagattcaaatttttaaaaattttctgttaagtttttcaaagagaaaaatttcaataaaaggcagagaatggggacgaaagtgaaatgagatcaatttgtattccaaggagtttaaactacaaatcgataccctctcggtttggatttagacacgtggcaaataaataccaaaaggtcactcaatcctatggatatcttaaaaacatgcctgcacaaatcccgaagggtctgatgatgtggcaccttggggaaataaagaattaaatagatccatctttttgaaaccctcaaaaagacaaccaaaaatcaccttcatgtgacaaaacaactcgcctgtccctcgcaagtagttttgctatttgacaaacagttgttatcatgaaactagaggcacgtgttgtagtgtaaattttttacctagaagtacgagtacaacctcgtataaaattgacacgtggacccagttcccaatagaaatgatgacgtgttaatagattgctcccatagagctaatctcacttaatgaaaacttgtgagatgatgcgaccgagacagggctagtcgcatattatgctttgcatagtgttaggttataattaacctatatttcgggtctttaaagttagcattatctcatctattggtgtcttttggagcagttttacgcttgattttcattatttcaggttcccggggtgttaaagttcgaattcagtcaaatggcgaaaa

SEQ ID NO: 395204 - DNA, 962 bp, Cannabis indica
aaccccatgattctcaacaatttacattatactaaaagtaaaataagaagagttttaattggtactgataaagaagggattgatcatgtttctactagtaaatgtcactctcataatcaagtctcactcttctgatctttttcaatcttcacccttatcgtttcatatatctaaattttctattttactttcttagaaaatttagtttttgctagtgtggttgaactgttgaagaaattcaatgcttgtctatgattttatcacacttatttttaaatatgtttaatacaaggacccttattaataactaagaattaattcaacacatcaattgttagtatttttagtaatttatttggattcatttttgcccacttaatttttttttatttctttcctattttctttttattaaataattataaaaaatattaaattccttaaagaaatctattcatactgaaatgaaacatgaagcttggtaattgtttttaatttaaatatatgaaaaagctatattaatttgaacaaataaaaattgtagcttttcataaaagattattacaacaaacacacattaaaaaaatttgagaatagtatttgttttacataacatatcaaacaacaacatatatactaagttcaagtcaactttaaacaatagcttattttcaataattttatatcataatactcttctaggcttgaccacttgacacagaatctccaccgttcattatcttgacaatgcaaaatcctttgtcaaaaccaaagataaccctgaaagaaaaagtaatgttagtacatagacgatgggagcataaaagtaagaagatgaataatgggaaatttttaaaaataagcaaataagcttactgatttcctttgatggatccaacggcccaaactcttccaagatcataattaaaagtattttcaagcctacaaatcaattaaaatta

SEQ ID NO: 395205 - DNA, 1206 bp, Cannabis indica
agagagagagggagagaaagagtgtgttttgatttccatttattttttttaacttagtatagaattagtaaataaaactaatttaattactaactaaataagcctatcatttaacaaaatcccacttaaagaaaagggtaaatgactaaattaccctttcttaactttgaagtaactaacatacacttagggggggaaatggtcataatccataacccaaacaccctaacattctaaatgtctatctatattgttcttctatttctaaagtactaagccacaataaagtctctataggctatacgtcgcattctattgttaccgaacataaaaatataaaaaaaatataaaatttatatataacataaatagcacacctagaattcaaatatattttcttaattgcataaataataattaaaagtctaatttttaattaaaccataattatctactaattctcaaattaaaactaagcgctcattacaatagatacatattttctactaataatatctctcaagtgtttcctaaactcactaaagtgttttctaagtttgtctatatagatgctctctctctctccctcaaatttcccaaataatccaattatacgaagttgtacctgaattgttttttttccttgagatgctaatgctcttctaagagctctatatttatataaggaaaacctcaactaccaatcaaatataataaatgaggtagctcatctttcaacgatgtgtaataaataatggagcatgcttcataaagaaatgaggcaaatatctcaaaactcttgaaagttgaaccatatctttgtaactctaagacaagttgactcttgaaaattgaaccatatctttaaaattccaagacaagttgacgtttgagccaaactcaatactgaaagggaacaagtttactaagaaacaatcctaagaacgacttagaaagagaagcaatgaagaacatcctatatgcaagtatagtcgggagtttaatatatgctcagatttgcactgtacctgacattgcttttgtagtcaatgttttaggagaaatttatctaatcttagctataatcattgagttgcagccaagaaagtcatcgaatatttgcaaagaacgaagagttttatgcttgtgtataagcatgttgacaatcttcgagttgttggttattcagattcagattttggtggt

SEQ ID NO: 395206 - DNA, 867 bp, Cannabis indica
agttgtaaaaattagacctgagacatttttcctttttagataatgtattattaaaaaatatgattggttacttattttgaaattatattcatcactaaacttaaatttatattatcactttctttatgtttctattacttaaaagacttctctaaactcacttctcaccaggctagtcactactttcagccaccatgctagtcgacaaccttgttcttttcgttctttatatatatgacaattcttctagttaatcatattttgacacatcattaagtaaatgttgcttaatctttgtgcaacacaggagattattatggttttgcgttttgttttttctttttaaattgaaaaaagtaatcgtatgtgagggaaaagccaaacattgtcgtagtgttttctaatttctcctattgccattgaagcttttagtattagttttttgaaacaggaacctagtccattttgaatggtaattatattatttggataattttcattgtaaatttgttgtatttatgttgtttcaaaccaaactaatatgtttcaagtgaattggtttgatttgagcattttcttcgtctaatttggttttaaacttttaaaaaaccatatattttggtttggttccaaaaagtgacaatacacaccaaatcaattgagaaacacccttaaattgtatttctctgtatttggatcaccacttcaatttggtatcttttattgtacaatatttttgtaatatatattttcatgtgatgtacaaaggcatcattttattttaactacctaaaattattcaaacaacttcaatgttcatggtcaactcattaatattctaataatatgtattagttgtattgaatt

SEQ ID NO: 395207 - DNA, 806 bp, Cannabis indica
gtgcataaatcgatcaaatctaacgagaaccgatcgatccaattttaacaaactgctaaatattggatatttaattatgatcgaattagattggatattatttttaaatatctaattggataggattgagtgttgtaacttgtatagggtgtccaaaaatctaatatatctaatatttaattaaattaattaacattttaatttagtttaaataagtaattaaaattttaaattcaattaaaatttaattatttaatatttttaaaattgatatttatattgatatgcttaactctattgttagtattttactggaaagaaaaagctaaaaaaaaaaggtaaaattgtcttagttctccaaatttgatttgaatgaaatgatggtacgtagaagtggagagtgtagcccaattgggcaaattttgcctgacttctccgatgagaaatgccgaaatttaaattatacaaatattgatctaacataatttaatataataaattttataaaatattttttgaacgtcaatatatagcaatgctattaaatagtaatactattttccaaaaaaaacactcacatcaacttaattatttaatctattattcaaaatattttacaaaaaattaactttttttttatttgttttacacatttatattacattatacctcacattcttacatatcttctatataccatttaaaaatttaatataatttattctttataaaaagtaaataattagttataataatatcagatatatattaatataatttttttttaaaaaaaatgatataatata

SEQ ID NO: 395208 - DNA, 1171 bp, Cannabis indica
agaaagaaaagttgcaaattgcaacacaatgcattataataatgagtattgtattaggcaacagtagttagagatagctaattactgaattagagatagtagttaactaggttactaataggtaaacttctttttctaaaactaaattaattataattaactatatacgtaaaataaaggagttttttcatttttacacttcaaaacattttttttttgtatttttacggaattctacatagaaactcctattgtaactagcagaacaatctaaattgcaaccaaacattgtataacaaaccacatagaaatcttcgaagaaactactttagaaacccaaaccataaatttaaaaaaaaaaaacgttaaaattaaaaaataataaataggataatttccctaaaacaaattaattaaaatatttattagacattttttaataaattaatatttataaataattttatttttatatttgagttcctattataattattttttaaaaagtcaaactatttgattatagtatttgtaatataatttctttttacaaaaattaaatttttcccatttttaaaataaatttattaaataaataaataattttttatttttttaaaaagacattcaactatttaaaaatacaaacaaatataaatattaaaataataaaaaaattatttgagaaggagttgaaggataaatagaacagagctaatttataattgctttaacctcaatcctctaaatctatacgagttgttttgtatctatctagtaaggcaaaagaaaatgtactttcgctattttaaattattttacaaaaatatttcacttacactttgtaatacctctatgaaatgggtaatccattaaaaaaaaacttttttggctttaatatttagtatcaatgtaaagttttttttttctttctaaatagcccttaaaataattggattggctagtggccctctagccaacaagtagatccctcactgactaactggtatgtggtacaacactattatgaggtaacacttaatgatattttttttataatttttattaaaatgaaataaataaaatttaatattaatttataccactaataatatatatatattttttgatttaaccgtttatatattacaatcatgttttacttgggact

SEQ ID NO: 395209 - DNA, 697 bp, Cannabis indica
tttttttaaaaaaaaatgtcattagcggcgggcagcccgccgctaatgctcgccgctaatactccgccgctaataagtgacagtccgccgctaatgcccgccgctaataataattaaaaaataaaaaaatatttaataactattagcggcggactcgccgccgctaatggtccgccgctaataactctatatataccccatcaaacccctcttcccacatattcccttttctctcttcaaactcaaactctaattcttctttccccaaccgacccttcattctcttctcccaccaccacgacgccccaccacggtgacgcaccactaccacctccgaataccagccatttcgtgtaagtttttttttgttttatatttctgatgttatattagttgaaaaattttagggaagtatattgttttttttgttttaaatttatatatataatgtgcatatatatagatctgtgtatataatttagtttgggtatatatacaaatctgtgtataaatatatatatatatataaattatttaatggcgtacaaatttaattattgtatatatagtatatgattattgatttgtgtatatatgattttttatttgtgcatatatattttatcaatgtatatttttgaagtgtaatatattttttgtgtattatatatatagggtaagattatggtaggactta

SEQ ID NO: 395210 - DNA, 867 bp, Cannabis indica
aaaaaaaattgatcataaatttaatatcatttaattaattcccctgtaatggtgcgatctgatggaggcaattcagggatgcgaatgggagctaatcaaggtgttattcctggagagaatcaggggagtgatatcattgataattatggtaagaatgatgatgtacagctacatttggaaagtcaaaatgatgactcaatgctgattgtagacaataaaagaagacgtatgggaaatgaaattttgaaggattctactgagttggaggatagcaatgtgggcttggtggacaattcggatgctatttcaaaaaatggtttacaggtgggccttggtgttcaggcccacccatcatgagtatcttgtcttggaattgccatgggcttttcaattcattaattagttatccaaaagcagcccaaaatagtgttcctttgtgaaactttgtcaagaactgatacgttagagagagttcgggtagcattgggttttgaaggtgttttttctgttgatgccagggggaaaagtggaggtgtagctatgttgtggagacagagtagtgatgttcaactgctgggttatggagtgaaattattgacatttctatcgctggggagaatggtaatcaatggcggcttactggcatttacggtgagccaaaccgtaatctccgacggaatacctgagaccagattcgtgcgcttaagaccagaagttctctgccctggtgtgttgtggtgacctcaataacgtcgcgtctcaatccgataaacaaggaggtaatccttatcccaattgacttattgatggtttttgtacaatgttagatgagtgtggtttgtgtgatatggagttgtgtggttatcc

SEQ ID NO: 395211 - DNA, 1456 bp, Cannabis indica
ggaggtgattactctattttttaattgaagacctagtttaatctaattgataatatatatatatatatatatacaattattagactagtgtggatgtataataaaaaatgctaaaagatattaatattttacacttcttaaaatattatatcactattaattaaattaaatattaaattttatataatttaacttaataattattataaaatatactaccttattatggtgcgggctattgttttttgtttttaaaaagtggtaactattgtttagaaggatattttgatttaatgaaagtttcatctttattaaaaaaaaataataattgcatttatttttatgcactgtatttgcattaatgatggtcaatctccacgtatctccgtcaccaaccgtcattacctaattaattttcactattccatattttgtataatcgcacgtataagtaattactttatgaaataatccatatttatatcctttcaaaaaataaaaaagataaaataataatctatatatgaaaataaaaccatttattaaaagaataatgaaacataaaaaaagatgaagagcccagatggttatttttgtaattttaaagaatttggaggtcgttttgtaataacgcttgatcttttctttcctatattaattattaacttttatttattttaattacattaatttgggatgtccaaaaaaaaataaaagttaaaaaattaataagagaggctacccactccacccaatccatttttgatttttgtatcagctctgctctgctcttctcttctcttctctttcatcatcttcaacctattcactgtcactgggtttgtttgacactctctctttctctagtttttttttctttttttttttgagttattgaagtgaccgtacggaactttcctagctccttgttattgaatcggtcacaagaagcagcttctccaaactcgctcttaccatttatcttttgagtttttcgaatcggattagaccaaggcgtttctctgttttttattttattattatcttcctgtgggtttttgttaaacattgtgtagaaattatagttctacaaaatgcgggaaaacaagagagttttctgggtcttgaaaccgatcggaaaatcgccggcggcttaatggaatcgatgctgttagttaaggattcttcaacatttcatggaggcaatggttcggtgcagtccctgtaccgtacttcgatttggtgccagttctcgatttaccgtggttattctcgaggtcagcttccttttatagtttcgtttgctccgctgataattttgtcttgggtaaagtggtttcgctctttgagaggagatttggggttctagctgtatggggttttgtgaggtagaggctgaggatttggtactgacacttaaaaaacgtttcaatggttatgagacccatttgtaaca

SEQ ID NO: 395212 - DNA, 555 bp, Cannabis indica
agcaagggagctcggtagctacggcttgcttgatcgaggtacaacagtcgtcgcctggcttggtggagttcaggtagttggcacagggcaccagcttgctggcgcaagaaggcatctgagcgtcggccatactgagcgtgatcagtagaagaaggagaatagccattatcgtcttgttgaagctctccattttcagttgttttgtggaaagacctgatctgacctttgcttttcttgctttcccttaatttattgctttgattttggggaaacaactgcttggcggttctatattacttttccctatttatagctacaaagctgttttatttatcatatttaatttatttatttatttgtgtaaggtttatcatttaattataaaaaacaagactttctttaaatataactgcctcctttcaaaaaaaaatataaaaattgttataaaataatataaataatataaagtagatgagaagaaagaagaaaaagatgaagagagaaagagaaagtgaatgagaatttctgagttgtttattccaatggggtgaaccc

SEQ ID NO: 395213 - DNA, 764 bp, Cannabis indica
cattgagatggattgatggattaatgagaactctatttaggattgaaccatatgaaataatattggatggttcttactaaaataggtacactgatagtgatacaacccttaattgttttggtatttataaaaatttttagttcaaattttttcataatcatgtacgttatagttatttgagatattttgtaaaattttgaaaaattcgaaataatttacaatataaaaatcaatgttcaaaccgtctatttcagactcgtataaaataataaaagtcacacgtctaataaattctttgaaccctacttttgacgtcttaaattttttaaatttttgaaaattttaccaaatatcttaaataagtacaatgtatatgactataaaaatttagactaaaattttttttagatactaaaatagaaaaagatgtatgtacactcatgtataatgtagaattttccaataatacttttcatgtaattgtgagaaaaatattgatttaaaaaacatataaaaataactgaactatagatcataaaaaatatatctactccatattatataaaatatttttcatgtaactaaactaaactgttatctttatcttttactaagtcatagtttgttatataaaaaatgttttgttatgagttattagtattgtcatgaggtggtgttataagaatggttagaaatatttcataataaattattgtatttaatcatgtgggatgttttaattatactattcgtgatatgatata

SEQ ID NO: 395214 - DNA, 1009 bp, Cannabis indica
agagagagagagagaattgaattttccctcatttttggttttttctctttgattccttattttccttcaataactaaaacacatgctgaataaataattaaaaaccagctgccagcttctaaaatagccacctagtctccttgacaaaatgaccaagatgccctcatagcttaaacttaggctaacttaaacttaggggtaaaatggtcaaaaaccataaacccgcttaaacttggtattctattttcttcaatatatattccactaagaaataagtttctagacatactcgtgtgattaaaatattcatccatcgcattttctgttgtcgacgaacaaaaattataaaaataacataattcacatataattcaaataataatcctagagcttaataaaaactccggaattgaaagattataactctaatgcccacttttgataatgggacccacattaaataaattcacaaataactttaaaaaaatcaataattaatgctaatttcctttactaatccatattatgaaatgcagtcattacaataaattagaagttgtgcttcaaaaaaccattgggcaactcgagaccattgccaaagaatggaatgatgctcaaaaggagaacactcgtctgaacaaggaggtcgaggaggcgaagagggctcacaagactgaactcaaggtggcccaaaaggaaacaaaggacaagtccgagtcatgccagaaactccaagaagaacttaacgcagccactgtgaagctcaatggtgctgaggctgatgccaaagaacggtgcaatggtgttgccaaacgttccatttaccgagcttggatggcgaatccttaaatggatttaagtttcttgggagagggtatggacaaagtgttactctactgcatgaactgttggaaatattttaccaggatcttagctttactaacaagtatgttctttaacatcctaaatattaacttctaaaacgattataaataaacacatataaagt

SEQ ID NO: 395215 - DNA, 1029 bp, Cannabis indica
ggaagactcgaaacttccgatttttgagtgagtcaatttgctgaaaattgaagttgtgaatttaattgatctaacttcatggatcattgcacttgtgaaaaacttgacagatgatcaaaacatcatcagattcagataagcagaacccaacaaaccaggccatttgttgacttgggtgttggggcctttaaaccgagcatttataattatatttttgatacttccaaggcttctgaacttgaggacggagtctctccccccattttttactatggtggattcaatgtcacgtcaaatttggcatttgagtaattgaaggcagtctctcaagttgattgtcaacttgggcgctaggcccaacactaggtcaacctgggcgttgggccctgtttccaaggactcatgtttgtggttttccccctgattttacttaaatattcattattttttatggcagtgaagatgcctaaagcatttttcactgcactgaattggaaacatcacagtcctaagtgtcaaccaaggcgttctcgcttctgcccctttagaagttccgtttggtccccaaaaatagttgattcacaatattttctgaagacgtagatgatgcttaaattttttttggggaaactccgttttttttgtggcccatgttggcaaattgtcaacttgggtgcagggccaaccccaggtgtcaacttgggcaccgggccctattttttatgcctaggaactattgtttttaatttgaaaggacctacttcctatttttgatgaatacagattcatttcaaaagttagatctttaatcagacacttggaaggcacccaaattgacatattgtcgacctgggcgctaggtggtcaaggccccgaggcctcgggtgcttaaaaactaacttacttcaaatctaatttagatgccttaaacatgtccgtgggatgtctagttgaagtgccaatgcaagttttggccactttgcactaagacagccttaaaaactaaaaccccagttgagaatgtcaacc

SEQ ID NO: 395216 - DNA, 1460 bp, Cannabis indica
aaatatttatcttttaataaaaaaatatttaatttgtttatttttataaaactgtttaattaattactacgaaattgtttattttgagttttaataaacatattttattatttaatgattaaaatgtatggtttcatgtaataagttttcaaaatgtacgagtttttaaaatattttttttttgtacattttttgtaattatattatttttgttgtatatttatgaaaaaagccctttgtattaagggtgttgtttataaacaacattttattggacaacagtgttatgcatttttagatatgtcggctttacgattagttagcaataactttctaaaaagttaattatattaaaattatataagactcgatacttatttaaaccaataacaaaattgacacatagaagggtgttaaaacactattgcctttttaaacatttctctgtttataaaaatatgtaattcatggttttaaatttcaattaattcacactaaaccatttgagatcaaattaaatgaatctagtgttaataatttagttaatttggattgtttataattctcaagttcggtcacatttttaaaatttatgcccgtaattcaaactaaaccaaattgtttaatgtttttaatatatatttaatataattttttgttaaatattaatatttaaaaacaatcttagacataatattaaccgttacttcaatattattatatctattttcattattatttgcatattataagctttatagtaaaagaatttagtaaaaaaaattaaaacatgtatgaattacaaatttacaaaccacgtcaaaccaaatcaactatattttaagtggattggtttgagtatttaattggtctgattcgattttaaatttaaaaaaaccaatattactaatttaatttgaaaaaaaaaatgaaaatctaaatccctagaacactaaatgctagcttcttctaaaagactttttaatttttatccaaatacatttggaacttagaaagattttttaattctaaaagctaaacaaaacttatataaactaagagcactcacaacaacttttttactctaatttttaaaatacaataccaaactctactttttttattttacaatacacacttacattagaccatacattaactttttaaaaatacatcatcaaaactcttttttttaaaaaaattattatattttaaatatataatattaatgtatacacatattcccgtacaaaaataattattaaaactcaaaataattaataaatatgtttaaaacaataataatattttataaatatagagcatgaataatattttaaaaaaactttaaaatgaagaataaatttaaaatatctgttgtaaaacttctctattataaaaaggaataattacataagacaccattttttttataaaatatttacatttttacgtttaaa

SEQ ID NO: 395217 - DNA, 1297 bp, Cannabis indica
taataaatagaagaaaggaatatcactattttttttaagaaatgccactattttgtaatgacttttatttatttttattttattttttaaaattaaatatatataatgacaattttgtcttttaaaatatgtcttatatcagcaagtgcaactcttgatcattggagaaaatttcaggataaaactattctatcatctttgtctcttgaaaacattgatgataaaatagagttttagataaaatcggacagtaataacattaagattgatactgccttatttgataagaaaacttctgatggatttgagattgtagctcgaaatagttctgatagacttctgaacatcagggtcgagtatcatggaagtctttatctagcgagagttattgaagccatgcatgggtataaaaggtcttagttgggccaatcacaagaagtgaaaaaatgtagagattgaaactgatagcatgttcatttgctcaccgttcaagcaattcgtagtgatcaacaaatgttctttgtttttggtttgattattaacgattgtaaagcgttacttttttatttacagaatattcaaatatgttttattagacgaccagcaaaccaagtatattatgtagctagacattctcggtatcattctggtcatagcattcttgagcataatgttccatctaatattcagactcttttgtattcaagatgctaaatttcaatgaagttgctattttattttcaaaaaaaaaaatcaaaaggctaatttagtcaatttaaggaatcctattacgttttctaataaagtaaacaagataaaatcgttatcattttaattccaaataattttagtaagggttattggcggccaaacccttttatattttgattttatacttaacctctttatatttttggtgacaaaacccttttatgtttatttttctttacaaatttgaggagctagttagatgtcactgttatataccaactggattatcaatgtattggcttcgaggtttattaatgtcacgtatacacaagtatacacagtggtcatttaggtagtacttaacggtgatatttatctaacactttaaatttgtaaagaaaagtaaacttaaaagagttttgttacaaaaagaaaaataaaggattaagtgtataaaaattaaaacataattttcatcactaattactcttttagtagataacatattataaatattgattccgattattcttttattgtgttacattttttctttaacttaattctaaatagtatataaaaaaaa

SEQ ID NO: 395218 - DNA, 1206 bp, Cannabis indica
  modified_base (1181)..(1181): a, c, t, g, unknown or other
cggttaggtctgactgcctggcattagtaataaaaatcaagcacaagtggaaagatagatctccgctttctgacttagttaacagagtattattatctttatcttcttttactagtgtccaagtttatcatattcctagaggcagcaataccattgctcatgcattaactaaaaaagcattaggaatggataaagatttggtttggaacaacattggttcctccgattgtattttttgatcttgtaactgaacatttgggtgctatttattgttgaagttcagttcttaaaaaaaaaaaaaaaaaaaaaaaaaaaaaacttttaaaaaaactcttaagagttccaagttcaatcttcatacctacttaaatatttcgaaaaaaaatattaattccttcctctttcgaaaaattagaatttctacccttacattaaacactattttgttatattttttaaggacttttttattttaacactttaacataattttttttttttttttgcatcttacgtaatttcatatagaaatctctataataattaacagagcaacttaaataacaactaaaatccgtatagcaattcacttaaaaaaaatatcggagtaacctaaattgtaaatttattttaaaaaaaattaaaaaataattatatggagtacttattattattattattattattattattattattattattatgttatacgtgggtccgcgtaaattttagaaaagtatcctgtgtagcgaaacgaacagtcgacatcaatatttcagtagcagaagcgagaactattatcttctatctaatcgccgtccagaatcgcggtgtctcccatttccgtgcccgaaatcccagaaatatttaagctttttcatcccgaaacgtatctacaaaagagaaaatggcgtttagaggaagagaaatgataaaaaacataatgaaaaaagtgggagagaagaacttagctccgggagtgaaggactctctgagaaaatatgtgcccgactctaaaatcgtaatgggtcgggccaaaaggggcatcttcgccggtcgccacattcgcttcggcaatagcgtcagtgaagatggaggaaacaagtttgttctctttatttcatttcggtttctaggttttttattcaaattcataatttcttttttttttttttttntttttgagtgctatttgctatttgc

SEQ ID NO: 395219 - DNA, 1165 bp, Cannabis indica
aaaagtaaaaacaattttatagagcatgtttttaaaaaatatttcacttttctaattttaaaaacagaaaactgattataaaagtgttaccaaactccacctaaataaatcaaaaaccggttacttaaattaactaaatcaaaaatcaattctcgaaataactaaattaaaaacatgttctttgaataattaaataaaaaaaaaatcagtttctgaaataaataatttaagaacagttttatgaatgactaaatcaaaaaccaaccgagacataaattaaaataaaaccggttccataacaaaataaaaaaaaaaaaaaaaaaaagggcaatcagtttcaaaaacaccaagacataaaataaaatagaacttgattaacaaaaaaaaaaatagagaagaaacaaataacacacaataacaaccggttataattaaaaaaaaacaagagggaaccagttccaaaaacactaaaagacataaattaagaccgattctacaacaagatgagtcaaaccatacaacacataataactcaaaaatcgattataattataagaataattagtatttttgtcccctgaactttcggcactacttgatttcgtcccttaaaatatacggtttgttaaaaatttccttaaaatataacagttatataattatgcctcttatgttaggttccgtttcttttatcgtcaaaaaatagtatttttttcctcttgaactttgaccaatataaaattttgctccttttattaaaaaaaattaactttaaaaattataatatcctattaatttgaaaaaaaaaaaaaaaaaaaataataaaaagtatttaaaaatctgataaaaatattaaatttattacaaaatattatttttcttaaaaaaaacttaaattattcctaagaagatatttctaaattttattttatttataaacaagtgtctaaaaattaaactaaaattattaagaatctaataaataatttaaataaactaagattttttttaagaaaaaatcaaacttatttatatttataaactcatatcttaacaaataaaaaaataattaaaaattcaataaaaatataaattatttgaaaaaatatttagaaattaaactaaaaaaatgttattttacttaaatctacatttttttgagaaa

SEQ ID NO: 395220 - DNA, 734 bp, Cannabis indica
gggatacttgtcgatgaacttattaagtactcaaactgagttccaattcttcatgcaataaacttatgcctggcctttatggcttttactcctttggtagacacatcagaccaacattcacacaaatcaatcacctcaaatagattccagatcaatctaaacccgaccttgaattctctttttattgagttctgaataaaagtgttacaataatgcattacttacaaaagagtgtgagctatttatagacataatctatttagaaaccaacataattgcctaagttcctaactaatataattgcctactagttctaactggagagtgactagacttaactaatacttgtgtacagtacaaacatatacataacaagtttctacagacaatacttgcagagaagctcttgttggtccaaatcatgtttgtcacctttaatttaggaaagcagtaaagaggtcgtgcctgttatgacacagatgctttgcggtcacaccaagaattattttaaacaatctataatgtaaaattagtaatctactggtctaattagctttagaggtgatgagctttacatacttcttctccataatatatattatgtttttgcctactttgaaagtccaatggtcaaattaggagagaaaatatttgtgaatttatgtgttcacacaatcataaattgtaccaatacttagttatatttttaagtttttttttttatgaagtatatt

SEQ ID NO: 395221 - DNA, 1586 bp, Cannabis indica
ctcttcaaccgaaaattagtagatatacatacctgaagaccatcagtagttttaccccaataaacacttccaaagccaccttctccaagcttattatcatcactaaaaccattagtagcaatatgcaattctttgtatgtgaaaatcctccatgtattgctacctcctcccattgtttgtgacctaattaattgaattaattcataatcaaaacccaattaaaacttaaaaattattaattaatatctaataattaatcatacccttcttctactttctcagagccacagcaactgaaaatagatcccatgctcaatcaatgagtccaaaactaagaaagaagttatctattttagatttggagagctttaataataatctcttaattaatttgctggattagtattagtacttataatacatggtggcattttggtcatttcccatctcaataatgttagccgactttggccggatgattccatatatataaagtgtaacataattgaacgggtataaccaagtgttatataataatattaatatttattataaaattaattatttagttttgttcaaaataataataataataattaatagtactaataacaatacaaaggtgacatttgtagttaaatggaacatgtatagtttaatgtagttgtattttgttatgtataataatatatatcattatctaaactcatgacttatgattatctaggatatatataagattgaattaattaccacttagtaactaattaatttatgggatgctccgtccacataataatacacatctttaagaataatagttttgccattttaaaaaaaataaaataaataataataataaaaaataataactttgtatttgtcctctttcactaattaactatggatcatataattttatagggaaaaaaaattacattattacaggtttagggttttttttttaatatttttacagatttttaatttatttattttataaaaatataaaatgttattttcatgctagggaaaacaatactgtgaaaacaacgttttttttaaaagaaaaaaaaaataagtgaaaaatctataaaataatagaatatataaaaatgtaaaaagaaaaaaattataaaaatataaacaacagtctcattttatatccattgaattcgtttatttaataaatactcatcaaaattggcaaattaaattacttaaataaataagaactagttaaatcaaaataatagatccaaaatgtttaacatttaaaaacattaaaactaaaatgctacgccagccccctaacatccagtctacgcctcgagctcttcacactcactgcttagctttacccttacctgtacacagagtacccatgaactaacgcccaataagaagagctatatagggcataaccctcctaactagatacttgccataagttactcttaatattaatcaacaataatttacattccataaaatatattcacaatgcatgttgttctcacataaatcaaagtcttataccgcatattatactcacatacaataatcaactatacactcatgttgat

SEQ ID NO: 395222 - DNA, 654 bp, Cannabis indica
aacctgctattacaggttaaagaaaaatgtaaccatatggttacaataaaaatgtaaccattgaatagtcacccatatatatataaatatataaatatatatatgtatttttttttttttttgcaaagatctaccaagtttaagaaagagttggtatattcataggaaaaaaaggagttggtataaattacaaggcgatgaagttagatgagggtaaaatttaaccttttctcttttttgtaaaaagtgacaaaataatttaatcataattagtaactttaaactaaattaatatttcttttttatcaaattgaagtttataactattaatttttgtaataattatataatttttttaatctaaaacaaaaattgccatttataatatgcagggctggacctgaaaatatatggacccaagacgaattaaattttgaggccctcaaacatatattaaaaaaaatatcaaaaaaagagtgttatgagatttgaacccataaccttggacattatgtcatatacctcaaccaactaagctataaatatttgttgcccataatacacttaaattttacttaaataaaagcctaataattttttttattttttttttattttgggtccccgaaaagtgtgggccctaggcacgggcct

SEQ ID NO: 395223 - DNA, 1241 bp, Cannabis indica
ggccgttgaagtggtggtgaatgtggaaagagaatgttgcaattttgtagaccgactgtgtgggttcgattgctggggctagagacgagacagtgggagaatggtggtgggtactggaagcgagagagatgagagagagggagagtggtggcaggtaccgaaggtgagaaagatgagagagagggagaatggtggcaggtatcgaaggcgagagagatgagagagagagagggacaatggtgtgggttatatcgctaaggctaggttttgtgggtgtgggttttgcaaggggagaaggcgcggtgagcttctaatattaggtctagggggaaatgaatattatatgagggcaaaataaaatttttgtgggtcttatacccgacagtttaaaatcgttagatataaggccaataaaaaattcgtgcttttaactaaaaaacgtcacctattttattaactagtgttttaaaccatcggaaatactcaatttatcctgacgattttaaacaattacttaattgttttagcgaaaaatccctaaaaaaagtatttttaggaccgttgtgaattctgacttttgtagtaaggcctaataattcgtaaaatacttaattcttactataatagcccttatatataatattgaatgtagtttgcgaaaattatattaacaagatattgtaaaaatttgttaaatgcaaagtaatagtttttgcatatgtcaaacgataaagcagtggaaacttactattagaaaaaagtttaagattttatgaaaccgatatattctaataaaattttaggaaaatgattatctcctacaaaaatacatcaacaaaatttaaatttaaattatttaatatttttttttacattaatttattaaaaatatatatttgatttaaataataattgttttattagattttttttttttcatgttccttactttcaattaaaaaatctttaacgctttttaaatttggaaatcactatatgttgatctaaaaattctagggttgagttgcaaaatggccctaaatttagaaactaagttagtaaatgtccacttttttaaaaaattaaaaaaatggccaaatctaataaattagctaataaaaattacaaaaaatacatttaccacatatttttttaaaaatatatatatataataataaaattaagttatataatttttttagtattgcacattattatattgtaacaaaaataaataaata

SEQ ID NO: 395224 - DNA, 1824 bp, Cannabis indica
actggtgtgtgtaaggcagggcagatggaggcagcagagattttgctaagtgagatgcaaaacaaaggaattgaagcaaaccaagtgatatataacacgttggtaaatggtttttgcagaagaggtctgataaatgaagctttaagagtgaaagatgtcatggaacagaaaggtttgaagatagatatttttacgtacacaagtattgctaatggattacataaactaaaccgaaatgaggaagcaaagaatttattgtttgccatggcagatcaaggtgtgcctcatagtgttgtgagtttcactacattgattgacatatactgcaaggaagggaactttgccgaagcaaggcgcgtatttgaagagatggaaaagaagggagataaaccaaatactgttacttacaatgctctcattgatgggtatagtaaaaagggaaagatggaagaagcttataaggtaaaagatgatatggaagccaatgggatgagcccagattcatatacatacacttcacttattcatggagaatgcattttcggaaacacagacaaggcgctcgaactatttaatgaaatgtctcggacaggtttaactcagaatgttgttacttacacagctataatttcgggtttgtctaaggatgggagaagagatgaagcctttagattgtatgatgagatgaaacaagcagacctcacacctgatgacagggtatatactacgcttgtgagcagtcttcacacagcagagtcatagatttaaaaaagggatcttttactaaagctaccttgggttatcaatctttcaatgataactaagtaaaagacttagtttgtcaatatgaagatgcatatgtttgaggcggtcagttcaccatttgctttgccataaagaatttttgcaacactacaattgagcaaaataagcttaaactgttgaaagacaagaatttccccccatttatgtcattgtgtactcatcacttttaacagccttatgtaaaaacgatgaatttcttagtaataaaatagtaaaaaaaatgttagcttgatatatgaaattgcaaaatatacatcaacaaatggaatattcatcttttaaattacaccgaaagactataaccatatattgacagaattcacagtgtaaaggcagggttcattttggattcccagcttctctgaactctgaaaccacaattcgctgtacatctttggaaactaggctgctgaactccattttccactcaaactagtaaatcagaatatgcatcaagatcatggctgacaaggcattgcttgagcttgtacagtgctctgctctctagttgtcgcaccctctccttggacagaccatacatgttaccgatctctgagagtgattttcgtgtggcaccaccaataccgaatcttagccgaattatctgctgctctctaacattaagacttcttatgagaccatgaaggtgtcgtctcatcatttgcttcgacacactcacatctgggatctcagttcctgagtccgctgtaacttcctgcaattacaatacagaaaaaatattgtttgatggagctcaatgctaagcctttttttctaactgaaaactgtctttaagacttataattcaatttcagctataaatcaggattcatcgtgttacctggaatgtagttttctggtctgcccagacaggttgttgcaatgaaagtggcgttcttgtgatatatagcagtttctgcaacctttctacagtaataccagcgtgtcttgctaaatcttctttggatggactgtgatttcctacctcaatgcatgatc

SEQ ID NO: 395225 - DNA, 868 bp, Cannabis indica
aaaaaaaaaaaaaaaaaaaaaattcacaaatttgatactctatttttttatttttatttttctgactgtgattattaagtgtaatggacaaagtcattccaataataatagcatatgatgagttaggtatggtaattgatccaattaagcatgatttgtcaaaccattacctatcctttttacgtgagacactttaatttgagggctaaactagtgcccggcccaacctagctagtcttatatatattatgttcattaatgggttaaattaaatgtatctaatatgtaactaccttaaactcttgttcatttttctagataaaacacttgacttgtcttttctcattaagtaattatgcgcatctttatctgactttttgaattaaataagtaaaataagaattaaatgatgataaataaatatccatcaagcaaattaattgttctttaaagttgacaaaccaaccgtacaaaatggtgaaattgaaaacattgtaaacacctccaaaaagaaaaaaaaaactatataaacaaataaattcgaaactacaattaaaattaaaaattcactaagaaaagaatttcaatgtctgagcttgaataatgcaaaactgaaaaaaaaaaatagattttaaataattaggagagtcaaactaaacataataaaaaaattagacataataatatgaaaccaacaaaatgataaagtatttacccaattaccaaaccatgataggctaaaccttcttggcttgtaaacagcaagccacataatgcaatggagctgtatgttggaaaaattctcattacaagagagaataggagaattacaatcaaaatactcaaaatacaaataaaagtatttcat

SEQ ID NO: 395226 - DNA, 2378 bp, Cannabis indica
tcacatattaaaaactgggtaaagcatacgttaaaaccctaatccgggaaacccgaacctacaacttaaggttctgttattactaatagggactacaatatcctaagaggcagggaaacacccaactaaggcactgaagtggacatgaatcgagaaaacgagttgtttgaggaatctgccaaaaccggttaaccaattttacaggtcctggcaaactggttaactggtttgcaccaggtttccccgaacaactcaaaacttgtccaaatgccaccaaactttccagaacacctaaaatgagcatacacaatatattccaatcaacagcacccaaaaaaatgcacaaatacaaaatatgtcatggatgaacaaacttgagttttcaagcttgtgcatccatcacccaagcttgagctccgtgtattgggtgtactggggggtatacccctttcgctatcgcttgtcctcaactcgggtacttctctttgaggatctcttactctgagagcactatgaagctttcgccatgctggtggctggtgcggattgagacggagtttggatactcaaccccgagggatttctcatgggcgatccaaagtgtgataacgcggaagctacaacgagactttgattgattcctggggtagtggagaattgtatcccgctcatttgaggagtggccggagatggagctcccagaagttgagctctaggcacataccctgatacccccgtcgggtagtatcctccgtaagccactatttgggcttctttcaagttaatgtatttttggaccctcttctaaaagtcctggagattagctgctccctctttctgcagttcgttctagaaaggggtctccgttcggattccatcctgaagaagggccaactgttgtccgtcatccaccttcttgatctttgaagcctcatctttaaatctttttatgaagttctttagagttttcgagggcagtttttttatgttagtcagggcgctgacctcgaggttgatcttccttgccgtgacaaactgtctctaaaaattgacttgtaacttgttctagtagtccactgatcctagctccaactttttgaaccattcctcagtacagccgcccaacgttagtggaaagcataaacattttgcgtcattgctgaccctcatgacagtcatcaccctgttaaactgggacagatggtcagtagggtctgaatctcccgtgtaagttgccatttcgggcatcttaaaatttttgggaagctctacttccaatatgtgtcgggtgcatggttcccggtccttgcaattagagtcgaaatcatcccctttctgtctctaggagactctagcgatgtctttgcagagtattgctagttcaaccaagattccttcgttcaaggcgcctccgaagactggtaatgcgtgttttttcttttcaagatggtttcttaagtcaccatacttctcgttaattttctgtcttataacagccgggggacacctccgatttttcctccccctttcttcgggttcttggtgcacgaatacgctctttcgatcctcttaatcccaagggccaagactcgctcgagggatcttgcccctctgtggacctttcccttttgggaaattagagcggacctttcagggatcctgtgccttccagtttcttctagggatcaaagtaggatttttctcaaggtattcatcggaaggataccgtatagggcttggttccctggtcttgggcccctgagtgcttggtgaggattcctcttgtgtttcctctagtcctaagggcatggccttgggatgcacatgtattccagctgtttccatagctttttgcatggcgaccattatctcttgcatcctcttattctgttccttttgggcggccagtttagcctcatgattagtcgctttttgccttaagaccagcacttcggtgtaactaccttcgttgtaaacgtcgtaccctttgaggttctcttcatattcctcgttgttcgtctcatctcgctcctcagagcccacatttactcatgaagccgcctcttcgccttctgggttttgaggatcctaggggggatgaggttggcgtgtgttgtttcgagtttccaccatcgttgttctgattctttgactgttgtttcctcaacaacgctttcgaaagctctcaatgaaagcaccaaaatattgaccgagatttttggtaacaactaaattagataatgaggaaagctttgggataattaatgcaggtgatttttacgtggttcaggtattaatgagtcgtagtccacgagtctgtgttattatgagagttcttatacagagaatgttcttggtgtggtgttctctctctctct

SEQ ID NO: 395227 - DNA, 699 bp, Cannabis indica
ttagtctaattgaaccagtaaggatactaatggtgctatatattgtcggtgctccgttaatgctctatgtgaaatttctctctgcaatgttacgtacaaggtcatttctaagatcattgctaataggattaaaccggttcttcctcgtctgatttgcccaactcaagaggcgtttgtacctagaagaaacatccaagataacaatgtgattttacaggaaataatccactctttcaagaggaagaaagggaaagaaggtttatttgccatcaagattgatctcgttaaggcctatgacaaattgagctggtgcttcattgacaatgtgttggaaaggtttgaggcctcgacgacttttcgtaactagatcaatcaatgtatcttgacatcctcccttaatgtgtgtctcaatggagggcatgtggggaaaatcctcccttcctgtggtatctgtcaaggtgaccacctctcgccttaccttttcatttgggctgctgaaattctttcacgactcttagaaagctctgttgataaaggtgatatcaaaggtattaagttgagtagaggaggccctaccatctctcatgtcctctttgcagacgatattatcttggtagggcgtgcaaatatggaagaggccaaagggttgtggcattgtgtggagaaattttgttcttggtcaggacaacatgtcaataa

SEQ ID NO: 395228 - DNA, 1005 bp, Cannabis indica
gagtggctccaggcgaactgatcatcgtttgctctcaaaaaacttattagttgctatttttgtttttcatccaagtttttcccaatgaatacatacttagtgggattttttggatctaaaataacctttttgagttcctcaatcggtttcaataaattccgttcatcttgaatctgaggatcaagatcgtcatccttcttcttgccttctttagttataattgccattacctggtgaccagcctttctattccgcaactctatgcggtagcattcgcgagccagcatttggtcacctcgcactattcccacacatgtcggtgtttgaaacttcagggataagtgcttaatgaaactaattgcccctagtccaattaacgttggtcggcccatcagtatgttgtaggctgatggcacgtcgacaacaagaaagtgttgcataatagtgttggataagggtccctcgctcacggttaatgagagctcaattattccttggctggcgatgctgtcgcccgtaaatctgcatagatttaccatccaaggttttaatttggcttttttccagccccattttctttagtgtatccttataaaggatattcactaaacttctgttgtccaccagtaccctttttatccttttcttggtgagctggatggtaatcactagcgggtcgacatgagggtattcacatatttttttcatcctcctccgagaacacaattagaggttcctcagtcttagccttcttagaagatttcggagcaaataacgactgctcattcttaacttcctctccctatctcttttgagcattgttactttcctcggcgagatgtggccctcccaagataaccagaatgtcctctccttcaggaggaggaggttgttgttgtaaattattttaccaggatcttagctctactcacaagtatgttgattaacaccctaaatatgaacttctaaaacgattatgaaaaaaacacatataaagtattagaa

SEQ ID NO: 395229 - DNA, 596 bp, Cannabis indica
tggggtaattctccttttttatatatgtgcaattacttaatttaaattttatttttaacatcataaattattaataatttttttaaaaaggagtgaaatgtcatgtaaacctataattgagtgatgtccctataattgctttgctctcaaatgtttaattattaaatgggccaaatgataggttcactctctcaactagttttttttttccttgaaaaggaattccaggctagttatcccttctgtaatgatagtttcgaatagtcaactccatagtcttatattttattttcggaagtgtcttcagcaagggtctgtggtcctcaagtctggaagatgattcatgatctcggaggccctggtgcttacgctgacgtggaaacttcaccaaataaggagttggctaagttagttatatctaattaacttaacaacctcgtttcttacagccacacactttaggatcttgatcctaagcttataaatactaccttgactcaacatttgaagacatgattgaaaaaatgagctggagaactctattcagacgaggttgagagtttgagagagagaaagattgagaggtagagaaagag

SEQ ID NO: 395230 - DNA, 1186 bp, Cannabis indica
agttaatcgtaaatattatttaattttttgggtttaattattgggtttattttttgaaatttgaatttagccgtgtaaaaaaatttcaaaaatggtaggatttgttagagagatatgtgggtaagatattttttttaatttaaaaaaagattgtttaattttttgggtttaattattgggtttatttatttgttaacgttaacagtctgttaagttaatcgtgtaaggctaaataaaaaaagaatcgttaaaccaagaatcgttaaaccaagaattgacgttagataggcacttttaatatataaagatacatatgagaaatatttgggatactaggaggatgcgacatcaataggcttcaccaatataactagatattttctaaaatctattagtctaaaaagattttttattatttttatactttaaaactagtttttttttttttttttttttttatgatattccacatagaaacttccataataacttacaaagcaaccaaaatccccacatagaaatcactagagtaactgaaaccataaatttgaaaaaaaaaaataaaaatggtatctaaaataattttcctagtctaaatttgtattttattattaacgtggatccttaaccacgattgtggccacctaacgttgtggcgcaccatgcaattggaggctaaatgcttaattatgtcgcataaaatttattctagacctctattagtatgtaacatctcaagcttgagaaactcacttttgttcccgtgatctttagtcttacaccaattatcaataacaacactaattggagtaggtcataaccactataaattttttgttgttggttttttacttttagctctttgatttgctactatcataactcagtgacgttggcatagtcaagtgaacgatatgccataaaatttatatatatatttatatataccaacaacttataattctttttagggaaaaaaatacaaaataaaaaaaaaacataactttataatataactaatttgaatatactaggatatttagcttataattaagcttcaatttagaaagataaaaaaagttattaagtttatgatgatgatgatgatgatgataatgatgatcagtgacagagggaggaaattgtaaaaaaaaaatatttgagagcaaataaaaaaagataatac

SEQ ID NO: 395231 - DNA, 1382 bp, Cannabis indica
taacaaaaaatcaacaacaaattaacaagattacaacatatataaaagaccgtatttttagtaaataaaataaaaaaatcgtaaaaatatttaaaattccgcgaaactgtatttttgtaatttttttgttatttttatatttttgtgaaataatcccttttataaatatgcctagcatcataattgtaataaaagtaaaattttaaaaatgtgtgatcaaaataagtattgggccgaaatacaaaatttgaaaatataacatatatattttgggacgatcaatggagttttaagggtttttttaactatgtattaaaaaaaaaattccaacttagaaatgtaataccttttattgtattatattattattagtacaattaaatatcgaatcttatgtaatttaatatattaatttttatgaaatattattatttaatctcaaagtattatctttgatgatgctagacactatttatactttatagcaatgtactttcaacttggacaaatatttacaaattaattataagttgcaatggcgtgttcgaatatccataccaaatttaatttaatgggaattaaagaaagacatatacgattcttacaaaacccaatgatggtacacatatatgagatgtttaatttgagtattattaaagtaattaagtgcatgctttcatttaaattaacatatattatagctttaaagttgacccagttaaagtaaaatgcacaccgcgcacctttatagtttttgtttagtgctgcctctatattcttatatgtttattaattattagattccaaaacatataaaaacaataattttcttaaccacaaatatgtatttatacgtgtttattgaatcacattcaatgaatttagacctagtcgaaccattccaattatttattagatattgatatttgattttgtctttcgatccaatccgatctaatcgagtcattctaatccgatctgatctagtaaatgtattaaattggattggtttcaactattagatgcattaactgattttcttttagattagattgaatggatctaatccattttagctaccatttaagttgatttcattgaaaagaaaaatatatataaaaaatataatttaaaatctaataatcaaacatctacaataaatagtgttaattgcggcaaaactcctaatattttactttgtttgcacttaacctccaaaactcaaattttggcggcaaaacctccaaaatcacgataccgttagcagtttaccacttccatccaattttggtcgttaacagccatgctagattatctacgtgtacatagtatacacgtggcacaattttacacataaattttataatttaattatttaaata

SEQ ID NO: 395232 - DNA, 677 bp, Cannabis indica
atggtaaagattgaataaccgactttagtagcacctccttacccgctgtcgaaagtaacttgctatcccaactctaaattcgctttctaactttatccttcaaaaaaccaaaagccacattcgtattcctaccaatcacgcttggcagaccaagataaaagcttttctcatcagcagcacgcatgtgaagagtggaaagaagtctaagacgggtcccatcacccgtgttggagctaaagaaaacagaagacttgcttagattaatcttttgacccgaagcctattcaaacttgttaagtagctccaagacacgttgagccgcctccaaagtagcagaacaatagagaaaactatcaaccgcaaataacataggattcacataaggagctcgccgagccacccaacacccatggattcattttctttgttcataaagtcggataagagccaaaaatccttcagcataaatgataaagagataaggggaaattggatcccctgtaggattcctctcgtaggaataatcagcccaagaacctcccctccatgtataatattgtaagaaatagtccgtagactttccattatcatcataacccaatcaagagaaaaacccattcgaagcataattgattgtagaaaaggccactccattctgtcatacgccttactcatat

SEQ ID NO: 395233 - DNA, 1430 bp, Cannabis indica
gtcaataataataataataatttctgggtgcacatctaatatcactcctcaaatcaactaaaaatcttcacgttatattattttattttatttttatttttctttctatattatttttttacaacattacttctaaaagcactcaaataattagcactctctaaattgaagaaattacactaaatacctcttttaactaaatgtctttaatttttaccctctcttttaaaatctattatgtttacttcttttttcaattattctaccaatttagccctatcattttactataattttcattcttctttaattaaaattttgtcccaacttttccaaaacctatatacatccatctacaaagaatataaatctattatgcttgaaattatgctttagtcatatgagtgtgtgaagataatttgggtataatactcataaaagagttatttataaattaaatttaatttgaaggtaaatttaattaatgtataaaagaaaaagtatttttcaacttctcccctctaaatttgtctccatattattagggtccgtcttcaaatttagtgaaccatagaaaacaaaatatttttgggctcatatttaaaaaaaaaaaaaagtatttttcaaaattagtaaaaaaaatatatgtattattaaaaaggtaaaaaaaattagagtccctgggctaggtgagccctaagcacaaacctagtccatctatgtttagggcgagcctgcattttgtcatacacattattatttaatatattattaatttgttttaactttaatttaaaaaaaatagggaaaacataattataacatcaatgtcaaattttagcatcaatattattattttttaggtttgcatccaaatatctccaatagttagcttcttataagcattcttctttatcaccaagtattcttttcaagcatcaccattaaagatgctttattatgcaccaatacaacttggtatttttatatctaaatattttaattttaaattggtttaacacagtatcagatattactttttattaaggattttaattccgacgctcccattactttttataaaattacgtagttaattacattacttcatggacacacgtacatacgtacgacgggtattatacgtaaaaagcatgcatatacagtacttgcatttcccttacattgatttcaaattataataattaaccccgcttcattaaaaacatacgcacacccatacacacaataacagcataaaagaacaccaccaccccaataaactaattagactatataaaaataattaatacaaacgacctcactcactaaaaattgaagctcatcatcacactagtgcaatctatcattaataaaaattggtattgctcaattcccacccccagtacttgaattcacataacatgaaa

SEQ ID NO: 395234 - DNA, 538 bp, Cannabis indica
tgtttttcaattcactacaaaaatataaaagaagataataaaattatatagataacaaaattgttatataaaataaaatgataatagagcaaaataatcatattaacttgaggaagttttagtatagataaataatgatagaaaaataaaaagaagggaattagtatttaacaacaaaacgttgatagatagaaatgataagatatgtaccttaatcacaatggatgaatacacgtgatggcacgtggttgactttgtggaaatcgtctcctccttcttccatcctttctttgaatttcttaggcatataagatatgactatctcattgagtgtaacaatgtttcttactccatctggaactctcctcaattccctgcaatcgcaaatacgcaaatagacaagtgtaggcaatgcactctcctccactttccactctttcaagttttccagtttactgagttgaagagattcaagtcgagggaaacctcctcttgagcacaccatctcatcccccataaagctatcatagtcaattct

SEQ ID NO: 395235 - DNA, 839 bp, Cannabis indica
gaaacaaagaatcaagtcaaagctacaagggtaaactaagataaaaatttacaagaatgacgttaaatgcacaatcgatctaaaaaatggctaaattactttccggatcacgtatcatttattatttcgtctcaaattacaaataagcaagttctagaattttttcaaataattttccacatttcatatttagcatacataaactaattcaattgctaaaaatttacttattgtgattctatgttcttttaaagcacaaaattaaattaatcaagaatataatctcaccaaacacatgaatttttcgaaatataaataaaatttcaaatcatgctatacacttactttcacattgactcatatttagaagattgactcataacacacaaacacaaaaaccacagaaaaaagactaaaatgcaaaactaaatttttttaaaagttcactccaaatttaattggcacattgtctctaatgtgacactaaagaatatgaaaaagggaacttatttgagcagcaccacatcagtatggcggtggtggaggtgatggttggtatacataaattatttcaaatgttaattaagtgttgattatggtgtcatgaactgaataaaagaattaatgtaaatcaaaagtgtgattgagctaaaattttaaatttaaatacataaatatcttttttttacaaaaccatgcttaaaagaaaatttgaaaaccaacctactaaaatctatataatctaggagcttacattataaataaatctaattaatatatatatatatatctatatatatttaaaaaaaaaaaaagattgctaccgtcaacctcctatt

SEQ ID NO: 395236 - DNA, 886 bp, Cannabis indica
aaaaaattcaaaaaaaaaaaaatgccataataacatttgttataacattaaaaaaatgtcacgattcacgaagcacaaataatttttgagtctgtctgcatattataacaaaaaataaatgttatgaaataggtaattagttacaatgacaaattaacaactcaaaattattataaaaaggtcaaagacttttaaactagaaattaggtgtgcatattcaagcgggcaccccaagtttgggttttgggtgtaggaaagtgcctaccgaacctgcgcattttttggtactggtatacatgtcaggtttcaatcttgtactagggtctagatgtcacaaggcttaatttctcacactcaaatttttcctgccatggcttagattcatcccaatttagtcagtcaacccaacaacccattagtatgcacatacactacactcacggtttagttttgccatgcaaagtcacgtccatctaagcccatcacgtagccaagctcagctaacaccccccaatgttgctgcgtgcctatgttgctgctgtctgctgcccctggcaggtgcacttcactcgcatgctgctatcccacaagctaagcatcgagtgatgtcaaggtccgtcgagcgaaccctagggtctcacactagactagagtttaatttccttgcacaatattcttctctattgtttacttttcgtgcacagtatgtaattgttatataaaaacactataaataaacgatgagaaatgctaattacaatctcctattacaacctcttagtcaatctctacgtttaaaatcacatgccgaaatatttttttcatagcggtattcgttatagctacagtatcatccctgtaaatttttaaaaaattccaaatagtt

SEQ ID NO: 395237 - DNA, 878 bp, Cannabis indica
ttttaaatatataataatattaataaaaattaataaataaatattatagttaagtaatagaatattaccgttgaaagttaacgtaaagaaactaaaaaaaatattagttaaactaaaaattctatattgaatagacattgcaatgttatataatatgaggtgtacaaaaattaaagcttaaaaggcttttggagttgcgaaggggtcatagtatcatagatcggacactaagaacaaggtaattgctttgttatgtgttatagtattatactattaaaggaatatatttgtttttgtttgttttataatctttttaataatctttcataattgttttcagtgcagggtatatatatatatattattatcttggttgtgttttaatatatttgtttttgcattgaaaatatatatttattgttccatttcttttttatgaaacatggtatatggccactcaggatttaaagtgaaaagagcataattttttttataaggtaagggccgcaaaagtaaaaaaaaatacttctggtgggtgttcatcgagattctcgacaaccaataataagagctgtatgaagtatttaatgaaaattagaagtgaaattttttacgtagttaggatattaatgagccttaatgcacgagtcattgtatttatgagagtatttattacaaaattctttcttggtcgatccccatttctgtttatcattagagtatttataggctcataatgcactactacaatgtagacctttagaggctgttttttcacccctatttataaaaagggaagctaaaaggtgtgaaaatacccgctttgtttgaaattgacatttagaggtagttttttgataaaaaccgtaggtataaaa

SEQ ID NO: 395238 - DNA, 1069 bp, Cannabis indica
cttatgtgttctaagagaagtgacattaatgcttcatcattttgagaagttcttatatattacatgaatagttttattcaaaagcaatgttaattaaataattaacttttaactgaaataattagaaaatgctataggatatgtcagaattggctctgaaatttagtgggtcatagaaaaaaaaaaattgagcccttagaactaaatgtgatatttttcaaaattgtaaaaaaaaatgtataatttaaatggagaaattttatttttggtccctgggctaggtgtgccctagacataggccttgcccgcctatacctagggctggacctggatattctaatgctttccaatagtctaagtaatattaagtatttaggtatctagatctcacttaatgatatggagctcccacaaaattatacatagttttttagactattaactacttaaaactaatgttcccaaaaactaacctacttatattatcaagacaatttagttcgttacttttacaatacatagtattgcgtttttgagatcgatcataatcaggctcggtcctagacacaaacggattaggtccgtgcctaaggcctccacttaatgataccctaatttttttaaaaaaaacataaaagaaaactaattaaattttatatataaaaataaaagaataacaaattttgaattgaatctcattcatggcctagaggtccatgatcattattgtgtcaccttaagttaggttgtcaacgaaatacccactttagtgttttgggagacaaaaagacattttaggtcaagtgggcctagtgtgtttttggtggcccaatatccaaactagcccaaaggctacaaaccaagcccaagttatcaaagcaaatcgcaaaatgggccattgctttcacaaaaacacacgactgaacaacaaaattattgaaatttgacatgtgccatatgagttcatgccattaaatatatatatatatatatatatatatttatatactaggtgaatgtacgtgccgagccacgtattgatagttttatttaagattttagtcttttt

SEQ ID NO: 395239 - DNA, 950 bp, Cannabis indica
tataaattagcaacatatttaaattttaaactacgtattagacaaaagtctttaaatttaacaacatggggtatttttaacgaccttgaaagttcagaggacataatttagtacatgttaaaattcgaagagaaaaattcctaattagtctaatttttatatcaggatcatattatttgttttaaatttaagcctttacaattttatttgtaagtatcttcctaaaaaattattataataaatgtaattacacaatgcaagctaacgatttttggccactaaaaggaattcattaagaacaaattttgctgtactagaaaaaagttaataatttgttttatattaattactgaattagggtagtggaattacaaaaatggattttacttgtacgtcatatgtaaatctacatgtaataactctattagcataattcaaagaaaaatattaaaagactatctgtcaaagaatcttttatgtgttaatattattattagtttaattaagtatctgatttcacagggtcggccctgaactaagacgaaagaggcggttgccttaggtcctacaccgctcagggcccatttcaaaataaaaaaaatttaaaatatagttagtaataaaataaataataatattttaaatgctaaatgtgtgttgtagcctagtggtaatttgattattttaacaattaaaatattgagagtttaaatttcaatagccttactttttcactggccccaatttttatatttacctaaggcccaaatcaatataggactggccctagtatctcatataattcaatataataactatatctaaaaatactacgcactattagcgtctaataacaatgctcgttataaaattttctttcaaaaaacaaaatacaagaaaatggaaatgatgttaatgattgctgttgattaataatattagtgaatttt

SEQ ID NO: 395240 - DNA, 742 bp, Cannabis indica
attaggttattattaaatttcattttgagaaaaaaatcacttaaaatattatttgaaaaatatgaaatccaaattatcatttaacaaatgaaattagtaactttataatattcaatgtataagctagtgaatttttttttcttttaactttactatgacttccatttacacttataatatagttagttacatacacaccatacaaattatatttctttaacttttactttatttattttctaaattgcttcaacttgtcttatttttttttttgccaaaaagctcatcttaattttgtttttatttgaagacatgacttgttgtatcattgtatgtattcctaatgcaaattttagttgtctttctttttctttcttttatatatatatataagagtagtttagaaaattctattaatacatatcaaaagatgttatgcccctttttatttttttatctaccataagtgtttaaattgaagacaagacaaaaggaattgaagttagtctaattctcttttagaaaattataaattattaatttgaatatttaaatattaaagtattagatcatctctaataaaaggggtgaaaaaaaaaagaaataacatgagtaattcttaaattattagttgatatgtaatgttattaagtactatagtgctagcatatatgtatcttttacatattttcttaaattaaactttaataataatgtataatataattaagtttggtacgat

SEQ ID NO: 395241 - DNA, 705 bp, Cannabis indica
tttttaaaaaataaaattagatttcttaacaaataaaatatttattgacaatttccaatgtcactaatatatatatagaaaatagtgacataataaggttttagtcatgacatgatcagaatattttacattaatgtcactatttcataaaaatgtcaccaaaagcatatgtaatatatttgtaaatgtcatttattcaatattttggtgtagtgattgcaaataaataaataaataaataattaacttaattttaaaataaaattaatcttaattaaagttttataaggaaataaagtattaagttattatgaggttataagttatttttatttaatttttaaattaatgacaattattcaatgatgatcaaatgactaaaaataaatgtaaccataaaagttagatatatttaatttaactattgaaaccttatatataattactaaaaccatacgaacacataatattaattttttaaaaaaataccagtttaatacatttgttattgataataaagcaaaaaacattataagaattataaaaaatttggaatttaatgtatagttttataatttatttgttattgaataaaaaacagcagtacgttaagcgggacccaatttatgcataaacgagttgtaagtattttgttttgggaaatttaaaaaactatccataaaacactctaaaattatttcccta

SEQ ID NO: 395242 - DNA, 636 bp, Cannabis indica
tttttttatttattattagtaaagtattcaatgtcatatcaatgtggtacctactaattagttagtaattttttatttttattatttattaattttttaatatttattatgaatgatctttgtagtatttttgaaaatgattttttgtattattattgctatgtggcaccttaaggtgctcaataccataccaatttacatacacaataactaattagcagttttttaaatcatattaaattaaaatttgtgagaactaatactgaaatacatcaacaacgatgttatcttttatgatgcttgacaccttattgtatctttcatattttcgttattaatatgtacatatctttattaacttcgattagaatttaatttttttttattattattatatataaacttgtaagaacaactttaatggggtatgtaaaaaatgtattgtatttggcaaaaaagtgatttgtgatatatttgtgttggaatttattttaccatgatcttagatctactcacaagtatgttgtttatcatcctaaatatgaacttctaaaacgataataaacactataaagtttaggaaaccttaaattggttgcaacggaataatatgtctcctttcactcagatctctaa

SEQ ID NO: 395243 - DNA, 1015 bp, Cannabis indica
atatataaatatataaattacttgattaattagttgcagagatacctatttattaagatccatcatgtatataaataagttaaaaatataaaattagagattattgtcgaaaatatcattgtaattatcatttataaattatatcacacaacgcaaaacaaaccatcaattgttgatcaaagtcaatataattaattgataatttgcatatataaagtgaaaaaaatactatatatttatatataaagtgcatgcatgcatgcatacagtatagtactatactatgtactaactagctaattaatatttgcatagactttggtgcctatatatataaagacactagtatatattagatttcatacttaattaaaaaaatattttctaactaaccttaataatataacacgtaaacattacctaattaaatctaaaaatatattgataactctatgttagaattaaacaacattaaaaaaaattaggtagtatttgatttacatcaatgagtgtaggaatagaattattattcttaaagaaagattatttaaggtttagtttgattattgtgattgaaaaactcatttcaataaaaattgtaattcatataaattagaaaattacttttttaaataaaatgacttgaaaaactcatttcataccagctaaaaattatatatattttgccctaatctacccttcttttatacaaattattaaaattataattatatagatatttttttttattttaaaacatatatataacatttaatattacaataatatatttaatatatttaatatatttctttttttacaaaattatagaaaagcaacactattattataattatatatagataaatgatgtgtgatgagtaaattatataaataatatttatgttttaaatatttaatataaaaataaataattaaagtaaatatttatatataattttattatttgatcattaaatctaaaaaaatataatttgagagtgatacataaata

SEQ ID NO: 395244 - DNA, 1732 bp, Cannabis indica
aggtttatatttttttttgttttgattttgacatgagttagaatagttttaatactttacaataatgcttgataggttcttgatgcatgctgcatagaggcttgattaaagtttgataggggtagagtagtgaatacacgtctaaatgttcttgatggagctcgatataggttcgatgggttcatggttttgctcgatgtgagttcgatacgtacttgtttaccaagatttttgaaaactaattaaaacgagagctaagaaatcaaatagactaataaagatggagatggaaatttttatgtggatctgatgttaattaaccttagtccacaagtcccttatatttggctgaatggccttgatgtattataatgggattttgcaagctcaagaaccctagcttcttgctatattgtttcctcactttctgattttttaactcctcaaattccaaacttttgcatgaaggtataaagtagtatatataggctaggagtcgagtaggcatactcgtgacccgctaggatttttatgcaaactaggtccactattgggataaatacatggaatatgtgattgtaggcccactagtagaagtctagctcgtggggcggaggtgtttcgtacgcctgggtgcgatttttggcaggtgtttgacgcacgacgcatgtatgtactgcaatatcagatttgtgccgttggacaaaagggaaatttacttttggtggtgcgcacattcttatgctctgacacaagttaaagggcagctacatcatcctatattaggcttcagaggtgcctcttggagtactctttccgaacgtgtcccatcgctcgtctagaaggctttgactgtttcgtcccaaaatgaaggttggaggctttcttggacccaaataagcatcatctcgaaggcgaatcctcagggctttggatgggcttgagcctatccttccgtttgggttggacctctcctcatcgaaagacttttagccaaaccgttctgggctaatcggtaaattcggagacgccatgtgtcacccttccaaaaacacggataacatttacccccaaacttccgggactcaagagtggcggaggcttgcagtattctttttggattgccatggaaacatgggtaactttgaagaaggagagaccttcttagcttctttgcactagaaaagatttgaatgatctcgattaccgttgatctcaacctaaggacgagttgtcgtctggtcggtaggagtaacaacctaacagagaaacttattggatgcttctattgaaggattggtatatgctttaccaacatatatattttaacaaggtaaatggttcaatggggcatttatttctttggtttccacaatctcgacgatgacatgctcaatacaggcccactaaattagttcccacaagactcggtctttataatttatttttaatttgagattaattttaattaattaaataattttaaatctctatgatattatattaattgatcttgttattatgagacaattcatatatgaaatattctttctcaaattttgtaattgttgtgaacaataaaataagatgtgcgataatgaattaatatatcatccaaatgtaaagtttatgaaaacattgaatagtaagacatttttcagacatattcaataatcgatttgctaccctaggtatctcaaaagatcaacaattgcattataattaagattat

SEQ ID NO: 395245 - DNA, 1636 bp, Cannabis indica
  modified_base (37)..(37): a, c, t, g, unknown or other
gtttttacagctttagttagtttttagagcattttcnctcatgttgatctgcatcgacaatttttccgaaccaaatagagtaactttatagtagacaatgtaattttatattagaaatttttatgtatttttcctatatttttaccattaaagaagttttaacaataaattttgaacattataataataaaactacttattgcttatataacttaattatgattaagtattaagtttattattatggagagtgactctaaggtaataattaatactttcaatggcaaggagactagatgaaagattgtgaactatttttcattttgtaaaagaatatttcttattttgttggttgtttattttaatattagtaaaattggtaattttattgcccataatatgataaaagaactttatttttttgctcatcaatcttgaaccgtatcagagtggacattgtccacaataatattgtttatcaatatcctccgttccaacaaacatcttttataatgatcacaaagtttaattttatcaatcaatgcacatttatatctaaaaaagaagtggaataactactatcagtgacagattaagataaattatgaattgatgtagataactttttgcgaaaatatatatgaaaatgtgtaggtaaaaaaaatctataccatgtagttttaagattggtttctttagtgcttaatatcgttattattagtgcatttattatcaaatttaacatatcttaattaaattaataatataaaaaattactaactacttaacgtattatattatagtgttggtcatcacattaaggtgtctaataacaagactctaaatatattatgaaaatagttcaagatcaagattaatgtaaatatgggtcgaactttttgacatgaaaccggcacaagcacaacctaacacaaaaaaatatgtgcacacaatgcggaaaaatatgggcttaaacacaacacaaaatgacacgatattgtgaattggcatcagacaacacgaaaatataggtttaggcacgatacggtggacaagttgaccctcattgaacctgccctctaaaaaatcttaaaatgtatatatattttagttaattacaacatatatttataataaaagataatatttatggacataatattagttttggtgtagtagttaagctatattgcatatatatattagaggtcaaatgttttaatcctaccaactactgggtccaccactaatggcaagcccgacgtaagcacgaattaattagctcgaaaatatgacacattaaaaacctcaataatttgataataataataaatgttaaatatttatttatcaattaaaataatagtaatattcacatactattaattataattattttttaatatattgttgaaagggtgactattcaatggttacattttttattgtaaccatatggttacattttttctttaacctgtaatagcaggttactaataggtagactttccttttttaaatttaattaattataattaactattttcttaaaataattaattaaatagtagacatttcttttttagaattatttaattataattaactattttcttaaaataattaattaaatatt

SEQ ID NO: 395246 - DNA, 601 bp, Cannabis indica
atacccttgctcttgggaagatacctagatccataactaatttgtaccaatttccaagacgtgtagcaaactcatgaccaaaaacatcctgaacgtggatggtctcaaaaggtactcttgtttttctcggttctgaaacacaattacatatgcatgattcctaattttatatagaatctttaaatatcaccgatcagaaaggtaagataacatcagtgtatgttactatgttggcagaacagtaaaagagatacaagcttaattaaaatctaaatcaagaaaatatctaatgcatggaactcatttaatttgcagaaaccaaccttagcctcatcattcctggatgagtgaaggcaaaaccgacctttggtatcgtaaagaaagttctcgttggttttgggatagagaccacatctgaaataatacaaaataacctaatgtttagcaaacccacaatctctctatcaattcaacgcctcaattaccatctgtgccataagattttcatgcaatttattgaattaaatgtttatgtattataagtttttatatatatatatctttatatattaaaagtgtctatctaacggcatttcttggt

SEQ ID NO: 395247 - DNA, 253 bp, Cannabis indica
aaaaaaaaaaaaatctaaaacaaaggattatcccaaatcgatgccgaggaattgatggcaatctcaaatatcgcagtagaatgtccaatactttatatcttttaagtaaaaacttatattaaaagtattatactttgcctcttcatgtatttgtacaattttttttttttttgtatttttaacatgtgccatattttcttaaaaaaaagagtttaagtttttatgcatttttgtttattcccctttataaatt

SEQ ID NO: 395248 - DNA, 673 bp, Cannabis indica
ccgggtccatgtttgtgtttgggtcctagctcgagtttcaatttcaattccgtgtttgggtttaggttcgtgttctttggtggggtttgagtcctagtccaagtacatggttgggtttgggtgcaggtttagatcccggtctgtgtctgggtttgggtacaggtctgagtccaagtcttgggtacgggtccaggtttgggtctaggtcttagtccagatcaagggcccgggttttgatcccggtcttggtctgggtttgagtccaggtttgtattaagatccatgtctaggtccgagtttgggtttgggatcgagtcccaggtttaggtctaacgtgatcaccgacttggaaccaaaattggaccaggactgggactagaacccagacatggacccataccaggacatggacctagaccgggacctgtgacctgggacataaacaaagactaggatctagacccagactgggacccgaacccagacccagacccaaaagccgggactgaacctaagaaccaagaactagactcagacctaggacccaaactttgacctgaacccaaattgggacctggactcagacagaacccgaacccaaactggaacacgaactttgacccagactgggacctaggacccgaacatagatgggggacccaaacctgggaat

SEQ ID NO: 395249 - DNA, 678 bp, Cannabis indica
agtaaataataaaaataaatagtaaggtaacgaaagttaaaaaaagttaaaatttttaatttagggttcggaaataataaaataactaaaaaataaaataatatacaaattaatataataaaaataagagcgccgggcgggggggggggaatgaccccacatgcttcccttcccttcgcctctggatcggagttttccgcactactacaaacttaccatttagtgacactctatagtgacccatacaaaagcgcatgtaactaaaaggttagaagtgagttttagtgacccgcacaaaatgactataaaattcagtgttagtgtccttcgatttgggacacaaaaaatataaagggtcactaaaaataattctataattttattattattattattattattattattattattattattattattatttaataaaaaaaaactttgcggagacgcgattggataaacatatttccacccacttgatgcgttacttatactatatcataactccaaattgaaatagaaaaaagactccctaattaattttaacttttaatttatttacttttaaataaataataaatagagaataaaagaaaagaaaacattacataaaccctaataaaactgtacgaaggatagggtaaatgtattttctattccttaaagaaagtt

SEQ ID NO: 395250 - DNA, 488 bp, Cannabis indica
cgacctggtgtggaagcagcgggtaagaagggtgagtgatgtggtggcttttgaaaatttgagtcttgaccaatggataaaacgctcaaggaaagggtaatcgtacccttgttgtctccccttaaagagggagatggtgcggagcagtggataaaaccgtcttcgggtatcaagctcaatgtagatgcggccattttcgcctcctccttcaagcatggcttcggatgtgtggtgagaaactcagatggtgatctggtctctgtttttgcagggatcaaggatggctcggtggctcctgaactggccgaaagcataggtattagggaggctttaagctggctcaaagacaatgcttacacacgggctattatcgagacggatagccttgtctgtgttgaagctattcggagcgaagaaactctagtctctgcatttggattggtggttgatgattgcaaaaatatccttaaaaatttgttcaatgtttc

SEQ ID NO: 395251 - DNA, 1114 bp, Cannabis indica
aatttcccctgcgccttagctctggttttcgccatagcaccagctcagagagctgctagagcaaggagagagaaaatttagagacagaaactttttttcgaactttttaaaatgtccaaaagttacggccagtaactttggtgatcgcccgtttaaaggaaaactcctagagagtaatatgttagttaaattaactctagttcagcacaaaatattagcaagaaaattttcttcttattatattgccacttttattaaggtaatagatgttcaattatgagcaagggagtctaactctcttgctcataaggtagctaggtggggtcttgggcttggtaatgagtttctgtggaatggttctttaccttgcatttagtcttgtgtgtttggtttggctcctctgtaatacacaagatcttatttcaaaaaaaaaaatatatatccatttaagctttgattctctttttatgagggcgaaactgtctaatactcgtatacatgaaatttgtccactactaccattattcttatcgaaatttcacgaagcttatttaataaaaataaaaagtaaatatttttaagagtcaaatttataaagcacgtgcaatgcacgtgccattattactagttctttcaataaattttctttataaattataggaaaatatttttaaatcagattaattaaataatttaagaattttttaaatttattatgaatattgtttatgtatgtccaaatcaccaaattaattatcaacattaatgcttaattgtattttcctttattgcatattaattaatttctcatttctttagtcaatacttttgtataaataggagtttaccccattagaataaacaactgagaaattctcattaactttctctttacttctgttcttcttcttcttctttcttctcatctattttatattatttaatagcatgttatcagcacgagtctctgcccaagctttaaggtaaactattttattaaagttcttgagttgtttcatagtcacgctacactaaatatatatttatatatatacttatctgactgaaataatttcaagaatccttttgttcttttacttttttatttatatat

SEQ ID NO: 395252 - DNA, 511 bp, Cannabis indica
atggaatatgttaaaatcgatcaactattatattatatataatgtatatgttttgactttttaatatgatcatataattaaattaatacatgtgaattaatatggtccaaaactagcctaataatccatatcatgagttattgtaactaatatctcatcttaaccaatgccaattaagttagtacgatttaattagtaatatttgtagcatcatcatctacatcattcaaatcctttatatatattatatataaatataatatactgatatctcttcttaaccaatgtcaattaactaatctctcttcttaatcagtgatcttataacatattaaattattaatatatgtttcgtacagcatcttatatctttacctaaaactttaaaattttaatctggccaatataaatcttctatctccaaattactatgtttttatttatgttttcacctattaaaaaatttgtacaaaatcaatcattgatcattttttgtataaaaatgtgtagc

SEQ ID NO: 395253 - DNA, 1241 bp, Cannabis indica
gaagataaacttttttaaagctttttgagtttaagtggttaatttttttatgttcttttaataagtcattgccattttctatgtttatgaagattattatttcttaagtctagatttatatggatatgatatattattttttttggggtgtttaatagattatataatttttcattgaaaatatagaaacaagaaataacaacttttaataatatctattgagtatatcttgtgtgttttaaatttggttgattcttttttatttatttgctatcattattttatatttcataatctaagtcgtattttttaattcataattataattatatatcataatattaatctttcacatatttgttacaaacaaatatgaacaggtatttcaaaagtataccatagtcttcaacttctatgtgaaagattgatggaattgcaaaatcaagttgtgtggatgttgacacatatcttgaagaacttgaaagtgatcccgagttgagaataccaatgttagaccatccttcaataggtttgtgatcaagttcaatgagcatatatgcaaaaaggccttttgtcaacctcatctcaagccatttccatcacaaaaggttggacctcaattaagggccttcaacggtgcttggtatgcagactatcaagattggcttgaatatattgtattaaaggatgcgactttttgtttatattgttcactatttaaagaagatgttggagggcaataaggtgatgatgcatttgttagtaaaggattcagaaatttcaaacttgcaaaatcaaggcttcatactcatgttagaaaaccttttagtgctcacaatacaactaggaaaatatgtgaagcattaatgaacaaaaaataacatatttaaatattttttgtaaagcaatcagagcaggctcgtagtgagtatcgaactcgtttggaagcaatggttgattgcattcgtttggtattacaataaggacttacttttcgtggtgatgatgagattaaagactcaagtaatcaaggtaactttcttgcaattctaaaatttcttgcccatcatgaagatgacatcaaagcagtttcattaaccaatgctcctgagaatttaaaattaaaatcaattgatattcagaaagatattgtacgggctgtttgaaactctagatatcatcattaatggaattggggattcaattttttctattttagttgatgaatctcgtgatgtttc

SEQ ID NO: 395254 - DNA, 1186 bp, Cannabis indica
tgcttctagcttacccaatattacaaatttaaatacttttacctatacggtttttttttttttttttacaaaatttagaaacaaaactccaaaaactataatttatacttcaaaaaaaaaaactataattaatatattgaatttcattgatgccttagccttagcattcacatttggatcatataatcatttggtccaaaatatcattgacaactaaagcaaattaattaagaaagttttaatattttaatattagtaatgatgatcatgaattgggatatatgcctttgaaaagtaatggtagaatcatatttaggtataaatagtactaattacacaatttaacactatataattacactgagggattacatttttcaattctcataaaaattaagtgtaattattaaaaaaaaatattaataattactaaaaaaaaatattattttctcttgtaattattaactattttatcaaaaataatataataataaaaaataatgcattgaaaatttatatatgattagtaccttataatatcatatgcttataaatttaaaaattatattatattttaaaaatattgtgtaattactaaattatataatcaaaactttcaaatacatttagtattttttttttttttgttttttttgtcaatacaagtttaatatggtaggatgctttagaagaaggctagttaactatttttgactctttcaaaaccagattcttcaaagtgggtaattttttttctttttaattttaattttccttttgatataataaaacaaagagtagtatacgtagaatccactatcttagactttgtaagatcacttcgacatgctcttaaagttagtaaagagttatctcattacatcttttataaatatatatatatttatatatatcttatatacacacgtgtcaaaactctatcatcacaacacatttttaaaattttcatagaaaataaattgttgtaaaagtcatattcatgattaatcttctcctcatatatatgatcacttttaaagacttgaacccaaagcaatatattgtttccatttttaaaatgattttttttaatccacaagaaataattttctacttggcatataatactattaaaatacaataattaataaccaaaacttataatattattgataataataataat

SEQ ID NO: 395255 - DNA, 1029 bp, Cannabis indica
ttttttttttttttaagtttggtttttgtattttattttttgtgagtgtcttgtctttgttttagttttttagtttggtgtattaagtagtaagtttctatgtttaatttttagttttgtagtatatattatgtaattaatgttttagtttcacattatgacttagttattttaggtaactggttttcatttgttagtttttaatttaattgctttatgtaattgagttttaagtttcagttattgtaggaaactgggttctatctgctagtttacaagaaattagttttagtgtgtcacgtaactagccaatttttagtttgtttgctttacgtaattggcttttccgtgttaaatttgtaattaattgtttgatataaatggtttttatgatttaattttatatacatttattaaaatttgatttatttaatttagtgtatttattgtgttaagtttatttatataattgatcatgttacatataacactgatataaatgtttacaaattctcacacttacatgatagtacaaaagattgatcatttatggcccgtttggtatgtcgtattgtaatgtattgtattgtattatgttggattgtgttgtattgtattgtattgtattagtattatttaatacaatacaatgtttggtattgacttgtattaattgattatgtaaagttataatatatttttaatacactcgatcccaacaccaattacaggtccgggtcccgggtaccgggtccgagtttgggtcagagtccgggttcgagtccgggtccggatccggggtccgggtgcaggtgcagggtccggtgtctggggtccgggtccgggtccgggtccgagtctggggtccgggttcgagtccgcatccgggtcggggtccaggtccagggtccggggtctgggatcccgggtttgggtccgggtctggggttcgggtccgggtccgggtctgggtccggggttcgggttcgggtccggggttcgggcccggttcggatcggggtccgagtc

SEQ ID NO: 395256 - DNA, 605 bp, Cannabis indica
gaaattttatgtatgacatacaacatgcatatactaataaactactagcaaagaagtatttagcaataataaataaataaaatgtgaaccaagtaaatattgagtatttttaaaattacaacattcaaaataaaaaaaaataaaactacactaggacatctttactcttcaagaactcttcttgttctctcttggttttcattcatgtagctttaggaatttcacaccatactccatttgccaccaccatattattagaaacataatttctaattaaattaaattaatttcaaataaattaaatttaaacccttttttgtctttaattaattataattaaataatcaaataattcgaattcactaatagaaatattttaaaatattctatgtaacaattaattataaaatattaattttctaaaattaaaatatagttaggatttatattaaaacaacttttaaattatcctaactaactagacaattaaaatattaattttctaaaattaaaatatagttaggatttatatttaaaacaacttttaaataatcctaactaactaagacaagaaaaatgtagtatttagattagttgaaaaataa

SEQ ID NO: 395257 - DNA, 703 bp, Cannabis indica
caaatatatatatatacaaattttccattagaaatatttatttacaccctacaggccttactttatgtgagtaaacttacttggactacgtcatattatattgtaaatagtaagaacgcattatatatatgaatttaagaataaaaatatatgaggatatgaacatatacacatataatatataaaaaacaaagaaaaaaaaagaaaaaactaaaaggctcttaaaattatttcaatcagatgggtatatataaatatatattatgtgtataatgatttgaaataatttaaaaactttaacaaacaaaaaatatttatcgtaggtaaagactaatggtgataacgtgttataaaataatattcaatatatatagaaagaaataggagaagagtgaagacaaagagaagaagagaatgaaagagtaagaatttctcagtagtttattctaggaaaattacctcatacacagggccaaccctaggctaatagcggactaggcccgtacctagggcttactcattttaagggcccaaataaaaatactatttattttataataagggcttaaattatttttacttatgacctatttcaacctagggccggtcctacccatatattattttttaacttttttttttaatttacgggttggatcgttctagtgatttctatgtaggttgcaatgtagattttgattgc

SEQ ID NO: 395258 - DNA, 1034 bp, Cannabis indica
aaacatgacacttacagtatataatagctttgtatgtgtttttgcatgtacttgcatgcacgtttacgtaataaaatcaaactatgatgatcgacctttgattttcgggcattttaatttgttttaatttgaactggtttcttttttttaattaatctctttttttctttcttttataaatctcaattttaataatttcaattatatatatataacgtttttacaatttttttgcaatttttttataatattattttttttcctttttgttattttataagatttataatatgatatgctatgaagatagaaatggcactacaataaaaaaaaaatcacttttgccaacataatttgtaactgcgctggtgaaaatcactttcccagtgcatctcgcgaattgtgctggtaaaagggtcatagttttaccaacacacatatttactctggtaaaacgtatttttataactagcgcaactcatatttgcgctcacatagctaaccttataaacactattcccttgataatttttacttgtgtaaaagtgtgatgtcaaaaataagactttttctagcgcacattaacactggcaaaagttagactttcgctaacgcattaatacgctgggaaaagtcatttttgctagtattttttattttgtgccagtaaaagttccaacactaacacagatttgccagccctcttagccagcgcaaaaatgcactggtaaaaatcattacaaaaaactgttattttagtcataacataaattttttgtgactaaatgtgacttttagtcacaacaaaaagttacttgtgactaaaacatatagtatttcactacaaatttttttacttttagtcacaacataaatgtgacttttagtcacaacaaaaagttatttgtgactaaaacatatagtatttcactacaaaattttttacttttagtcacaacaaaatttgtgactaattataaatcatgattcctatgttgtgactaaaaggttcgtggctaaaagtattagtcaca

SEQ ID NO: 395259 - DNA, 564 bp, Cannabis indica
tttcatttaattaacatgactacgtcagcgtgggactaggtttgaatgacgtaactgtaactatatatttattcctttttatttttaactcacacaatatgtgtagtgttttaaatttaataattaataggacaattaaaatgtaggtaagaactataaattaaataaatatatgtagtagctagtaattgaaaagaataaaacacatgatgatgaataatatatatatatatatataaaataaggttgttgttatataataatattctaaagccgaatttgatacagtgtactatttattactttaatcagtagtagtcatgaagttaaaaaaaagttatatataatatggatccaatatatatggcttcactaatatatattcaactctgctccagaagtggggacccttaatttaattccttttttttttaaatataaaacatattataataggaccatatctaatagactatacttaacactatactactaatatatttagagttgattttaaaatatggttagccataaaaaaatatttttgaacttttatttaaaaaa

SEQ ID NO: 395260 - DNA, 841 bp, Cannabis indica
acttttctacatatacattacacctacctcatattcttatagttttctatatcagttaattaataaataataatgatatacaaatattaatatgaaagataaataagaaataataaaaaaaaataatatatatatagagaagtttaaaaaacatttgttagagaagtttaaaaaacaaccacttgaggctagctcaagtggccataagagagtgcgtgtgtgttggaggtcttgggttcgagtctcaggttatacattgtaatatataaacgcttaattcaaaagaaaaaaaaaaagaagaagtttaaaagacatctatagtatctatttagaggatagtttcagtcctttacttatttaattttaacttttagctatttagaggatagtttcagtcatttagtttcagtcctttagttatactgcagctagtgcatatactcatagctttcattataaatgccccctatattatgtagattgggagtgatttgagagtgaccaatgaccacctcatacttttcttttatatactatatagattgataattaatcctttgattattgaatagctattatctatatgttagactttcaaatagttcttatttggcggtttagggagataaaatcatgttaatcttcatttatttaaaactaaaaaacaaattttcaacttttacttattaagtcataacattgtattaattttgaaaataatattggctaattaagatttcaccctctgaactttgacatgtaccaaatcatgtcccctgaacttttaaggtcgttgaaaatgccccctgaactattgagattgttggatttaaggactttt

SEQ ID NO: 395261 - DNA, 1780 bp, Cannabis indica
taactaaattaaaagtaaaaaattactctcataaattaaatatatatcgtaataattttttataataaataaaaatataaatagtatttaaatttatttattaattcaaaatttttattcaaattaatagaataatccaatcccaccattttttaaagtatcaacattacttttttcaagagtagttatattactaaaaacaaagtaatattttatattaccattcccttactagtattaacatattccaaacagctagtattaacatattccaaacagcccgtacgggtacttgaaagatttttttatgccaaaaactttactttcaatatcactagtgtaaaaaggatggaatttaaataggaaggatgagaggaacttctttattatccactattcataaaaatataaatattaaaataatgcatttttctttcttctatgcagatataaatttacataaaatgcagtcgatgtttcacatgcaacatagacacacaaaacaaatatgcatgcaaatctaagtattattctacaaggaagaaagtttaataaaaacaaataaaactcgaatgaaatgtaattccggtaatataatttatgaagcaaccatatttaatataaatagaaaaagaaaaagagaaagtgcaaatcagtctccaactccacctacagccaagaaaaacagttataaggtaatttcaatcaatatttcctttttgacaaaagaaagttgaacaaaagaatggctctaacctcataaatcaccactgctacggttttatatgtacatccgatcaattgaagacataaacttctgaaatggggtggaactgatataactgtacaaacataagtacaagcccaccaggcccaactgcaaaaacaagaaaatttaaacctcactgcaacatagattatgcaatatactctcatcacaaagcacaattatattattattatatatatttgttgctaataccgtttcttttattttgatggtaatattaccaattttttgtttaatacaaacttacattggaggagaaaaaagcgtgttagaagttacaattttttttaaaaaaataactacataaaaaatattttagaataatactaaatctcaatcaatagttgcatttaaataactcaaaaaaatctaaaaaatttcatatttatttactactttaaagcttttttttttccttcaatatttttacaatttttttttttttgatgaatcaggaaaagttgtattgctcaaacactatctttgtacaaacaaatagcaccccaaaaggcctaagctgtttaaatgctatacatttataactttttatattctatataatctgtacaaaactatgtatccttgccaccaattacaaactttggaaccagttggtatcctttacagaaacctttttcggccatattgcagcaactctgtgaagaacatcactccttattccttcaatcagcctttctgcagtcggcttggtcttctcccacaaactgagattgcgagctttccacagaatatagaccaaacaaacaagagcagcagttaggacattcttcctaaacttgatgatctttgatctcccaatccacctggttaaagtgagcatagtaacagccttaacatgccatgagagccaccttttgattccctgtaaacaggcagcagaggtactgcactagaaaaacaaatgctctgcattctcgttctgtgttgagcataattcacaattctcatcaacattcataattcccattc

SEQ ID NO: 395262 - DNA, 872 bp, Cannabis indica
aaattgtcaaaattgaattcaaggttttttactattttaaaaaatacagggtgtactttgttatttaataaaatacaatatctaatctacatattctacaaaacacatgtccaaaatagtatttacacttttatttaataaattttaattaaatttgtcttgtgatttctactaataattatgaggtttactaataaattcaaagtaaatatttatacaaatgaaaaaagaaataaaaaattgttgtgtaatgattttttaaatcaatattttatagtttttggggttaagtaaatcttattagtcctttcctgtgatcaattgctgaatgaaatttattaaaatcatacatcattcttgttgagttgctaattcaacacaattaatgatgagctcttgatataggaacttcttatatcatcaatacaataataattatatataaaaaaacaaaataaacatattaattcatttttataaatattatgttattgttttgtctcgttgtaataaaggttaatactatattttctaaaatttattgattggataatctcttttgtaaaataataaattagatcttgtattttttaaaatagtacaaaatagtattttgagtttaatttttgatgattttctttctaatataacaaacttaaagacaatttctaacacgaacagatatataaaatgtactcaattttgtcataacaattctagattgagttattattaatttttattttgacaaaaaaattagtttatggtactattttgtatgtttaatttgtcatttaataaaatagatgatccaattaataacttttacaaaacacaagattcaaaatgtatttacccttgtaataatagaa

SEQ ID NO: 395263 - DNA, 2561 bp, Cannabis indica
aacagacacaagtttggcttttttagattcatctccctgcactttttgtttgggttacagttttgaaccataaagggtataagtgtatagatagctctggtcgtgtttataatatctcgagatgtgatctttgatgagtccaaatttccttttaaattctcaggctatttctcacctgttgctccagataatactgatactttaccatctgctaccattcccacctcaacctacacccctgagtttttattccctgatgatcactcacagtcttcacaccaaactcctatcttttaccctgctaacatagccctgcctcagctctctgtatccacttctactcaacctgtgcatgcccctgactctctttcacagcctaaccttgattctgttcaacagcctcctgtgtctgcaacttcacctgctcctctctcaattcccaccacagttgtttccaagccttctgaacttcctcaggtacctgtaaccaacaaacattcaatgaaaacaagagcaaaatctggcatattcaaacctaaggcttacttggctcttcaagaaccaacaagtgtcaaaatggccatgaagcaagagaaatggctcaatgctatgtctgaggagatgggggctctaaaaagaaatattacatggacctatgttcccttacctgatggtagaacacctatagggtgtaagtggatttacaagatcaaacttaaccctggtggcactataaacaagctcaaagctcgattggttgctaaaatatttcatcagcaaccagggttttatttcacagagactttcagtcctgtggttaagccagttaccataaggattgttctgtctttggctttagcaagaggttggtgcattcaacagttggacataaataatgcttttttgaatggtgagtttgaaagatgaagtgtacatgactcaacccccgggctttgagctacctgatgctcctcatcttgtttgcaaactgaataaacccatttatggccttaaacaggctcctcgggcctggtttgacaagttacagcagtgtctattgtcttttggatttgtctcttcgaaatcagatcatagtctcttcattcaacatacatctagttctgtgcttctcatactagtgtatgttgatgatatcatagttactagaagtaactctgaccaagtctctgctctaatccgtgccttagatagtaagtttgctcttaagaacttgggtaatcttcactattttcttggaattgaggttactcctactgaatctggtttgcatctttctcaagggaggtacattactgatcttctctgtaaagccaagatgcaagatgccaagcctgctccaactcctatgacaagtggtctcaagttatcagcttatcaaggagatcctgttgatgatacacaccattacagatcgattgttggtgctttgcagtatctcaccatcactcgccctgagatttcttatagtgtcaataaagtgtgtcaattcatggccaatcctcttcacacacactggaatgcagtgaaacgaattctcaggtatctcagtggcactgtgtctcatggattgtctctccaaaagtccattgaactcgatgttacagctttctgtgatgctgattgggctagtgacccagatgacagaaggtctacttcaggtttttctatcttcttgggttcgaatcttgtggcttggcaatgtaagaaacaacatattgtttctagatccagcactgaagctgagtacaggagcttggcacaaactgtttctgaattaacttggatgcactctttgttcactgaattgaaattgcagctttctcgtcctcccattatctggtgtgataacttgagcaccattttgctcactgcaaatcctgtactccatgcccgtaccaagcatattgagttggatctttattttgttcgagagaagcttactcaaggcttggttcgtattcaacatgtccctacagtggatcaaattgcagatggcttaacaaaggcaatctccactgatcgttttactctgtttcgaaacaaacttggtattggcatccctaccaattccaagtttgagggggagtgtcaaggcagttaataccgttacttgtaactgcttcttggttgttagagtttgttattgattctgttatgatttactacttaccttgtgtatataaactcggttcaacagattcaatcaatacaacaactctttctcttattatctttcctctctcttttatcttcatctctttcttctctttgttctctttctttacttctctgtattaatggctagaaggggaaacaacatcaacacacagaaaataaaaatacgatgagtaaatattgatatgtcatcctattttcgtacacggataacaaattatctatttcaaaaacatctcaataatatagtgcagtaaaaggattatatactaatatatattaagttaatattacgagcaatgttaattgtagtcttaatttttatttcaattatgtatgtttttagttgtataattagttttttt

SEQ ID NO: 395264 - DNA, 793 bp, Cannabis indica
gatagtgtttaaccacgaaggacccaccatcactggtaaaaatattctccctctctctctctctagcaccgatgacacccaactccgatgacccaaccaccactgaaggtcccatatgttctcttttttgtgccatgttttttttcttgtgttttctgttatcattttatttttgctgtttgcaggtagttctcgcgactaactcaaatttatgatgcattttatttaaggagtaaagtgttattttgaattgttacatttagatttatgatttccttattaaatcagactctcccttactccattcatcatactccattgaactcctatagaataaaaaaaaaaatagaaagataatggtgacggttagcaaataaccgctaactatctctacctttagacttaagaggctattttttctaactgctttagcaatttttgtaactcctacaaattacaaattttgctaaaactatctcttaaaaggcagaaaacaccgcctaaaaagattatttttgtagtggtaataatatcacaccgaaaagaaaaaaaaattcagttataaataaaaaatttcccaattcttttttcgaacccaaattattctttgaaaaatccacatcaaattaacaaatcctcaaatagtattgacttgaagttcagagacacctctaatagaatattgggtgcttccaatatataagacactgtagaaacacacctatatatatgtatgggtatgctcttaatgggtattacttatgtatgggtattttattcttgaccattggat

SEQ ID NO: 395265 - DNA, 2099 bp, Cannabis indica
gtgaccaacttcgccagaacatacaaacaaagtaagtgatgtcaaaatatcacttaggcatctcaaagtacatcccttggacatttttacacttacccagcgtttaagttgatgtcatatgtcaacctgggcgctggatgttaaattgggcgctgggtcatgaactaccttcagtaaaatagtcgtaatttctcaatattgatccgattgatgcgattcaacttgcgtttcaaagctatttcaatgctctttcaagtcatgtctcacacttaaattgaaattctaaagttattgacctcaaatttgaccctaatggagttacaagaatatgctctgagttacccatagtaggtctccctgggctccaaaaaatgaatatcaccattagaagctaattttcaccattgtatcatcatctaaggtcaaaaaatatctattttttttttatttttctcctatttttttggcctccgtcaactataaaaggagagctcccttagctcattttttacattcaaaaaactacccacatggtcaaaacatctctctctagaaactagagcttaaacacttagcctttttgtaattaccatctggtgagaaataaaaactcgaaataaacgtagttccattaccaacgtgacatggggaatgaagtactataaattttgtgcgtctttctaaattatatacttacattcactactcatctcaccaatctagtgagctggtattgaccacttttcaacgtgaatattttggtactttcattgaagccataactcaagttcccctacaatagttaaaattctctacttggaactctattttgatagaaattcataagttcaaccgagtaatcatccatgaacattaaaagcctcactaccactcttggttgccatgccactacttagcaagcaacaggcagtgagattccccataacaatgcgaactacaagcaagcgtttgaaaagactcaaactcagaatcatggatttatgggatctctgcctgatttggagcggtcgcctattagggaaacgagctacgagcaagtatctgaaaggattcaaactcaagattgtaggcctacaggtccacctcatgcagttgataagaccaatcaaaattctttttgaagcaattcaaacatttagggaaaccaatctcctctgtgggattctcttcacaagtttaatgactctagaccaccccatgaccctaaaaaaggtaaagggacatgcagtcagaccaaggggaagaccccgcgtaagctttaccacaaaaatgaagagtatgagatttggagggtgaaggtcaatgaactactccacactcggaaatacttttgtgatgaacaaggtgcttggtgtaggtacttctcctgaggtcctgacgaccaaaagtaggaatacttcccatgggtgcatggagacatgttgaacttaagaaattagtccaacttcctccacacatgtcactctgaggaagactattttgaagagaataattggtgtagtactgtgagcagctgctcatgaagcaaacaattaagagacgactttatcgttatatgggataaatccctgtagttgctaccaaggccacccgaccaggaaaaaactaaagcacctaggtcgaccaatgcctttaatcaacttagacgacaaaagagcatgcataaaaacttcaataagaagcggctagttgatacacagatcaccacagtgtgtagggtcaaatttgacaccattgctgctctggttaagggtatcactactctaaagccaacatggtacgagttagatcgagagcaattttctgctctctcgaatcaaatcaaggctttaggagtcccctcaaagttcaaaaatccagtgtggcatccatacactggcaaagaagaccctctctctcacatccacaactttgaagtacaaactgacctgcaaggcattagagacgattctcattgtcgagtctttctagctacactatcagaatctgtacacagtggtatctaaagctctgcctgagatctatcaattcttgggagacactgaagaaatcattctatgaccaattctctccatcaa

SEQ ID NO: 395266 - DNA, 847 bp, Cannabis indica
cttttgaatgccctccctcttagcgccaacattaagaaaagattccttattgaggaagtgaactgccctttatgtggaggggaagaagaaactacagagcatttgttcctttattgtgactttgcgtttaatctttggagatcgtccccctaggggatttatcctattactagttttgacattcgtgtccgggattaggtcaaattcttgggggctcagttctaaaggtttaaatgttgaggaagtctttatttatgcgtcagttgtggtggatactatatggcatgccatgaatgaaaagatcctcaataattgatttcttaactcggataattgtattgactctaccctttgtgcttttacaaatttgaaaggtactttgttacccgctgtgacctcggtccagagggaagactagcgcaatcttccccagtattggctgaagcttaattgtgatgtaagagttggtttgggtagttcctgtattgctgtggttgctagaaacaatttggatgaggtggtctagcttcattcagctagactagactatgtggatgctctctctggtgaggcatctctggtgaggcagcggcttgatgcctagccctggatatcgcaaagctcaacggtcacaagttcgtcattgtggagagtgactatgggattgtgatcaactctctcaaccttgtttcgtcttgttgggatattgagaactactctaattgttagttttgagctctctagatttttttgatggttgcttgttttggtgtattcccagaatttgtaattttgttgcccataatgtggctaagtgagccttcacccacaatcagtttggttgctt

SEQ ID NO: 395267 - DNA, 820 bp, Cannabis indica
ttatgaggtgtcattacatatctttacaagtgtcttatataaaaggtgagtcataagtctgaggtgtgtgggtcatcatgtacgagatattgagtcatcccgccaaggtatgtgagtcatcataattgggatatgcgagtcattccatccgagatatgtgactcatcttgtctaagattctaagtcatcccatctgggatatgcaagtcatcccgtctgagacaagtgagtttgaactgaccgaggtaggccatatctcggaatgaccgtgataggtcatatctcagactagtttgagataaaaatatatttcgaattgatttgagataagaggagtccaagactgaactgagataggcaccttccaattcgagataaagtgtttctcaacacgatctgagagggaattatctcagattaattcaacttagatattactttgactcgtctaatgtggttaccctcttagttatattcccatatttcagctcctaatttattctcaattataatatatgtataagtattatatttattcaaaaataattttattacaattttatttaattgtaatttctcaattaaaatataatttatttggtgacaagtgtaatttattttgtaacattggattggactgccccaagtatattctagtatattctaaaatgaagattctattttaatatataaattaaaaatattatttttgtatataaaataggaggagattccaatgattacatttttattgtaaccatcatagtgacattttttttacccattggatcagtattaaatggttgtgattaatttagaa

SEQ ID NO: 395268 - DNA, 644 bp, Cannabis indica
tttttttgtttttttcccttaaacttttagtatacaattaaataacttttaaatatgaaatcgtatattaatttataataacacataaaatttggtttgtaattaaattttatttaattaataatttaattactttttgattatagaatataaaagaaattaaaacattgcttttgattttgattattttttttaaaaaaatatatatattttctacagatcaaaatgactattttaaaaaataagatccaataacactacttatgaaaaacaaatgagtaatttttcattaaaatcttatcaaagctataaaagaagcttatattctagttactcttaaatataaattaccacaataatttttaatagcttattaaactagttggtatattaaattttatttacattaaagtttaattattattttttaaaaataaatataaaagaaattaaaatattacaagggcgaaaaaaatttatacctcccacatatcaaaatatccatcttcaaaaaatatgtaactttggtgtactttttaaatccaaacaatcattaatatgattggaaaaacttttttaaatttagtaggaaaagagagagagagagagagagagagagagagagagagagagagaataaaaca

SEQ ID NO: 395269 - DNA, 1154 bp, Cannabis indica
attttttgtacagccctacctgatatcaccacattttcttttaaaaaacagaatatgtataggcctccgcctcttagttatacactctctactttattaaaaaaaaaagtctatctacaaaattttattaaaaaaatgttattttcttttataattaataattttttgtcaaaaaaaaaatcatatgattaccgcttcatattataattactaaattgtgttattattataagtaatgatgcacacctaaatcacataaaaaaaattgttttaactttaatataatatctttccttcttaaaaaatgagttagccttatttcttttgttttaacgttgtttcctattttgattttcttctaccaaatagtcctcatagtcaaacaataaatatataatgataagctaacaaaccataaatctttagctgattttacatgaatcccttaaaatagatatatcgatgtaccttttatttgtttcgacattttaaaataatttttttagtttattttttttttttcatatttttgtacgttatagctatttaagatattttataaacaaactaatataatttatatacaaataaatgtacaatattacaaaaaaatgtacaaaaaaacataattacataattttataaatatttacaaataaacatatatgtttacaattttaacttgttgataattactttcaattggtttttttaaaaaaacgtataaaattaaatatgtaaatataaaagttattatttatattttgatatattactaataaaataatatgtttactaaaatttactaaaatttaaaaaaaaatatataaatatatttataaattttatttatatattataaacaatgcatatatattatgtttattaaacatttaattagtattattaataattatattggtattattaatttagtacgtttattatgataataaatataatttgtttattaaaatattataataattttaaaaatacaacagttaagtttatctatttaaataaatactttataaataacacttatggtgtttagttattaaaaaatgtgttttaaaaaataaacgaaattgtaattaaatgtggccttatgtataaacactatgtttatattaatattgataatgtttatt

SEQ ID NO: 395270 - DNA, 702 bp, Cannabis indica
agagagagagggttgaggaaggtgaaaaggggtgaaggaacagtgacacagagatggggtggacgaacgctaatagttgatagagaaaaagggtggagaggagagagaaaaaatggggaagaaggtccctgatgtgttggttttatcgattaggttttctcaacgtcttttctagcaaaacattacaaaaaaatcctaaaaatcaaacactttatttcattaaacgctaatttttcagacgcatattaatacaccgacaacacttttcccaccaataaaatttacaactttttagttgggtggtaattatccaattaaaaattttaacatttttgttggtgttatattgtgctggcaaatgtgtctttccccaaaaaaaataatcaccttttggcggtgtcacagtaaatttttgtcgataaatttcaaaattacactggtgaaacatacttttgttgagagctccgacaaatatgaaaattcttaacaatacctttgccgacgcatttattgaaatttgtcctcaaagttttttttttagttagctctttttagtaccgcactttgttcttaagggacaatctcagtctcgtttccttagctacactgagtttgagtaggggtgttgtcaagacaaactcatgacaattatttcagttagttgttactaactgttttctgttacagtcagcttgattgttt

SEQ ID NO: 395271 - DNA, 531 bp, Cannabis indica
aagaataagagatgtcacgcacattgattctccacgtcccaagccttgtgacagacgtgcctttgtggaagctagggctaaaagaactaattagttgaagattaacttggcttctttctttggattccacatgtcatgcttacaaaaatccagaaaacatttactcccaagctttcgggacgctccgtagtgtgggagcttgtagtgtttccccattttctcatgattgattcctaacatgtggtgccacttgagattgctttatgtcacacaaatggtcgtcaactagtacatcgctaatagtgggtatcattagtatggtaaactggcaacgatctaaatgtagcttctgccagtacgcatgtgcagggcgcgtgtctcaagagacgttgaaatggaagcaagttaattgagaagactcttcatttaacaagcactcttcatgagaaatccataaaggatgttaaacattttgggctgatactgtttctcaactccccatctctcagatccttagatgctactctggtg

SEQ ID NO: 395272 - DNA, 717 bp, Cannabis indica
gaaagtaaaatgcaataactttagtaaaaaacgtacaaaaaaagagagaagaagtaaaaatgcaaaaaattaaatatgaaagtgggcatatatattaatataagtatatatatattggagagaactaatatatatatataaatgaaagtacatgcatgtacaaaaaagtactgtataaaaatttatttgagtgaaagtgatcagtggtacatttttaatgtaagaaatatgtaaacattaagtttattaggtaataataacatgtgtataaactatttaaattatgaattaatatcatgtaaaaatttcaaaatgattattattataactagatcatttagctaattatggcataagcatagtatatatctggtaattggtatacaacgtactaactttaattttccttttgtttaagttaaaaatttaacttcttttttgtatgtttaggataatatacagatattcttttaataatttagaaattaaaaattttaaattattataattttaaaaatagtttttcaaaaatccctttcaaactcaagaatttaggataccaaaacttcttcaaagttatcttataaattactttttactttttattcaaacacgtttaaaataaaaacatttacaattctttatacatatatatatactaggtgattgttacgtgccaagccacgtagtgttagttttatttaatattttagtttt

SEQ ID NO: 395273 - DNA, 771 bp, Cannabis indica
attttgtcttatgattgtactttcacggaatacattccgtgaaagtacatcccagaataaaatcgtgtccctaaatttatattattttttgacacaccactaaaacatatttttttactaggtgaaatatgttgagtttttgcatctccatagaagatgatcatataatttttaatgaggtagatagataatgtcttgggagttagtggttttatactatcattaaataatgaaaatataaataaatagtattttttttttctgaattatgaccttttataagtttttgttccattccatgaattagtttttgttgcaaaatttctcttgaaatataaaaattgtgtcaaaatatttttttcaagcacatttggtttatgtttttaaacaatctttgatgttaacataaagtaatttaagagtctagacaaaataaaaaacaaaaaacaaaatagcagcctaataatgagctatgtgaatatgtatatacattcttaaagctaatgtttacttgtttaatgtcaataaactaaatttgaggtgatttaaactttttaaatacatcatcctactatagctatatgatcacataatgttatattcatttgaactatttaatgaaaatgtcgaattgtatgacatatggcctaaataataatttctcccgccaaatacatgtaggtataatgccttattagattagacatgttatcgttatttcaaactattgtacactcatttgctaatcaaagagtttattgaaaaacatga

SEQ ID NO: 395274 - DNA, 1273 bp, Cannabis indica
gtgaaccaagaataccgtcccaatcatcaaacaacgaatccacgaacccagaccactccccgtagaaccatgaacccacaaacctgtccccatttccttcgagccataaaccccatcgtcgtcctcgtacaaacctgcacaaaaaaatatatatatatatagagagagagagagggaaaacaaaaaggacgagttttgggggcgtagatctcgattttgtagtccaaacgcatcgccgggagtgcatctctaccaccaccgacgacttcttcgtgagtgcatctccaccaaaaaacgagagagaggggcgaatatataagttttgggggacgaagatttcgattttgtggtttatttcaacaatcggtcaccagagttttaggtttgctgtgggaagatcccatcgagagagtgagagagtgagaagaagactggatagagagggtaaaatggtttgggaattagggtaaaatggtatttaccctttttatttataatttttttaatttcaaattaagtttttttatttttttacgtgaactaataaaaattatgtcatgtgtataccttgtccacatatatgtatacatgaacagtccaacatgtcacttaacacctaaaatagataaaaactgtaaatgccaaaagagttccaagtttggagttttaccactaaaatttgaattttaagggtcaagtataaccaaaatgaaagtattaaaaattatgtcgcaattaatcttatattataaaataatatacttttgctgtaattttttttttaactaaagtcatatatgtaacaattataaattttagttaaatttaattataactatccataaattaatattgattagattgaaatgataattttttttgaggtgaaccaatatttaattcgaaaaaattttaaattttaattttttaaatctaatccaatctgtacaaatgtattaatttatccgcactttgatgattcgatcatattgaatatattttcaaaacacccatacacatgcatatatgattattttacagagctgataatatagtcaatatatatagacatagtacatatctagtgtcacttatacataattatatacaatgtaccaaattattttcaacatatttgatgattagtttattgaaattttaattacgcggtgcctttgattcttgacctaaattatatgctaaaataataaaaccatcatttattaataagaactatatttttttccacaaaaagataaaaattaaaaaaaaa

SEQ ID NO: 395275 - DNA, 842 bp, Cannabis indica
cagtatctccggcttaggagattactctaggagatggtctagtcctaattctgaaggactgtcgagcccatttagtggattaccatgggcatcataatggcacaagggacggtcggggagaatagaacaagtcctatacctcctcctcactagagcatcgaaactccctgtctctaaatccacctttggctcagcctcgataaggggctaggtagtctccccctccgctctaacttgaccccttgtgaccactatggcaacatgaggatcatacgggggtgccttacgtagagtccattttgttcatgccataagtacaagaaataagagacctaaaaagttgtcacctccccaattcaacaccttgcactacctgctagaaaaaaataaggggaggtaagcatcattatctagttgtaacctcaatatgcgtccatgaaactcaagatttcatggccagttgtggcgtctacaagctagtcaattctaaaaagcagaaagtagtcatttggatatgctttattcaggtttgtgaagtcaatgcacattctccactttttgtagtgtttgggtacaagcacaaggttggatacccaaatggaaagaatgcttccattatgaagtcatgggctcgtagcctctcgacttcatctatgagcatttgggcgcattctttgtccaacaacctcttcttctgctttataagttgaatgtatggatcgatgttgagagcatgggccgtcacggaggggttgattaagaccatgtatccatgtgaccatgcaaaaaggtctaggtttgcccttagaaaacttattagtaatgattttatttctggtgct

SEQ ID NO: 395276 - DNA, 745 bp, Cannabis indica
caaattgaagagttcgatacctcgtcagtattttaaatttaatttagtaattttcctcattatatagcattattaacgcctgctaaatacgtggactgagtggtgtaaggacccttatttttttctattattatttagttttttttttgaaagagaaggaccataaattaagagtatttagttatttgtttgtcatgttgtctaatatatgccttttttttttttaacaaatactatatataaaagtactatatgacatttttacaaaaaaaaaaaaaagtaactagatgacattataaaattaattcttttggcgaagtttcttgattaattatttttatcttataatttttattttactttttcaaaattttgttcaaaacaataattatataaaaataatgttattagagggttaatgtttgtatacaaataaaaaaaattacttgtcttattattaaattttgaaatgtaaattttattaaacaaagtaataaagctaaatgaatataacttgtcaggtaaatatattaaaaagcaccttataaaaaaaaataagaaaaaaaaagaaagaagaagaagcaagattagtttatactactgcaaaataatactttcatatttaaaagtacaataataacatggagctctaaaaaataatttattataaaagaaaacgaattgattttggttgagattagtacttctttgatgaatgagctactgcggcaagctttgataaaat

SEQ ID NO: 395277 - DNA, 582 bp, Cannabis indica
ctccaaatgtaacccaaacccacaccttcttttccaggatccatagctgcatcacaattgacgcagtacactccttctgggggggccaaccacctgcctagatcagtcttaggttcggtcttttcagtacataaggagatgttgtggttgttactgggggtagttattcaaaacccactcaataagtcgagccccttctaacacaggaagattgttccaacatttgtttcggttctcccaaatggcccaaaaaattttaatcacttcctcaaactccactttggacagcttatgtcgaatctccatgagtatatcaaacatagaatggctgtgacaatctttaataagcttatagtaaggcatacatttccaaattagtttagccttagtacaagaccataaagcgtgagggagagattccacataccttccacattgattgcaaaggggatcaattgacatgcccttatgaaccaagttgagtttagccggaagccaattatggcaaagcttccaaccaaaaagcttggagtccggggggggggggggggagttgaagttgccaccacattttccaccacg

SEQ ID NO: 395278 - DNA, 656 bp, Cannabis indica
atatatatattattatttgataagctcctttaaagtagactataccaaaaagcaactataaacttcaataagtagaagtaaagctaacaagctcataatcctattattagttttttggcttcatcttactaagtcaacctaatccgtagcctaacattatgcagcctactaatattatcaacaaaacaaattgttatttgcctattctacaaaaaggcttaggcattcattattggtcaagattatttataaaagtgtaagatcattaagatttcttctctttagttgttctctgtctcgctcttgttcttcatcttttatacttcttaggtggtgtttggttggagataataaaatggagtggagtggaaaggaacaattttcattctattcctttgatcggttgcattaaagtattggaatgtcattctaattgaatgtcctttccaccattttggtggaatgactattgaaatggaaggataaaccattctaatgtaacatgagaaaaaaattaatgatttttttatcaatttttttcaaaataattagcatttttacctccttaacttacgacactacctgattttgcctcttaaaatatacagcttgttaaaaattcctcctaaaaaaaacagttacataattatgcccct

SEQ ID NO: 395279 - DNA, 604 bp, Cannabis indica
ctaccaaacttgcttctttggctagaacaatttctccttggggaacgtacaacccatcaatcttttcacctttcattactattaaagaacctttggtgatccttaagcttttgttgcatggaattgtatatgtaaccctcatcttcaagctcacctagggatatgagatttcgtctcaactcttgaatgtgtcttatgttcgtaagcactttgattccaccatcacactttttgatggcaatctttccagtttcaatgaccttgaatgaatagtcatttcccaatagaactttacccccatcaattgatttataatcaaaaaataattctcaactcgaacacatgtgataagtgcattcagagtcaataatccactccccgttcattgaggagtctgagattgaaaatgattctccatctgttgagccatcatcactatcctatgtgattgcaactgaacctttcttatggtgatgatgcttgttgtccttcctatctccattgtgatatttgttgaagccttgttactccttgtacttcttgcaaaatctttgcaagtatcagaccttccataaaagtaacactttcaagtttccttctctct

SEQ ID NO: 395280 - DNA, 1477 bp, Cannabis indica
acgtaagtatggtagtatatatgtgccctattaagtttggggtggtttggacaggttttggtagtgtttcggtgagtgcgtaaacttaaatcacattttttgtccctgataaaccggtcagccggttctagccaactggtttactgtttcgggcagccttggaaaattaagaatcgtatttttgccattcacttgagtgtctgttttggacattctatataccgttttgaagcttacaacgagatctaccatatggtgtatatttagagccaaaatgtaagttttattttagtgtatttgaactacgagatttgataggaaaccctaggttagcctttgtaactgttaaccagtgttttgggataaacacttattagtttattattgttatgacttagggcctggaatcatcgatcgtactccaagtaggtcggccaacatatctaaactggaacttgagataagaaaagtatattgtactacatagtacgttgtacgtaatacaattaatatttttatgaattgattaatattgagatatagttaatattattatataatgaaaagatttattggctgagtattgatgatgtgatgatattatgcatgtgatatatgagctcaccttattaggtgatgcaatatacctgacgacgtaccgggcgtaggtacgggcgtcggtgacatatgatgagtaccgagcataggtacaggctcacctgattaggtgatgcgattcttctggcgacgtgtagatacggtgtcagtgacatatgataagtaccgggcgtaggtacgagctcatctgattaggtgattactcctggcaacgtgtagatacggcgtcagtaatatgaaaattgccaagttatggcatggtatgaaaccgttgtcgggtttcctcttggtgacgtgtaaatatggcatcagtgacatatgatacataccgagcgtaggtacatgctcgtctgattaggcaatgcgatatattggtgccaagttatggcacgggttcacctgattaggtgatgtaattataggatatatgggtgtaggtttttagcagaggctcacttgattaggtgatgcagttatgcgatatatggtgttaggctatgacacgggcttgcctgattaggcaacgtaattcaagattatcatattaaagcatcgacttgcttgattaggcaatgtgatgtaatgtagatggttactttatgaagtaacatatatataatttatattttaaaatgaatatgattattattggtataatggttttgtattactagatatctgtatactgatgtttatttatgggagatgccagtagtaatttggatttcatcttatgaacaatgcgtaatggtttgattcttattgtgtataaatgataatattctaataataaaatatataatcattattattgcttttcttgctgagtctttgtgactcacgggtgctatgtggtgca

SEQ ID NO: 395281 - DNA, 626 bp, Cannabis indica
attttacaaaaaaaaaatgattgaactccttctatttttattttattttttttttttgataagaaatcatttacttaaaaaaactaaaccaaaatcaacaaaatatagtcaagctctctaaaaaaaataaaataacctcaaactcgaatagaagtataatataattcccttataatttaactatataatattaaattattaaataagatattgaatagtataaattaccaaagaaagtgtgaatactaattatgaatattttgatactactgacacgaactatcaattttttatactatcttaattgtattaaattatattaaatgcatcaccaaaaatagggtacccaaaaaatatgccaaagtattcaaaaaaaaaattaaataaataaagaaaacatctttcacaagtatcacatcatttttctagagattaatcacatttccttatatataaggaaactagtaaacatcccgcgtttcgcgatggatatataaaatattttaaattatatataaaaaataaattgtgtattttaattaataataattactttaaaaaattatattaaaattttaactttactattaaaaaattagtgacataaatacttaaataataaattt

SEQ ID NO: 395282 - DNA, 1297 bp, Cannabis indica
aaatttttttctatttcaaatattaatattttaggttgatcttaaccattgataaaataaaataatacaaaaataaaaaatactcattttaggttgatcataacaattgatgattatctaatgatgaaaattgactcttcatgaaaattatcaatttttgatgtttgaatcttgtccgctgaattatttttcacttaagctctggaaaaaattgcaactatcttgagcacgactttaggacatgaaatcttcaaaattgcaatattagatgtgagacacagcttgataaatctttgaaatagctttaaaatacaagttaaatgtcatccataggatcaatatttatgtagttatggtcgttttacggaaggctgtactacacccagtgactaggttgacatttagcgctcagtttgacaccttggcatcaacctgaatgttgggtaagtagaaaaatgtcagagacttgtattttttgatgcttatgtgatatgttgacatcatctaggcaaattatttgttctagtgaagttgttcactagttcttagagatgtcgatttttggtaaaatcgggtagaatcaaaactctctgattttgttgatattctagcttattagaagggtgaaatatcaaaatttgaatttgacatgtaaaaagtcatagctcttttttactacaaaaaaatagtctgatggtggagatggaataggattttgataagcagaactcaacacaccaggccacacgttaacctgggcgatgggtgcttctcatattaatattaataacattgataacattgaaaagtttaaataaaataaaagtaaattgaagataaaaaaaaaattgagatatgtatatgtatacattaaattgttgagataacctcattttgtatgtaagaatataactgaaaaatataatattgtgaagtcttgatgagagagtgaaaaaccaaaacataaaagatgattgggagtaaaaaaaatagtaaaagtagattagatgtgattgatatactaacttttttaatttgtagcttaagaatgggaatgctacatgatagaaatattatatttatgtatatatacatatatatattcgttcactatatatatgtttatataatattgtcttttcaactttgtaagttgtaattgatatattaacttatatgtatataatatttgtacttatttacatcttcttttatttttttttttttttgtagaaagaacctgattccattataataaacaaacagtacaagatacagttatgtgtggaaagatgaa

SEQ ID NO: 395283 - DNA, 421 bp, Cannabis indica
tttttttttttttttgttagatggagcagagtgtgttagcgtaaccaagaaaaggagatcctttgagggtcctattaggatcttaacccttttgacactgactcttctccaaactcatctctctctctttcattaacaaaattacaatataaccttttaaacattttaaatataatttatatttcataacaaaggtttgatggtggttggtgaagagagattaatcaccataattttgttgactcaatttatttataactaattagaatttatatatatatttaactggagtgtacaacaacacttgagcttcactctccctacatatatagatatactatactgatcatatataatgaggtgtgaagcataagcttctttcaaagggtcggccacacacacatatatatatatatatgca

SEQ ID NO: 395284 - DNA, 630 bp, Cannabis indica
catgtaactcccttcctctttctgctctaccaaaaatcggtcgttgttggcattgatggtccaaggggaccctgaaacccagttctccgattatgaaaactcaagaacctgaccccctctctcctcctcgccatgaataagattttccctctttccctatcttgcattttccctatgcaatgacggccaggacaaagagccgtccacggtcatgggtggtccaacaggaccacgggattgtattccctaggtcctaaaactaaaaaccccaattcttttgtgctttggctggtcatgaataaaaggaacaataattttagaggatctgtgccattggattcatcatcaaatcagctgagtgttttgtatgtagtgaaaattcaagctaaaaatcccctttcaggtgagctccaggctctagggttgaacatcgggcgggtttactgggtttcgggttcacgggtttcaaattcaaaaaaaagaaactgaacccggacccgaataaggcatgggttggcgggttggcgggtcacgagttggcaggttttggttgggcggattgaccgggttggtgggttgacctggtcaactctttaaaaaaaattagtcaaaactaataaaaataacaat

SEQ ID NO: 395285 - DNA, 893 bp, Cannabis indica
aaactccaatctctagaaccagccggcagcatctgaattctatctagtttcacctccaagtctttgataacctcgtccattttcccaaattgtgttctcctccactgaaggagtgccattcttgtagctcctatctttttaaaaactcgggcgggagcccagagatggcgcacagaatcccaagcgttagccacaacaagattacttcttacatccctcgtccaactctcctcaaatttgaagcacttcttaaacttagccacagtcccaaccgtatcaagacataacggtctatgatcagaagtactcgtctggatcgagcagagaagagctttggggaaaaggtgaagccaagcttcattcataagtcctttatccaaagctgacttcacatggccctcacccgaccggtggttatcccaagtcatcatgtcccctttgatatgcatattgattaggccacgagactcaaccaggttagatatgaaagggataaaagggtctctacccactgacccctccctctcagagggattaaggacaaagttggtatcaccaaatatcaaccaaggacctccaaatctatcccctaacaccatgatctcactccaaaaatgcttctttgcatggttgtaaggaggaccatacacacacgagagaagccaagggttggttggggggtccgaatagacaatgcccgaaatatgattacgagagcaagcgatacattcaaaacaaaaaccatccttccatgctaaaattattcccccagcattaccaatgggcggcacagagatatgaaaataaaagtgaaaagcttgcaaaatacgtaccaggggattggcatccaccttgagctcagttaaaaacacaaaatccggagagcgcgatct

SEQ ID NO: 395286 - DNA, 1492 bp, Cannabis indica
gtaaaaaataaggcatttattaaacttaaaaaacatagataattagtttatttagataactaaaactagtttcttagtgatttttccgactatgccaatttcaataattttttcagcgcagacagtaatttcgacgactttcccagcgccgacaacaaactctggcaccttttccgacaccagtgacaattccgacaatcactgtagtttcatttattttatttttttaaaatatatatataaaaaaaattaatattttttatgtaattaatccatatatatattaagtttttattttaaataacattattttttttattaaatttctttaccattatttttttttcatatatttatggaaataccccattgagatttccatatattgattctgcaaagcccattcattctgcatattttatctaaatcgagttatcttgctttcctttaaggcaaaaacaattttacaaaagtatatccttaaaaaagtataaaaaattggtaatattaattaatttgtaaggttatttttacacgtggtaacaaattgggtagcagagcaggccaacaaaataaaagcattgaatttcaactttgttttcttgtcgatggtcaaaacttatttttaatcatcaccacacactatataatagtactagcaattaataaaaataaataaataaaatcaaataatgaactactaaccttttttgttaatttttatagtaatataaagaataaaaacagcaacaaccaaatataaataattataaaatttaatttataaaatttccggctgactaaaaaaaattaaagaaaagttgaagtggagacaagtgtaaattagatggaattgaagtatgtttaagtttaattttatcttaagttaataattattaaaatttgtgtttgaccgaccggtataagagcaatgttagaagtacttatatatttaattagatgaagttgttgtaattagttggtagttaaaagttttttaagttttcaaccttcaataacatgaaaattaattaggataaaatatcaaaatatatatttactatgctatattttatttttttaaaaggaatgtcaattttattaatcaattaccttcaagctataacaatagataaaatataagtaggagtagagtttttcactgaatataaaatttgaatagaaataaaaatcgcgagcaatacagtaagatgtcttgtttatagaatatttaacaaaaattaaaataagaaatttcaaaaaatctaacaaactcctacactccttaatcactggactagcaaccattaagtaatttgtctcaagcagagaacatcaagacactgtttcattttgatccaacttaaagcttctttgattccaactacctccactaaagaaacattaacctgcctttataaatgtaacagtcagtagtcccgtgatccgtaaggagaaataccgggtaagctgtgcaatcccacatcgcctg

SEQ ID NO: 395287 - DNA, 606 bp, Cannabis indica
cttcaaaacattaatgaagcctttagcagcagatatcaaataaggtgtttccaaataaaacctttttcaaaaacattgatttaatgaatccacaagattattattattattattattattattattattattattattattataagtttctggggaaacaaaagcaatggggggtgtcatattcatattcatatacattcataaatggtttttgtttgtttttatgtgaaatatagttataaaattagaggatgttaaagggtggtgtgtgtatattggtgtgaaaaaaaagagtggtttggaaatgagaaatatggttccctagattagataggtagacactgcatgaacctccctcagttacgtaaaaatagaaagaaccaacttactcctatattttagtgtttttccttaatcacatccaacaaaaccatttacatattaatattaattattatataatatatatatatatcaataatacaagtagatttgtggatttattttttagtatctagagaaattattatatatattgtgggaattaccctatatatatatattatttttttaattttttttttcaaatttacggtttgggtttct

SEQ ID NO: 395288 - DNA, 1036 bp, Cannabis indica
ctcggcattgttccattctagttagctccaaaatcatacaggatactggcctatttaaagtctttatatcacattctgatgtgggagtgtccgaccccactaaaaattcttattttttactccgtaaaggcctgtcgtgcaaggaagcgaggtgcaagtattactcgtaagtatagactcgtaagtatagatttttttcataaacttggttttgagttttaattcaatgtacattggtcatattttactaattttatttttgttatgttaacagctattacaaagagacttattccaactcctgagatcgagaaaaggcacaggattcttcttggccttcctttcggattgcgagcaactaacttcttgttgcacgagaacaacctgaaggcttgcgctcttctcggcaaagaccaatctactaatgacttcaaggtcccaaagtttttagattggcaaaaagtgtcagtacctgctgacgaggaagatagagattatgtggttcgcaaccactatttgaagaacatgaccccttagtaagctgaagatgatgcctcccaaaataataagagaccatggacgtcgttttttctaaaaatttgctgacaaatataaagttgatccaccaagaatacaattttttttgctaaggcaccaagaatacaattgtatgtatggtggttcttttttttcctttaatttgttttgttgattcttgattgattaatcagtatgtcaaattaacaagataatcataatgatgttaaatgctgccgatgcctacattgggataaaacaccaaaataataataataacaataataaacatttatatatataaaaaaaattatttaggtatttatcaatgtaataaacaaacaaacaaacaaacaatataccatgttgggaattatagggttccatctcaaaaccaattggtgatgagtggagtagctcatgttcttatatatggctcagtattttcacattagctatttttacttctaccaatcttgaatcaccttatcataagtag

SEQ ID NO: 395289 - DNA, 791 bp, Cannabis indica
acaattcatatattggtgtatatattgtgtaacttaataattcaatacattacaatactctttgtatacagtttcgtaatattgtattgtagacatttcgtatagatttctaaacccaacccacgcttaaacctaacttttattaagttagggccgaattataaagtagacatctgtacaatctagtaacgttaactatcactttttttttgtttttttttttttttttttttaatttgagtattttttttattcgtaaaataaacatttgatttgagtattaaagtaatacatttgctgaaaactctctttcacaatctaaaactaaccaaataaagcagacatatcaaacacatggagattagaaaatgtaaaattcacctaccactatgatcaataaacccttctttccaatctgaaaaaaaaaaaatactactcagaacaacttgtcttgtatttccaatttaatattggtggattaattaataacaagttccaacctgttcatttaaaaaattaaaatattaacacttttttttttgatattgtataaaaatataacttatctacttagtttctttttaataaaatgtttattatcagatttcaaaagattttgggaataaaaagaaaataaaataatactttagagttgtgtgtcttttgtcattacatccaaattacatcagtttgtttgaaattatgcaaatcttcttagaaatgttcgaaattaaatttatttcttgagtgaatatttatatatattaaaatgttatatatttatatgtcca

SEQ ID NO: 395290 - DNA, 939 bp, Cannabis indica
tccacctcatctaattcaagtaaaatgtctacttccaatttcaaattgtcttcagaaggcaccctacgttgcacttccatcgagaaattgtttaaagtcttaattttctcctcacattccaaaatgagttttattgcacttagccaagcagcgacgggtattatccaatcgggtaaccagttgtaagctcttggcacccctcacatctatagcccacgcccgttgaatgacctctttgcaaccctcatctctagaccaagcatccaaatacctgaacggggtatgaaaccgctcacgatctaggagtaggtccacaaccaaaggagcatggtccgaatccttaatagcaagagcaagcacaccagccttcggataagacatcatccactccgggtcacaaagcgctctatagagtctctctttgattagatcctggaaacgcctaccgtttgtccaagtgaaatgattccccagacaacccagatccactcctcccgtggaatcaagtaactcattaaggtcgcttccatcactcgcctccacttcccgacccccaaccttatcttgttggcccgagatagtattaagatcacccatcaagagccaagggtgattcaaggctagaacctccaaggttctctcttcccaaaactctttcctcgcagctctagaaggcgggccattataagtcccctcccccaaacttagaatacacattgtccccaatgtgtcatgcaaaacaaggaaagggagacttacctgcacccccatcagaaggggttgaacttcaatactacttaaaattagatcaagtccaccccttgcatccaaaagagccctcgtaccgaatgaagaaaattgacctccaatattgttaatttcagagttttgcacaagagtaagtccaccttcagaactaccacacatcaatcttttcca

SEQ ID NO: 395291 - DNA, 1165 bp, Cannabis indica
gtgtttcttctagtattaacatgcaaggcagttttgctaaaaagaaaagaaaatagaaatgtgcttccttccctattttatgtggaatttattagttgtattgaatgtatatgtgtaggttgctttggaaaggtacaacaaaatgaaaggcaatgctcctgaaagattggtttctggttctgatgattttactatgtttttatgggaaccttttgtcagcaagcacccaaaaactcgcatgacaggccatcaacaggtacagcgtattttctttttcttttttaattttgttagtgttattttattttgaaaaatttagcagttaacatactaatttggtgtagctttaacataagactgttacaatattagtttgattatgttggtttgttgctaaaatcccggaaaaagaaagactggttagcgataactcagttgactttagaatcattttttttttggagtaatcacgaagcgcatggaaaaatttattggcatttgatatattatgatgctttcgtctactatattgttcattctttttttcgtagttatctttgttgtcctactcatgctctctcccactatgcttgtctgcttttgcgcctgtcctaatctcctgaaatatgttgaagatcatactagctcatctttaatggtggtccattgttcttatctctttttaaatatatgtgtacgtcagtgctgtgctcatatatatatatatatatatatataaatatattaggtaagagtaaggtgcaatacacatatttatttagttttatttcaaaaatttattatgttattttagttatattttttaattgtcatattaagcttaaaataaataatgatatgtataatattagaatatgttatttttcaattaaatctcaaaagaattcactaatattttccatgcgaactcttcttctaatctgaaatattataattttttaccacttcaaaagtagaaaataatataagttaataaatatagacactgtagaaaatagtgattcgaattgtgtattgatttcatagaataatacatatttatatacaaagttaggagacataaaagggaaactaccaaaaaataggaaactactaaatatctactaaacaactaattcttttacagctaatatctaacactccc

SEQ ID NO: 395292 - DNA, 738 bp, Cannabis indica
atcatgctaagatacaagaactttaataataagttatattattattctcttaaaattgtatttatatgtcataattttaaatgacttatttcaacattcatgaaattactaaattaatttaattcgtattttttggtttaggtatcaacttttcaagtcgaagttcttgctttgttagtaggattaagatgggctcatgtgttttcattctcaggtattaaagttgtattatctagctttcttgagacacctttctctttttctcatgttagttgtacttttactgttgcggttcataaattagagaaaacacaacccacaaaaaaataagaagtgcttttacaatgattcgagtagttctcaatcttccagcgatagtccaccacattaagagaattgataactactttagaatcactttctacaataataaaattgcaccccttctcggttgtcgttctaaagctaagcaacaggtcgcagcctcaccacaaagtgtgtcagagaaatcaagttttgtcgtaatcatccaacacaccttactctgattatctttagcaacaacagcaatgcacatattgtacattcccactctaacatcacaatttagctcgatccaataaatcagagggtgacgtcatacatccagtcaagtcggagagtgaacaagagaaagagaagctctataatcatgccccctgaacttttaaggtcgttaaaaatgccccttgaattatt

SEQ ID NO: 395293 - DNA, 639 bp, Cannabis indica
ttagagctcatatctcgaccctgggatttcggttggggatcttgtccaatgctggaggttgagctgtcttgtgcgaggcagagagaagactgagcgaagagagaacgaggcggtgagaaatcaagtcagacattaaaatttttgaagagaaagtgagcttaaccttaattgggtgttttagtcgcccgtcaccggagttaaagaagacgagggaagcgattagacttagggttttttttagcgatagagaagggaagaagaagagggaggcgatttttttgaaaatttttgaggcagcctcatctgctacctaaaagggaggggaagacttagggttttttttaaagaaaaagagaaatgcaatattatataattgttgtccttttaaaattttttttttttaaaaaaagccatgcgtatgtgataggtatgtaaactattaagtataaattttgttttcttatatatttttaattaatttttacagctgtattttttttttaaaaaaaatagcattatcatatagtgacacgctaagtgagttgggaaatatttatccaatcgcatttggcgtgtcactataggtcatagatttttaaattaataaaatagaaaattttgggttttactctttagtga

SEQ ID NO: 395294 - DNA, 577 bp, Cannabis indica
ttagttttttttttttttaatttttctaatatgtatatactagatggatattttgtattatttgaggttattaatacatactagatgaatattatattatttaatatgattagttttatttgaggttatattttcttttacaattatcatatgtaaatttacgatatatagtatttaattgtgattgataatcttacaaagtatataataatttgaaaaagatacttttaagtgatatgttgtataaagggttaaggaataaaagataaattcaaaatggcagtaaattatattaaaagtaataatatgggtatgaaattgtaaataaaataatgtgtaagatgttgatgttaaaatttttcatcactcataaaatatgcaataacaagattcaattctataaataaacatattacataaaattataagtgtataactatagatttaaagaaaatttttgttgattcaaagagacaaacttaaatagtagaagcgtatcttaatccttagataataatgatcttaattcatcttgtagagataatttttgtggtgattttgggtaataatcttctaa

SEQ ID NO: 395295 - DNA, 1616 bp, Cannabis indica
aaaaataaaaataaaaaagttccttaccaaatgtgttttctttttattatattattattaaataccaatataatgagaaatttattttaattacaaatcaaattttccagttattatgggaaaaatgatttgtatatggttgatgaataatgatgagtagcttgagctgaattagtaatgacccttagccttattatattaaataataatatttctctttaatatttcttacaagagacgccaaataacacttcttgaattgtacaataaaaaatatctataaaagaggatttcatgtgccatattcaaaaccaatttcaaagaaaccaatcctatagccctacaattacttaaaggcaattttgttgaatcttggagtgagttggaagctgtacttctagttctaattagttataaccattaatagaaatttataaatatatatataatatatctttctttaaaaaggaaaggaaaaaaaattatctttttgactaaacctaaaaattcatcatgaaagttataatagcttgttattatcattattttttatacaatagatgatataatagtttgttattcattacaaagaatagtggtttattcttttaaggctaaaatcactttaacataaccaagcaaaaaagagttacactcctttagatgaatgtggacataattatatatataatatatacttaattaagttttatattctatcttgacatatactatacaactaatgacaaaattaataataaaaatagaaaggtgaagatttgtgtgagagtaaatcaactagtgaaccatagagatgtgagaagagagttgagaaagtttgggtgagacacatgctcatgaacatgcatttaattatttataaagaaatatccaaccctaagcaactagctgctttttatattttttgatccttatattaaaatttctattttctaataataataataataataataataataataataagatactacatttcctaattgttttgaagttttgggaggcaaaggaaagttccatttaattttatttatatattctattctatgtaagttagctgataaagaccttataccattcgagagaatagttagggtaccactaccacctcattcaatatattttttttattctttggtatttaatatttgtgaacacgtttaaatatttgtccaattgagctttttaggttgtgcatcatttttatggtatgtttattttaggagaataagaatcaattgtatagtatttaaaattaggctaattaggattgttagcccccccgaattttgacatgtaccaagtcatgcctcctgaacttttctgatcgttaaaaatttttcctaaactattcagattgttgtatttaaagatttttgtctaattttagtaaagaaagtttaacatggatgaaagttcagggggcatgatttggtacatgtcaaagtacgaggggcgtgatttggtagatattaaagtctgaggagcatgatttagtacataaaataaacaatcactaaattagtaaaattgaatgaaattggataaaagtccttaaattcgataatctgagaatttttaatggtcatcaa

SEQ ID NO: 395296 - DNA, 746 bp, Cannabis indica
atatgtaatatacaaacacattttacattttaaaatatagaacatgttcgttactatgtaattactaagtagtgtaattaatagagtagtaattacgtaaagtgtttggatatgaaatgtaattacttataaattcctaaaattttgtttaacaaattagttagtaaatttaggaaagtaattaatattatttagtagttgatatttaaaatgatcattttttattaattacattcaattttcgtaagggattatttgtgaagtgtaattagaacctctcaattaccgagaactacacagttttcaaatgcacacatagtataattatcactttgttaattacacattgacttccaaacataccctacatgagaagagaatgatacatgatttcagttagtagaaaaatacctgtaatttgagggaggggattccaccacttctattttcaacaataagttttttgtagtccatttcaaaggacataattctctgtataaattggtgacaaaattgacttctcagctgatttgaagcttcttgagtgaacaatgtaaatctatcataacccttctcttgaacactaataatttgttcattcatgtcatcagaaccaatgccttcataaatggctctcaccatttttgggagtaatatttgaagtgatgacagattggttagaatagaaatctgttgttggagtgatacaccaaaattggttaatggaacactattttcaatgacat

SEQ ID NO: 395297 - DNA, 1517 bp, Cannabis indica
aagtacaactctgcctgctagtgataaattccatgagctccatgttttgatcctggcagtcatcttctctgctagtacaacacattctttccccgagatccttttagcacaaatagggataccttaatatttgaaaggtacctctttttttgctgaaacctgaactgtcagttatacgttgaacctcatgctcactcatgccgcaataataaaatgtagatttgtgaggattcggttgtagtccagaggagcaagaaaatagcttcagaccttgtaagacatagtatatactcttgaagtctccatggcaaaacagaataacatcatcaacgaacatcagatggttcagtttcaactcagcacatctgtcatgaaatttgaattctggtttggatccattcttctgcagtattcttgataggtactccatacctagaacaaacaatagaggttacattggatcaccctgtcttagtcctcttttcccttcaaagcatccatgtaatgatccattgaacatgagagagtatctgggagtgcgcacacacaccattattagcttgataaacttctcaggaaactgaaaagcttgaaggatttcttccaaatagtcccagtcaagagcgtcatagctttttgtaggtctaacttgatcatacatccaggttttaagcctttccttccataatgtcttatcaaatcctgacagatcatgatattgtgtgctataaacctgccagttatgagtcctccctgattttgagctattaaataaggtgagataactttaagcctggagcaaataagtttagtaaccattttgtatagaacattacagcaagtaatcgatctgaatttactaattgtgttaggacacttacatttgggaataagtgtaagaacagtagtgttgatctccttgagtatctgtcctgagtgtaagaaagaaaggatttcttcacttatatcatctcccagcatctcccagttatcttggaagaataagctagtaaaaccatctggcccaggttgattccttgaatatcaaacaatgccctcttgactgcatctttggagaactctttcagtaagaattctgcttgtgtattggaaaccaacggaccaagcttcatgacctttggattgaccttcttcctaaattccattttagaactaagtaattggttgtaaaatgaaataaacgcattagaaatcttcttttggtcatctgttctaaaccctgttgatcttcaataggcagaatgctatttagtttcctcctctccttgatactcgcatgaaatatggctgtgttttcatctccttccttaatccaactaatcttggaattctggtgcaggaaggaatgcaatccttttagcaattgcccatatttttgtcttgctgccccttcttgttcaatcaattcctgccttagaggatcaccttgcagtttcacttgggcctcaagcagccccctttttgcttcatcagtcacctcttgaatattagagaag

SEQ ID NO: 395298 - DNA, 816 bp, Cannabis indica
aatttgtttttaataatttacaatatcaaaatcattaatttaaattattaattgtgtgtgcgcgtattttttttatatgtacataaattatattttataaaccttaattttaacactattacttatttaaaaatttctaaaaactagtagaataatatgcaacaacatgaaattattaaattataaatttataatctttttgtgtgccaaaaggaagaatggctctactaactgacccatctatcctcctaataaaaagtttggttttaaccctggctcaaacaagataattatgtcatattagtgtactttggatgtttcacatctcaagattaggcacaggtgagcacattattgagaaatatttctctatatatacatgagggaacgcgaagaatacaactataatgctcaaattaaaaaagggtattacatcatgagaagaagaaaaagaatattacaattcttcaacaaaaataattaatacaacataaaaaaaaaaaagaagaattgagcttcaaggacctttattttaaaactcattttgtctcttacacgaatatttaagaaactctaaaaatacttttaagagtttatctagcctcatatgcttagccaagtatctaaagatagatttatcatcataaggttctaaccacattgttaattctatttttgacatatttaattgacaaaaatattttattatttaatgtattttcggctggtatgtattaatatggtttccttatttgtgtgtatctaaacttggaaggaaagttatctagttttcctatttatggaaattgaggtaaa

SEQ ID NO: 395299 - DNA, 782 bp, Cannabis indica
agcactataaacaaaaacccttgaaaagagcaattcaaggaccaaaaaacaaacttaaaagagaaatgtcagtaagtgttaccccaaccgttaattgaagtaataatgtatggcttctcaaaggtattattggttcttaacactatttttggtgtcacactgttattggtgtaattaaatatcggatcctatataaataaaaaaaataacttttagaaaatatcgataaccaatcttagggtactacgtatagaaaatactagacactactggtgctgacgcaaaactcgtccttataaggagaaacgataaggcacaccttaagttatcaagcatcacaaaagattggtatactgttattgatgctataccacctacaatatattacatcgatagtgttggataatgcttaataataatactttcagtgggttcaaataatttgatttggagcaagcaacaatacgttgctcgcactgcattttctctaagtattaatttttattggatatttttgctttcaattatgctttgttataatctcgagaatgattgaattgaaagtatgtagctcatatattgtgattattgtctttcaagtttaattgcttaatgacaatgatattttgttggcttattattaagcatatttagtgacactaacttattttaagtagtgtatgattaatttcattggttcatttattaagcatcacagtgtcagtgaaattgatgactgataaggatattatgttattttaaattgatcacatgttgaacat

SEQ ID NO: 395300 - DNA, 1025 bp, Cannabis indica
tgaaagagagcctttttgaagatcctacattgtatagaagcactttaggtgccttacatatctaagcttgaccaaacttgcattcattgtgaataagctcattcaatttctcaaagctcctataacattgccttggaagcctacaaaaaattcttaaggtatttgaaaggaacagttaatgagggaatgttaattaaacctactgcatgggtcactcttgagtgctactcgaatgtaaattgggcaagttgtgttgatgatatgaggagcataagtggttatgtcgtgttcttaaatggcaatttaatttcttgatctgctaagaaacaacaagtggtggctagattaagtacaaaaagtgagtttagggctttagctaatgctgcagcagagctcaaatgaattagttctctactaaaggaactccatatccccctgtcccaaccaccaatcatctgggtgaacaatcaaaatgttgcagctcttgctgcaaattctgtcttccatgcttgatcaaaacacattgaaattgatctccattttgttagatcaaatcatggaaaattagctttctgtcagatatgttcctgcttatgaccaagtggctgatgatctcgtaaagtctttatccacaaattagttctcatatctcaagtccaaacttcaaaatggttgttaccccttttcgtttgaggggggatgttaaccatgaagttagttagtagttagtttacaagatagttaattagttaacattaccattgttagttaagtggttagtttcttgattctttaattcaacttgtagctagttttgactataaataaagagcttaaaggagtgagatggtgctaattgtcattttttactccactttgatttttcgtttggttttctctctgttttcaaagttgctctacactagtttcttacacttgagtggatagatacaattttttagaaaataagatattgaatattggtgtctgtaattttcaaaaattaggtatttattagcaacaaa

SEQ ID NO: 395301 - DNA, 518 bp, Cannabis indica
tgggttgtctttttctttcctttttttacctctaaaaaaaactgcttcaaaaagcagattatgatgctattaaaactgatcatgatcaaaaactgtagaaaagaaaaaacccacaagacaaaaatcaaagcagataagaaagcgaccaaaaattaatttttttttttttttttgtaaaaaggataaagagcagaacccacagtgcattcgcatgctgtatatcagcctccaaaaccttcaaggaatcttcagaagaagacctagctaactggtaatacatcatatccatgtcgttatctcactctgggtaacaaaaaccaccaggaaaaagaagtagaaggcgaagaagaagagcccaactctttcccacaggctcctcagtagagaaaaagaaaaacacacacaaagttttgccttttcttttctatcttcttttttccaagtgaacctaatcaccaccaaaggcaagtaatgtagaaaagcgtagagaaacacaagaaagagagagagagagagag

SEQ ID NO: 395302 - DNA, 1116 bp, Cannabis indica
aataacaataatgtacatctaattaaaatggtaaattaaaaaataaataacccacgtttctaacaaaataaataaataaattcaaagtacaacacttttaatcaaaaaataaataaaaaatctggtactttatttacattttctttcacgtatatataaacaataaatattgtacatctatatagtcgaattaaaaaataaaagttccacgtttctagtaagaaataattaattaataaactcaaaaatcgaacacttcatcttcattattatgacacttatatatatataattattgtccacctaaacatttagatcaagtttagtttgaggtaatgaaattgatcaaatgaaataattttcattttatttatttatttgattatattttaaaatattaccttaaatttaaaaataaataaactcaaggaatataataaataaatgaataaactcaagtttaaaaactttattaatttatattttattacatgtgaaggcttgaataaatagataaataaataaaaggaatattacttgtttctaacaataaataattatattttaaaaaaaaaacaataaataaatataaatttccattagaaaaacaataaataaataaaatatgattaagcaaaaaataaataaataaaataaggtttatttatgtacataatcatttgctttcgtcatgtgtatgtaacatgacatcattctctcactatcaaaaccattacaccaaacagtatttatttggtaccattagatcaaaaaatactgtagtgattggtgaattttgacatagtaataaaatcttgaattggtaaaataaggaaattgttaagaatttgaataaaaaaaaaaaataacaacttaaattaaagttatcactattggtaagggtggtctattttttatatctcctcaaattactattttatatcaaaaatctcatttattatctttttcttctatacttttaagtacatatcagatcatattgtattttttatcaattatcgtactactatcagtgtgacagttagtagtctcgtgatccgtaagggaaaataccgggtaagctgtacaatctcacactgcctggggaaggtcaag

SEQ ID NO: 395303 - DNA, 414 bp, Cannabis indica
aaagaaaaagtataacagaaaatggaatcaaaatattttccttttcctattaacaaagtttggaataaaaatcttttgtaagtaaggaattggaatttggaatgttgacaaataaaaatttaggttgcttttacagcattctcttacattatttggcggttaaattctcttaattgtatttaaaatttattaatagcaaatattactcaataatacactcttacccttgagttttattattcttggtgtggtagttgagatattttctttaaaaaaataggaagaatactctatatactgtttttttaattttttgttattaaatttacagtttaggtttataaagcggttataacgctagttacaataggggattttatgcaattttttgttgcgatttaagttgcaacacta

SEQ ID NO: 395304 - DNA, 696 bp, Cannabis indica
aagaaaaaaattgaatgataccatttgaataatgtgtttttagctcaattggttggataccatatttttaatcttgtgtttaggaaattagatagatctaaataattccttaaacctaattttagttaaacttattttttttaggtttttttttttttttttatgggattataacaaactatatatacgtatataaattttctaatagaacttaaattttatctatttttctatataatttcagcttcaataataacaaaacaggttaaagtgagtcaacataaatataatacgattttgtatgggttgagttagaattgagaaaattagatacgagtaaaaaaataaattaatacacttaacacaaaatataaaaacaagtcaacataaaatatgacaccaatacaatactataacatattttgatagtcttgcatcttactgcaatgatccttaatttgtggtagtggtgccaatactaaaagacacactatgtgatgagtaacctgacaagtggctattcaatgatggtgaggtaataaaagctatttaatagagtagaagaccaagtgaagtaaagacatggttttaggcagatttctagggtgatatataataatatatgagcattgttattaagtattgcgattgattagtgatatttctttaaaaagtattatattaaattatatgaga

SEQ ID NO: 395305 - DNA, 935 bp, Cannabis indica
gaggtatttatacccaaaaggcaatcaacgtgaaaggatacagaagaccatgatcccacttccagaaacacaagtcttcatccaatggtcggggagtccgaacaatctacgtgtatccttgcaaataatgttcctaagaaccaagacgtagatcaatgatgaaaatgctctttttttttatttttgtgctaaaaaatgaacaaccgtaaaaaatatagtaattttttgaaagcaactcctcgatagtcgtgccctatcactcacgcgcgacttacacgtggacatatcatcatcacacatgaaagcttccttctgcgggtgagaagtattcaaaataccataatttcattccttaatttccacatgtccaaattaagagagtgatgcaagcttccaccacatccacatcattctggaagcttggggggtaaatttatctgtatttccagcattagacatgtggactctaggttagcacccaagacccgtcagtgggaccctcaacaatgttaaagtgggccaagcccacctagacgtgtccttctaggaacgtatcttggttctgcactcgcaaatcttttttccttcagcaaaccataccgagaagacatgtccagtaccacaagaccggagagatgagacaatgcgttcccgaaagacccttctggtttcccttttattcctgcacacaaataagcaaactctaattgtcatgtcgcaacagagtatcgtattaagattaagggggaaacttcttataacaaatagtatacaattaattcagatttaattaccctataatcagtgtacgcggtgttgatcagatcaacccaaatttggtctgcctagtaagtagactgtcttctccatgggctggacttcacgagaaagcccaagggtattatttattgtaaaactccctaatacgaggaaaa

SEQ ID NO: 395306 - DNA, 648 bp, Cannabis indica
aaaatttgacacattgctttgacttcttatcttaaattttagaatattgttcctctcaactcaagctatagagttaatacattcaagttacacttttcgatacggtatcaaactagcacaaattttggaagcataagtacgactcaatacaaaaaaaaatatataaacttaaattcagtatgacatgaaaaatataaatttaagcacatgacgttacgtcaaacacgaaagcacagcatgaaattacaaatataaaaaacacaaattacagccataaatatagtttttttatactttaattatttatttatacagttaaaaacatataaatttattttttaaaaattatttttaaatatatattatgtgttaatttaatattgtaaaaatatattaatattttatataggttgaattggactttatatttaaaaatggattcttacaccacatattgttttttcaaatttattctttttatactacaggacgacataatttatttttttactatattttttatttattgtatactatatatatataatataagggtgactattcaatggttacatttttattgtaaccatatggttacatttttatttaacctgtaatagcaggttactaataggtagactttccttt

SEQ ID NO: 395307 - DNA, 749 bp, Cannabis indica
tattttggtgtaactttttacatcattggcgtaatattgtgcatgtgtttgggaattgggaatcataagtccgcaaagctgtcaagatatatctcttatatgaactttcttgctatatttatgtacgtcacaactaaaaataattataaagagaatgattaattgatcagactaattttactattatctttatttgattggcacagtaaaagttgttatacatgtataatggaagtaaacgtaattaattccgggatgataatcaactgaacaggccaagtatgtatcatgcaaaatctaataatccagtaaagaaagcaacgcgtttacgtgtttacgacaccaattccgcgtaatctctagaactaaaatttcgtccaccaacctataattaattaagcaatcaatcaatttttcactgattatttagaccaataaaattaacccacgtttagtcttcttattcgtgatgaccataaagaactaatttcgatctcttaccaggacattatattatcaaaaatagttccaagtttgagatgagcaaaaactagtgagaaaagaaaaaggtttaaaggaagctaaaacgggctgaccggtatatatatctattctatataaagtgtgtctatataactgaaattcttgttttatgagaaatttatgggtgacttttaattttatttaataaataataaaatatattatatataataaaataataaagccaacatgtcagatcctttaag

SEQ ID NO: 395308 - DNA, 654 bp, Cannabis indica
attaaaacttagggatacttgtaaaatgagattgaacaagtaataaatttctaatcatgaattaagaagaagtcttaatgacatgattaaagatagtgggcaaatatggacactactacaaaacaccattttagaggctacttttttcaatctttttataaaaaaaagaagctaaagggtgtaaaaatacctgcctgttaaaaattgacatttagacacggttattgtataaaacccgtaggcatagacatagactataccctacagagtcggttgtgggttgggaaagctaataggattattaagtaaccctatggcgtcggttaatagaaaataacgaacgatataggtggatacctttaatgacacgtgtgtcctgacgccataggactatataagaaacccttaaagcttcgtcttccacttcatcttcttcttcttcttcttcttcagcacgaaacccagccgacattacagaacctaaacccacgacgaacccctcgcaaaccacctctaaaaaaccccatatatttaccatatttatttttaatttacttattgaatttaaattattttttttcttatcctatttatgtgttttaatatttttactaagtagtaactagttacttttttcttatctatattcatata

SEQ ID NO: 395309 - DNA, 1038 bp, Cannabis indica
gaatttgcaggggaattaggtctaagttccagaaaatggagaagaagaaagaaaactgtgaattgagagggaaatcaaattgggctaatcttacgggcccggcccaatgctccctccctagagctcaatatagaaagcccactttaacaaaaagtttacaagcccatcatgcaatatgggattttcgggatttaatttttttttattgaagtatcattttaagagatttttttaaataaaaatcttaaatgatatttctttatatatatttctttatatataaaaaatctaaaatgatatttctaaaatgatatttttgaaaaattctaccatgcacctccttgaaatagtacgttcaaacagtttgttggacgcgtgactattttattttatacgcgtgtaaaatagtctgtttgaatattattttctatattgtaaattattccgaatttctcaaaattttataggatatcttaaatagatataacgtacatgaatatgaaaagaaattagactaaaaaattctttgggatgccgaaacaagttaagggtgcatcagtacatcttttttaaggggtgcattataaaatcactccaacaaaaagaacatttattttatatttttacgaatccttttaaataattcttttagttacatattttatgaaaaataactttttttttttattacaataacataatagttttgtttgctttacttttttttttatagctagaagtataaaataaatataaattttgacttttttttagataagtataagttttaattattttattgtttggataactattatacaagatctttttacataaaaagtaattttcaaagcatttgaatattattaaaaaagttttttttgtgagtaaattaaaaattatttatattattttaattttagcatagtttctcagttcttttggaaaaagctacaaacatagcttcttctaaaatgacattttaatttttatacaaacactcttaaaatgaatttttttaattctaaaaattaaaaa

SEQ ID NO: 395310 - DNA, 848 bp, Cannabis indica
agtacagatgtgattctaggggttcagtggttggaaacattgggagaaacgtaccacctttggaaggaaggggtgatgcgattcaaagtggggggaagaacagtggagttgcgaggagacccaaccctccataagactcgggtttctctcaaaaccatggtgaaaacgatacaagtggttcaggaaggcttgtgggtagagttgagtcatacaagtgccacggaaggtgacgaattaatgccagaacaggtggctgaattgcttcagcaatattctggggtttttgatatgccaaacacattgccgccgccacgacctcatgatcatgctatttgccttcgacctggaacgacaccgattagtattcggccatactggtatccccacattcagaaagatgaaattgaaagattggtgagtgagatgttgaaggtgggaatttgccaaccaagtgtgagtccattctcaagtccggtgctattgatgaagaaaaaagacggaagttggcgtttttgtgtggattatcgggccctcaataaggaaaccatcgctgataagtttcctattccggtgattgatgaactccttgatgagttgtttggggcaaaggtatttacgaagcttgacttgaagttgggataccaccaaattcaggtgcggcccgaggatgttccaaagacagcctttcggactcatgaaggacattatgagtttgtggttatgccattcggactcaccaatgctccagaaaccttccaagctaacatgaatgagatctttaagccttgtaaagcccgcttagttaatttggaaattatcggttaattatgattatttatgaaattatt

SEQ ID NO: 395311 - DNA, 483 bp, Cannabis indica
gaaagaaagagaattaagtatttaaaataagattggtcctgtgaacctttatgtggacagattgttcaaagctgctgggaacaaagttgtcatcttcctcttgctgataaaaccaagttctgtcttgatgctttaaatgaatggggccgtgagcttactggtcactttaagaatcggttacagcagagtaagaagcaattggcaagactcaaggtacttgactcttctaactcggatgttgatttttcaagagaacattgtaactactttgagattcttgcacaacaagagatatattggaagcaacgatcaaagcaattttggttaaatggtggtgataaaaataccaaatactttcatgccactgctagttcccgcaagcgcaataatcagattgtgcaattacaaaataataatggtgaatggaaggggtggaactcaggacttgaccaggttgtacttgactatttttccaatctttat

SEQ ID NO: 395312 - DNA, 1189 bp, Cannabis indica
tatatttgtgtgtacatgaagaaacgagaagtaatatgctgttgcatcatggccacctagttgcatctttttccatgacaacatattatgtgtatgaaatgtaggctgcaatgaacacagaggggaaagtaggatgggaggagattgtggattctcgtcttgacgggaagttcgacgtagaagggcttaatgaaatggcagcacttggatacaaatgtatcaatcgtattccgaaaaaaagaccttccatgagagacattgtgcaaatcttatcaaggatactcaagctgagacacgacaagaggcaccataagtccttatcggccatgacagatgaagttaccattgatgtggacggaccagaaaccaactcgcacgtccctgatcacagaagagaagagtctgtggagagtacaattgattatgaagtttagaaatgaggggattctttttctcactattattatttttattattattttcttttcttttttttttttgggtgggggggcgggggtgttcatttggtttttcttttgatacatgtgcagtccagaaagaagtagagggagtttgagattcagattgagtgacataggattcagataacaagcttttcttgttaagtttctgtttgctagagtgatagacaacagagtttgtaaattgaatacttcatactgaggaatggaaatgaaagtaaaaattacccttttttctgttacttttgaagagcctaagcctaacaacttttatattagtaactttgtcaaacaatacactcatgtgactacgcatttctcaaaactttggaattgggcattattaaagagaaatttacatctcaactggtttctttccttttatttacaaaattacagtacctttctaaaattagagttatttggaggatgttagcatattttggtagaaaatagtggaagtcaacaagctcagttttacaaggcagagcttaatattaaatttgacgaccttagaagcaaaattgaacttggagctcaacataaaagttttagatctcgttcttagcattccaaaacatcttaaatcatccaattctgagttgtattaaaaaaattatagccaaaatactaatcagtagcgtcgtactaatctttttttttaaaaaaaaaaaactctaattttaaagggattcatctatcttttc

SEQ ID NO: 395313 - DNA, 309 bp, Cannabis indica
aaaaattaaactataaaattcttttaaatatcgatcaaagcaaataaaagtgcatcaataaactctttttaggagtgcattataaatttttttataaattatttatataatattatatatatgagtataaattaatatataaagttcaggtgaaaagcaatatatatacatgggatttgatatcttagagatttttccttagaaagctagttttcatatatacatttgaacatgagctataattaaaattaatgtatgatcatgcttgaaaatttatagtccacctaattaattaataataaaacaaaa

SEQ ID NO: 395314 - DNA, 1264 bp, Cannabis indica
ataactccttagataaatgaactccatctctggaagtcaagtgacctccattagaattagccatttgaaaaaaaatgctctagcaccttactaatgtaagttgcttgtgacagagcaagtaaattactaggtataccacaaatcataggttttaatgttctcatcaaacccttgatattaggaatgggaagttttcttaagtccattgaatagaatgatcatggtttcctatcttatccttgcattctaaaaactttaggttgctccatgggaatggctaaccatagttctctacgcttcgagttatggtatagcaagcaatggatagtcctaataaggataagataggaacctattaggactatccattgcttgcttgagcaaataatgaatcatcatcaccagtgtcatccaagtcatacaaggtgggtccctaaaaacctcccactacgacaaggtaccgtgattatgtatctaggaacttcagtggtatagaccttatataatgtaagataatggtaacactttttggatttaaatcaaatagtatctcacttgtttgctattttggatttgagattacatctttgtagtcatcgtctagagaagtagtattagtgaaaataaatacttactagtctagatgaccataatgtagtccacccctagtcactttagaatagccaacaaacatgcaaacctcaattatcatttttggcttttcttaaggacatgatcagggcatccctagatttaacaatggtggacactaagtacttgactattatattattttaaggttgttttggtacctattcttagatgggatgccattttaaaatatcgcttgttgtctctaaggcatatccctataaggacttttgtagctgctagtaactaatcataaatcttatcatttccatcaattttgcgattctaatattctgaggaagtaagtttgataaacaattcaaagtttatttaaatgatctttgaactgcatatcaaatatttctccgcccctacaaatttgcaagatctttaacaactttgttaactatctttcctagaaattcatgaaaattttcaaatatttcaaatttttggcataaggtaaatatctatagtaatcgtctaatgatttgatgagttactcctaaccaaccctggaatgtatattcatatgtaaaaaaatgaaatacatagatgtaatctgaaatccaaagtagcaaacaagtggagatactatttgatcttatcaaaa

SEQ ID NO: 395315 - DNA, 1130 bp, Cannabis indica
gatatttttttatttattatattaaatcaaatcaagaatttcttatttttattttttttcactttttaaggtaattaattgaatacttatcttttaattgtaacataaggtggcaaatcatctgtcaccagctattgtagagattagagaattcatgtgccagcaaattaagcataaatacataaaacaactcagtaaattttatatacaatatatattttatatttatatattttttattgtcttgtttacaagtcaagcaaaataaaaaataaataaataaataattaatagataagaaaaaccactactatatataaaccctcatcatcagttacacgcacaccttattttaggttaaaaacacaataaattttaaaaaataatattgaaaatatgtcataatatataatatatatttgtggtaatatatatttaatacagtgctgctacaataataatatttgaaattgtcaatatatgaattgtttacattagaatcttaccaacttgcttaataattacccttttgaaataatcagtataattaatattattccacaaaatatatatatataaatttattaaaatagattaattttcagatcttttgcttgagtaaaacacctatacatgtgatacccatatcattaatattgtacattatgattcaggtgaggatagaatattttaataattgagtatatatataaatacaattcaattaattaagctaatctacagctacaaaagaaaaggaaagggtttatattaataatatgtaattattgtatatacatacacatacataaatatacctaaacctatatatataatatatgtatatatatacgcggtgatttatattaattaaaacatttaataatccaattgattggttcggtgactttggtcccacttttcatattgcattatatgttgcccccattattagttcatttttttttttcatcttcaataattgagttttgagttgatatatatttatatatttatagcaaaatattatgtaaacatatatagacaccaacaacaacctagctagatagattattatcttcattatttttttataattagataataatatattttggtaattatttaaa

SEQ ID NO: 395316 - DNA, 648 bp, Cannabis indica
gtgtaaatatagtagcaatatgcgaactacatacttgttaaaacagcacaaacgacatactatagatttatacttttgtaaactttattgtattttttggggtaattatgaaaaaaaaaatgatttttttttctatggtttgctcgtaattgatagagcaattgtccaaatgggctttcagataaaagaaaaagaaaaatttatacaaaatacctaaaattgctcattatttatatttttattgacttttttttaaagaggaaaaataatgttatttttatgttgctgcaacgttataaaatatttttgcaacataaaaataaaaatttctataaaatcataaattttttgttatttttgagtatttttaaaataatttaataaaaaaaaggtccaaatgggcaaacaatacaaaactataaaaaaccttgtaaagggatgtacaaaacatttttaaaaattggtataaatgattagttgaaaaataaaattggtaattgggagtaatgaaaacagagaattattaatgagaatatgagaataaaataggaatgtaataaaatttaaaagaaaatgaaaaataattgaaaaaaaaattggggtaagttgaaaaataccctcttttattcatcaattaatcaaatttac

SEQ ID NO: 395317 - DNA, 897 bp, Cannabis indica
tggttatacgattatgtgtgtatcttctgtttgtgaaaatatatatatatatttcttttgtttgtggttgggttttttagttggtgaagaaaggtttagattttatgactgaatttttaaatttgagctttgggacgatctgtgtttattctttgatcagggcggtcttgttcttgtattttggagttcgtttctgggaagcccaagcttgatcaaactgtttagatcgtttgtttcatctttttttgttcactatatttattattattaatattttctggaattatttttagcccctttgaaggtgtagcattttatgtcttgttttgattatgacccaatttggaataggatccatggttagggctcttaaaatgttctattcttgtttgaagatctatgatggactgtattgaatctaggttggtcaaacagtttagtgcttgggcagttcgaacaccaagcagctaaggctttcatattgtattatagaactctgcatatttcaactgtaaacaaaacaagtcccactccattgccaccaaaaccaacataaggagaaaaaaatgacactataaaacagcagtgatccccatcccacatacccaaaacttcacagaaagatgttaaagcaatgccttttgtctttgttactcccatatgagagttttatatcactctcttgtgtgatgttgctagtgtatatatatatatatatgagaaggggagacttgattggagagacaatattgagttgggtttgtttgtcttttcttgggctgtttaatgtgttgggctgaacactgtgtgaaagagtcattgattgactctctttggctgaccgaaccttttgtgtttgggtctgaaacaaaggttgaaattgttatttttaataat

SEQ ID NO: 395318 - DNA, 1057 bp, Cannabis indica
aggctgagaggtctcgcaggtggacctttaggtgagcctagcggtcaagtgagggccaaggtggccaggacctctcgcggtgcagatgctagtggaccaccactacctctccctccactagggcatgcacctgccgggcaacctatagttaagccttccggccaagatactaggaggctcggtagagcagcagggtcagctgatggtaagaagactgctgagtcagccactcagtagatagagagggctatcactttcttggaggaggctttgcaagagttgggtgatggcgtgcttgacaggttgtactctgccagacttcaagacctttctctagttagttatacttccagctttgttcatctctttggcactgtataagctggccagccatagtgttattttcatgtagatgcccggccttgggcatccatacagggttctgcctgaccatggtagtccaaagaagggactgagaggccagaattgtatatggtactgacatttttttgctttgtttttaggccttgatgaagttgagttctgctcgcggtggctcaagagggtcttcaaacgctttctaggagtgtgtgaaggtcttggaggcatctattactgcaaaggacaaagccaatactgagctggaggtccttctaatagagaagcagagaatggtctttggattagagattatgctaggtgccaggaccatcgagatcaccaacatagctgctctcatctccgggttgtagactgatcttgaggaacacaagaagaaattataggaggctcttgatttccagtaggccattaaggaatattaccttgatttttcctttgaacttacttacgagtgctgcctgcacaatccaaaagctaagttgtcatacttgggcactccaacctttgtgcagagaacactggcccgtaggagggcattgttcgagagtcacatggatattgactagactactgccaatcgagaggggtcatcatcaggtacccgtgatgaggcgttgaccgacccactagtggaggaggtgttgggttttatgcc

SEQ ID NO: 395319 - DNA, 720 bp, Cannabis indica
ggttaacaaatttaaaatagtaacagaaactgaaaaaaaaaaattataattttatttgtatttaatacttgtgactactaaaaaagctaattaaatttatgcttcttacaaatacaaattagctttaaatatgcaaatatgttatagtttgaaacgcataaaaattaggaaaagtttgtaaataatagcagagttttataagatattttgtacataaaattcacataaattgaaatatataaatcacacttttattaatattgagcgtttatattgttaaaaaaaattattaagtttatgttgtttataaatacaattttaaatatttatgctggtagtattttattataatttgaacgaataaattagaaaaagtttgtaaacaagtgcacctccaaaaaaaagagtgtactatgcactctttggtgtttttcacatcctgacagttccaatcttaattatcttaattaatttttacacataacttgctacaaatatgactaatatttataaccgtacattaagtggtatttaagggtggacatcatccaatccaatctaattgaaccgaactgattcaattcaattcaattataaaaagttagatatccaattataattggattggattggatgctaaaaattggattctaattggattggatcggttattggatgtcaatctcaaaatctaattaaaaactgatccaatctcattac

SEQ ID NO: 395320 - DNA, 629 bp, Cannabis indica
aaaaaattgagagccatgaaccttggacctcctatctcggtcaatgagcatggcttaatggtaaaatagtagtgagtaatacacatataaattacacataaatttgagaaacatttatgatataacaaaaaaaaaaaaattacaattaatcatattcatatatttaaatatttataataaaatatttttttttataatttatgaaaaatgctaaaggtcatctttaaggaaccactactacaaaatagtgttattgtgtcggttcatgccgatggcccaagccaacagagagatatcgataaccacctaaatttaaattaaagatttgtattaaaaaattatttaattttgttaatacttttcgattaaatttaaatatttaaaataatattttcttaaaaaataataataaatttattgatttaacagtgttagtttaactattaactttaatagaaaaattaaaaaaccgtcaaacaaactaacaatcactacaaaaaattgttacctttagtgacaattttttaatcacaacataatttttttgtgactaaatgtgacttttagtcacaacaaaatgttacttgtgactaaaacatagtatttagttacaaattgtcactaattta

SEQ ID NO: 395321 - DNA, 1046 bp, Cannabis indica
atttttaacagtactactcttcccattccacactttgttatttcgatgatgccatattgcccaacataacgtagcacccaattgcctatcctccttgctccaccgttggaattggtgttaaaaccagtcaccaaaggaggaaagcacaacattcccacgaagtaaaccaacttcgcaccagcaagcagccgcaaagttgcacaaaaccagacatagctgatagtttcagccgattgattacacccagggcaaatagaggggatttgaacatgcctttgaatgagctgagcatgagttggtaaacagttagacaacccttgccaaagaatttcttttacctttgagggaaccttcaacttccacagctcattccaaaaactagagttgccattaggggcttgaggatatttcaaatcttgaatcaatttgtaggcaaatttgacagactacttactagatgtttccttgctccaataccaagtattggtatctcctgaagaagcaattgggatgcttaaaatcaactctctgtctttactattaaacaaatcagcaataatctcatggtcctagctttttgcatccacgaccaacaaacaacagactttttgatcgcacaaacttgaatggaacgatgtgacaaagggattatcactgtcgggtagccaaggatccttagtgattgatacattcttgcccgccccaacaatcaaacaacccccttttaagataacatctttagcttcaagaatggtcctccaaatatagctaggattacttcctaatttagcatcaaagaacgacccacgaggaaagtatctagccttgaacattatgaaaagaaataagaatgtggtgttgggttttctcaaagagaaaatgaggaaaaaagttgagagttgggatagcaaatttctgtctcatgctggtaaagaagttctttcgaaataggttgacaaatctttgtctaactatgcaatgattgttttcttaatccctaaaggcacttgtgaggaacttgaaaaaatgatgtgcaagttttggtg

SEQ ID NO: 395322 - DNA, 824 bp, Cannabis indica
atataagctttagtggagattactttttctttttgtgttcaaagagaggagaacgctacacttttaaaaaagaaaaagaaaaaaagaaagatagaacaccattcaataacgagacatctgcatactaatttaacctctttacgatttaatctttttgctagctctataccccacccattacaataattagtactgtatgctaaactctgtcggtggctgccaactacttaaatattagcattaatggaggtttacacacaagaagtatagcagtactatacgaccatggggcgtggaataatttcatcatgtcgttttcttcctcaagaaatgttcacagctgcggcggttgcggtagtagtactactactgatgatgatgaactcaatcaacggctgtggagcagctgtgcttctaaagaccaatatcacttacgatcgctattgcgtcaacgacaataactgcctcattgctgaggatttggagttggagtttttgatggattcccatttcagccgatttttggccaatgaaccaacacaaaacaccaaaggtactgttattcgggacaagcctgcggagccttgcggagttaagaaaaaaggtcaccaatactgccccgagaaaaaggatacgaataataaggaagcttgcaacaaattcaatagagaatgccactaaaactatatctcattcattcccctcgctcgtgttatttctatcgtcttatatatatatatatgtctagcaagatagttgtacgtgcatgtactcttcttaattatccactactatacgtactctatttgtatttcctctaagtt

SEQ ID NO: 395323 - DNA, 831 bp, Cannabis indica
actattattttattaattttttacataaaagaaacatgtgacaaaaatgctattaatactattatttagttgactgagcaaaaaaaaatactggtgaaaatatctaagaatatctgttattatattatttatttatttctagattttttagataaagaaggcatttggaaagctaccataaaaattggatttaagtataattgtaaataattatataatttgactgtttgactacataattaacaataattatttaatttttaataaaaaaaaataattatttaattgaaggattttaattacactttttaattttcatacttcataaaatttaagtgtaattacattttgtaattactacaaattttctttaaatattaactattaaaaattattaattttcaattataattactaataattttgctaaataaaatagttaagaatttataaatacatctcatattaaaacacatattattagtgtcactattatcttgtttaagtaattacactacttaataattacatatacttttcaacccatccaaaaaaatatcaataataataggctaaatcatgtcccatgaacttttttagccgttaaaaattcatcttgaattattgaaattgttagatttaaaaatttttgtctaattttattcaattttactgttttaatgattgtttatatactaaatcatgctctctaaattttgatatctacccaatcatgtccctcaaactttgatatgtactaaatcataccccctgaactttcatccatattagagttttttactaaaattagacaaaagtccttaaatttaa

SEQ ID NO: 395324 - DNA, 1130 bp, Cannabis indica
accgtaaaaatgtaaaaaaaaaataaatctttaaacgtaaaaatataatttttttaacaaaaattagtgctttatgtaattatctttttttttttttattgtatgcaaatgtatctcttaaaccccataaaaataaaattttctcgttttttaaggttgattaggattctgcctctcaaatttcgatatatactaaatcatgctctctgaaattttcatttcgttaaaaattcgtttgaattattgaaattattagattaaaaaacttttgtctaatactgcaagcatatatcattattatagcaaagttttaatcttgaaaatgttatcaaattcataaagattgtgtcaagtatcattaattagacaccgttcatctctatttgttcgctttgggcttgagccctcatatcaatagagatatatccatccttatatacccataattcttttcatttctagccaatataagactttgtttgcattcccaacaatcctctcctcaagcacatgactacatagtctcccctcaaacgatcttccatcttgcaccgctgttatcacaaacagaacacgcttcctgaccttcattgtcaagaagactttcaacacaagacaccaaacaagatctccaattcgtctactctccaccaggcatgatattgtccgctttgggtttaagccctcacgattttgtttttggacaccttcctaaaagacctcatactaatagagatatgtccatctttatatacctatgattcttcccattctagtcaatatgggactttgtttgcaatcccaacagattaattatgaaattttactaatttcttacacttttaagtcttaattatgctttaattagatggatcgaaactaaaaatgttttaagaatgaaataataaaatgagacaaaataagaaagaaaagtaatcaatttaactcaaagtgtatataaacttacagcattaattttcttaatccaaacaatgaataccagtgtattaattttcttaacttactatctaatttgaagttttaagaatgttaatgtaatatttttgtctctcttgaatgattatataattaacttaataaattaacaaaatatatgttgggttttatgc

SEQ ID NO: 395325 - DNA, 1225 bp, Cannabis indica
taagttagtgcttaatgtactttttctaatccatattatgaaatgcggtcattacaatgcaagccaagcaaagtgaagacaagaacagaagatgtccaagcatattaaatcatcaattacaaaaatgaaagtagatatctatgaccaaaataataggaataagaagtgtaaaagtgacttgggaggattgaactcaaggcctcttggataaggtgaaagagactcgccactacacgaaggtgatgttgtgaagtgagaattcaagcatggggagcccctatgtatagtgggaacatcttggataaacgcggtgtggataatgattacattgcagaagggcaactttcctaattcactcagtatacaaaaacacttaaagaattgtcgtagaatgggggcaagtgttaacccctaaaattagcactgctaactctcaggattagtcacctaaagaccaagagacaagcgagagcacatttagttagtttactcactcggtgcacatttctcaaagttgtacttgtgggtattgggatacatccatacagtcccaacactaaccttgtgaaccatacatggatacgtgaacatcatgtgtgcatgcctacatgggggacacggatgtgatcccatgtggggggtcgcatgcaagccgtgcatcgtgtgtacggtatgcgtgtgttacgagtggggattgcatgcgagttgtgtatggtgtgtttgcaaagtgcgtgtgtgcagtgtgtgtgtgtgttgtgagtggaaggccttgcatgcgagctgtgagtggtgtgtgtgcaaagtgcgtgtgttgtgagtgggaggctcgcatgcgagccgtgtgtggtgcatgtgcaacgtgcatgtgttgtgagtctcgggggcttgcatacaagtcattgtgttttgtgtgtgtgtgtatgtcaagtacatgcatgtgtgcatcttgtgagccttagggcctcgcatgcgagaccatgtcggggctcgcatgcaagccatggtatgcacggatgaagtttgtgttacagcacgtgagaagcataatgtgcatgtgtcatggatgttgaaattcatccaaatgcatgctaacgagaatgttgctgagcaagaaatcaaagaaaaaggcatgcaagagacaaacgtacaactataccttctaaagactttgaaagaaaggaggtacgagtagtggcaacaatagacctacaaggtctgaggtcct

SEQ ID NO: 395326 - DNA, 2311 bp, Cannabis indica
ttttaacaacagattcaatacaattcattcttgtttttctctctctcgttctttctcttcttcatttcagttaacatggtatcagagctttgatcgttcccaatggagtcagctaccagcggcaatggaggagcagcaagatcgaaccctgcccttcttcctcgctctcaaccagtttcgtttaatcactctatgtccattaagctcgatgagcacaattttctaccctggaaacaccaggttcttgcctccataaaaggaagtcgtcttcagaaattcctggataacactcgaattccctcaaaattcctcagcgaaatcgatgaaatcaataagaatgtcaaccctgccttcgaagactgggaacaacaagacaacctactggtttcttggcttctttcgtcaatgtcggagaaaactacaaatcgcatgatcggatgcgaaacaacagctcaaatctgggaaaccttgaatgagtactacacggctctaaacactgccaacatagggctttacaaaacacaactcagaaacactaaaatgacaggatctcttaatgattatctgttaaagatcaaaggaatcattgatcttctggctactattggacacaaacaatcggctcaagatcacattgaagccatttttaatggcttgccaccagaatacgatgtctttgtcacctctgtaaccacaagaaaagactcgtattctgttgcagaaatggaggctcttctcatggcgcagtcggttcgaattgaaaagaacactaaatctcttgatattaacaagagtgaggccaacttggctcataccagatctgtctttggcaataatctaggcagaccctactatccaaattctcaaacacctggcggctacaatcgaggaagtcattttagatctgtcgaaaacccatctcagatgcacaacatgtcccgaggtacatctcaatcttatcgtggtcaacaacaatggcatccacataacagtggcagagggaacaccactacaggtcgaggggcatctcactcttggacacaaaaaccccaatgtcaattgtgccacaagctggggcacacagtaaaacaatgcttctacaggttcgataaatcttttacgggtcctgagtgttttaaccaattttctgcttcagctaatgttgcagaaatgcaagcatgctttgccactcccgaatctgtccaagatgacagttggtacccagattcgggtgccacacatcatcttacacctgatggaaccaacatagcctccagcagcaactactcgggccaagaacaagtttttgtaggtaatggtactggtcttgatattgaaaacattggtaattcctccattctttcaccttatacctctaaaaccttatcattaaccaatttacttcatgttccatctataacaaaaaaccttcttagcgtttcaaaatttgctaatgacaattctgtgttctttgaatttcatcctacggtttgctatgtcaaagaacaggacaccaagaagactctattggttgggaagcttgagaatggtctatacaagttcacatctactcaactctctcatcttcagcaacctgtcctccctaatctttcgaattcatcctactgttttaccaatcatgtatcttcctctacctctaacttttccttgtggcacagtaggcttggccaccctactgctcatattgtaaaacaggctctaaactcatgtaatatacctgttgataataaaacaaatcttgatttttgctcagcttgttgtctcggcaagcatcataaaatgccttttccattttccactacagtttatcatgctccacttcaacttcttcactctgacttatggggccctgctcctatcaactctctaaatggttataggtattacattagttttgttgatgcttattccaggtacacatggatatatatgttaaggacaaaagatgaagctttaccaaccttcactaaattcaaaacccaaattgaactccaacttggacacaaaataaagacccttcaatctgactgggggggtgaatttagagccttcactaatctattagagcaatgtggagttgttcataggcttgcttgtcctcacacacatgaacaaaatggggtagttgaacgtaaacataggcatattgttgaaactgggttaactcttcttgctcaggcatccttacctttactccttttcgggatgaactttagaacagccactctaattacagaatgcctactcgctgttttaaataatatatcccctcttgaaaaactttttaact

SEQ ID NO: 395327 - DNA, 1112 bp, Cannabis indica
accacacccgaaagtgtagtggattctagcctgttgaaatatatgatgagcaatattcaaaaagggtattttagattatatattctttattttcttattgttggaacaggaattggggttgggaagaatagtgtgcaagtagtgtataatgaaaagcagaaggctgtggaggtgagtggtgtgtggagccaacaacagagcatgactattaataaagagtggaggagtgggaattggtgggaatatgggtatgttaggaggcttgagctgcctgatgatgcagattcgagaaaaattgaggcttatttgacaaacgacacacttttggagattaaaattcctaagaaaattttggattttgagcccaataataatactcttgcgaatgatgtgatgagtacaaaaaaatctgatgcggtgtaagtataaaaccttttattattgttatcttattactttgcttcttttaatatgcttaattgcaaagtgtattataattataaaaaagacaaaataattaactgctatcttaattaactgttggtacataattacaagaatgcctaataagagattattaaggcatttacaataacaaatattgatttatatgaatgttattttttatattacaacaccatgtaaatattagattctagaaatttagaaacgtttattctctattctccataatcataatagatcttctaattacaattaaccacatttgatttaaggtgcttctataaagtttcacagttatcttatcatataaataacataaatgctatgaggtatcttcaggtgccaaatatcataaaaattagtatattgttatttgtctattttaatattttattttatatattttaatttaataaacaatataaaaaattatgagatgtcacgtaggactttctttaaggtaaggtagttgagttgcctcatgccctttagcctaagaggcttccgagtcttttttttttcttaacattagtctatcaggggcctgtttcgcacagcttttgaaaaaagttaaaagctgctttttgaaaaagttgtgataaaaatgtgtttgataagcagttaaaaaatagctttttgaagaattt

SEQ ID NO: 395328 - DNA, 678 bp, Cannabis indica
aaaaaaaaagtcaattttgcaatttcaaccagatttacaaatgtcaaataagttaagacattctacttgagggcctcatgacacctttaagagtctcgaaaacattgaccatgcatttggtgttgagactcacacacctaagtgtgtccaaactagggtttatgggcccgcgtgagcatttttaccctagagacctcaatccgataaggagatcaataaggacttaactcattttggcataagagggcttaaacttgaacataaagtcaaaaaaaatacaacacggactatgcgaccagtgccacatcaaggtggcagtgctctccttctttttggagagcatttctacaagaagatgtcagttctcaccactcacaaaataccaaagggacttgtcaaaatatgttccctcaacatccacgagtacaacacaagtggaagaaactatttctcaccaaaacacaagcctagccaaccactaccatctttgtggcacaaagagtggtagttgttagccacatcaaatggggatgagattttttgccaaaagtactttttcttcatcaacatgtcaaaactaagtggtataaaaactgcttggctgaccactgccatctttttagcacaaatagtggcagtggttgtgttcggttttgtgccctaaataaaacccattac

SEQ ID NO: 395329 - DNA, 638 bp, Cannabis indica
ggaagtaccttacaaaaacaacctattactataatatatagtaaacgttttaaaaggcacgcaagcctttatacacgtagttagtgacatcgttgtgcgttttttttttttttttgaaacaaaacctagctgaattgaccattttgcccttttaaaataatggactttcttttttttattggtagattagattgatcttctagaactcatgaatacattattaacggtaaagaatgatttaaaattttaaatgctcttaacttatgaagctctcgtaaacatttatattcaaactaagtacttaaacaattcaaagtaagtgagattattattatattattataatataaattaaaagttgagtattttaagttcggattactttagattctttgtaaatctttaaactctaataataattttttaaactaacttataattatatatattttttagggtaaatactattttggaccctgtgttttgcaaaaattacaaattggaccctgtgttttgttaaatgacaaaatggaccctgtattttctaaaataataaaaataggaccatgagcttaatttttaacaatttttttttaatacaaccaacttgaagacaatgcttaatacgaacagataca

SEQ ID NO: 395330 - DNA, 557 bp, Cannabis indica
acacataaacacataggacaatcttagtatatcatgttttcactgtgagatgcatgagaatacaattgtctgagatttctatgtataacatgttattcactaatgcatgagcatgctattaatcaactattaatgaatatttatttaaaagacaataaataaaaaataatgatgaaccaggtaataatttggtattcctaattttacaacttttagaaaaattagaaaataaagtacaaacctaatctacatcactgcaatgacatttttgtaattgtgtagggtctttgtaagcctcaaaattaagtaagaaattttaattatttatttttaaataaaattttcatttaatatgtctttttaaactcttttaattaattaaaaaaaataattaattattcttaaatataccctttatttaaaacaacattattatcatattaattttgtcttaaaatagtaacatttattactttaattgggttaagaaaatttttgtcttaatatggttatagatttgagttcgaatttcaaacctaaaatcaattatatttatt

SEQ ID NO: 395331 - DNA, 1366 bp, Cannabis indica
tattgacatgtattaataaattgaacagtgcacaataagtattgtattatgttttttaaaaataaatagaatatataatttcgaccttagacttcgaatctcgaacatcaaaccccaaccttaggcccatgcattcacccctaggccttgaaccccaaaccctggtctcaaaccccaaaccttggccatgaatttgaaccccaaaccgtggtctcaatcccaaaccataatcctgaaccccaaccccaactccgattttaccacagtacaagctaaactcataaatattactatatgagcttatacatccctttttcttgggcttatttggtataatgtgatgtattgtattgcattgtataatattatgttagattgtattgtattaatattatttaatacaataatatgtttaatattgacttgtactaataggttatgtaatattataaattctttacaataaacctgggtcggtctcggaccccaacacccagaacatgctccgcacctagatcctagactcgaacccggactcggaccctggatccgggtttggatcctgggtcgaggtccaggttcgagtccggggtctaggtcccgatttgggcggggtctggattcggggtccaaggtccaggactggggtcggggttgaccccagacactttgtaaatattataatacaagttaatacggatcatttgttatgtattaattaatatgactcacaatgaatcaaaatttatgatcgtaataattaatacaatataattattttatccaaatatagtgttatttggtatttactaaaaaactaccctcatacaacttacaaaacgagccccttatatacaaggtcgtctaaaagagttgagagacttatgacgaaatttgaaacgtgatctttttttttcactaaaattcaaaataaatattatttaaattttgatacaaatttatgaatttttcttttataactattactatttcttttacaaatttatgggataataatctcatatcattaacttttaaaaataaagtcatagaggaaaagttaaacccacataaaaatacataaagttaaaaaaaaaacatattttatgtaattttccaaaaaaattgtaaatccataaaaaaattaaaaacttttgtaatttttatatatttatgaaataatcccaataataacataaaagcgccttaaatgacagtacaaaccagccacagtttaataagaataaaattaactataaataaataggtaagtctatgaataaatgacagtaacatttaagagagtttccaaattttattttattttatgattgtttatattataattatttaataattgtaattt

SEQ ID NO: 395332 - DNA, 937 bp, Cannabis indica
agaaagattaggtatttggatagagttttatttcttgtagaatgatatacatgcatgatcatgataaatgaatattattattttaagaataaaattaatggattaattataagataaatgaaatattttatatttattaaatttggtcataattaattagttgatattttatatatggtcagattacaatttattaaatatttaattttctaatttgattttcaaaattaattgtagcagaaaccttgatggaaggtcttacccatataaatatagggtcctcgagctcactactcattctatgaaacacagtaaatccatactaagaaaattttgaattacatgtggtcccctagtttaaggatgcaaagttgttttcatactaagaaaattaggatgttaaatggtctggagtatctgacacttttaataggacaaaagttctcactaccctttgtactttgagtgaggtaggcttggtctccagtatccgtagttgctgtatggtcgctattttgtctctggcgctcttgctcgcatagccttggtctactttattactcctcatctcctatgcccacaagattatgtaaacactcaagacattcatgttgagcttatgtgcatagactatatgtatgaggggaagcaaagaggataaaaggggcgtaaggggggttgctcgtaagagtggatgcagggagggctgctcgtggggaggctaggtgcgcgagcatgggcataggagcctgggcgcgcaggcgtgggcatggggagtttgacccgtgcctttattcctcctcgttccaacatatccccttctttttagaatttagacttagcagacttttgggcataatactaatgactccaaaaattacacttagcaatttttgggggtcaacatttgccccctagtctataagaattctttcaa

SEQ ID NO: 395333 - DNA, 1011 bp, Cannabis indica
ccaataaaatcactgcaagtcgaatatacacagcttttgacctttctgatagttatcctatggatctcagacaccttattaatttgtcattacctccccctccccctcgctctcgctctcgctcccgctcccgctcccgctcccgctctcgctcccgctcgcgctctggtcttcgctctcatcctcaccctccactttaattaattttttttaattctttttatatgtatgaaaaaaaattgtttatattgaagaaaaaaatagaaaatatatagtattgtgttgtatactatattttatatttgttgatcatcaattagtacaaatttgacttgtttagtattgttattttttatatttattttatttaaaaattatatatattcttacaaaaaaatatttatatagattttttttaatggttactctttgttcttaatataattataggtaaatttatttttaactttttattttgtaaaaattactgattatatattttgttaaatggtacattggatgtattttttaaaatagtactaaatagtagcttaaattaattttttgacaaaacaaaaatttaataataacaaaaaaattaaaaaatgtgtacgtatgcgctattatataaaataaaaaacatgagatttttttttatttttacacttcaaagtattttttttatttttacagaaatttacataacaacctacataccaactaatggagcaatctaaatcgcaactaaaaaccacatagcaacccacatagaaaccaccagagcagcccaaaccgtaaattttaaaaaaaagttaaaaatggtataaaatttgttatttctaaaaatatattgacgagggtttttctcatctcttagctctcgtagttctctcaaactggtgccatggcagaggctagagcaataatgtaggggaagctcaaaattactgcaaagaatttaagaaatgtggacctaattccacaactgatattttgtgacagtcagtagtc

SEQ ID NO: 395334 - DNA, 713 bp, Cannabis indica
attttagtttaataaatgcataaattttcaaattttcctaaaccaattagtaaaaccattctatgcaagtcttaatccaatcaaataacatcaacaaatgcaaaaagatatgtcaaattgttgcaaaactgttgctcgatagctttgcaatacttccgaccaattaatttaatactgttacatgatttgagataagactcgtgttaaattaaataaatctaaatgtatataatattcataaatgcaaatgttacgaaaattataaataactacgcaagggtatgtaatcaaacagtactcacacatgtgaagtcgatctcacatagaattgaactgaatactactaaattagacttatatttctatttggtaaataataattttgatgacaataaaaataaggaatacaataaaataaaattaaaagaaattagaaaacgaatcatgttgtttcaattactcaattgctaatgttaattattattcatctttcttaaagtgaatgactgattataaaaattaacataactcttttcagatcttttaggtcttaaatcacatgttatctagtcatcattaaacagtaatctcatgtcactaaggctatgcaaatactgtcgtttcacatcaaaacctagtttatccaattttagcattctcaaaactcacttttcaagttttgaattgggatcattaagcatgcctaaggtgat

SEQ ID NO: 395335 - DNA, 631 bp, Cannabis indica
ttaattaaaaaatattaattttacttaaaaaaaacttgaattactcttaaaaaaaacattttttaaactttattttatttacaaatatgtatattagaaaatcaaaccaaattaaatgattgagaatctaattaataatttaaataaaataagattttttgaagaaataatcaaatttatctatatttataaactcatatcttaacaaaataaagaaaaataactaaaaattcaataaaaatataaaattattttgaaacaaattataaattaaactaaaataatattatgattatttaaaaaaatctatattttttttttttaaaaaaaaacaaaatatactcaagattgttcctgtaatgtcgcccaaccccaacaacacatctgtcacaaatggggctagtaatgccgcccaaccccaaactaacaacaataattgagggaaataaaactataatggttccgaccaaggaaatggcaagaaggggaagttcaataattcccctacacaacagcaccctcgagaaaatgaggagaagttcacatgctttatcgtcctgacaaacacccccaagaccatcctaatggccacacgtgtcattgtcccgtacaagaagccccctccaatgaa

SEQ ID NO: 395336 - DNA, 1405 bp, Cannabis indica
caaaccattcagccagtttcctaaataaagagtaacaggttatttataggagacaggagagctcgagaaatatcggctccaagcaaaaggactcaaactaatgtactaactcagtaggatgtccctttacaattcttgttgcataaaccttattctctgcagcagagacctttagaagatcccatttcctgtagcagagttctcattccctgcggccgagatctcattcccagactcgagaagtttaacaacagaagtggttggctggctcgaagatttcctcgtgtaagctttggtcttcagccatttgggttctttaatacaatccacaacctcgccaattggggttaccttctttcgggatttcttgtcggctcggggagaacctctaaacatgctctcaaaatctacgtccattcctatagagacaaagataaaagatcaatgacgcaacagtggcaaaaagaaaaaaaacatgtaataataaacgaattcagatcagaccactatttacaaagaatgatgctaatttttataaatcacttgtaagaatcgcccataacgatcgacagtatctccttggtttggattaatcggatgatcttcagtcttggaatctttcatttcaaatttaaactgaggtttgaagtttttaagacatatggagggggaaagcggttggtatattccggtgttacaagttttgagggataagtttctgagcctggatggggcatctccgcaggagagtgacaatctaatttctggatgaaattcaccaaaaactaggagtttatggaatgtagctagcctgagcaatcattttatacttagaagccagtaacagtaaggccaaaggttgggaaatttaacggttgggaatgaggtagaagatgaaagggaaattcattaatgctaataatgaccctcaaaactgtcgagccgttaaaattaagggcatgcgtggtcttgaagaaagggattatgatgattgtaccctcaatggtcaattaaaaagtaccttttatttaaaaataactttttaaggggaaattgttatacgtgaaattcgactaccatttcaacgaaaaacacatgtcaagattgggaagaataggaatcaatgcatgaaacggtaatcacatatgaaaatggaataactcattaaatgcaaaaatgacagaatatattcataacttgctgactataatgtcttacgcaagataaagatatgcaaactgttgcctcgtacatcaacgagaaaccatatggaagtggatgcgcaaatcgaggcatcaacctcgagtagacataggcaagatataatgactgttaagacacttagacgtataaaaacacatagcatacaaactaagtgtaatagttgggtgaacccaagcaacta

SEQ ID NO: 395337 - DNA, 884 bp, Cannabis indica
atttcccaatttttaatgaagaagagaaagattcacgagtcatattttcaatatgatgcttagaagttgtccatgttgaaaaattatcaacctgggcaccgggtgctctggatgctcataaatgaaagttctctgaatttgattttgatgcctcaaatattttcatggtatgtcttgttcatggggttgtcaaccttggcactgggtgaaaccctaggtgcccaggttgatttttgagtgttgattcatatatttttagctcccgtggcctagtcttggttgcttcatgtcatcatgggaaaaaaaatactaaaatatagagagttggaaatgacttattggaatccaaacactcaatttggagttcctagagtcaacttggggacaaggctagggactcctcccaggtcgaccactatgacgtaggagtactcaactctgagatgtcacatttcttgccacgtgtcaaacattaatgtccgtatcacccaccagggaaagtttccaggttagcattttccccccaagtcaacttcacacttgtgtcgggctaaggattttaattctctgtacaactacttgtcgcagcctcatgtatgaataacgaattttctgtatataaattattcaatattaaagattaataatttaacattcatacatctatcaaaatattcaactcttattaataattataaatgtccttacatgatttttagggcataaaccctaacaatctcccatttttcctaaaagcaaattgggcatctcccttagtcccatgttagttatatgacccataaaagatttcactggtagcgtctttgtgaatggatctgccaagttatgttctgatgcaaccttcaagaccatcacatcacctc

SEQ ID NO: 395338 - DNA, 716 bp, Cannabis indica
tgctatgtttagtgtgattttattaaaagaaaaaatgaatttatgtgtttttatcctatattgctcatatgtaatgtgtggtatttatattaacttcttttagtagcaactaaaatataaccagggagttttgataatttatgttattttaataaaaaaaaaatatctggtgatgctggaacagctatttattacggtagaaaattgtataaaatacatggtttatggagcactccattaactaatgtaattttataaaaaaataatatatattttttaattgaataaaatatatcgaaaatttaatatttaaataatatataaaaaaagaagatagattattatgtacggtgtaatgtaacaaagttgaagtaagatagaaaaaatataattttggtgatatattgtaaaattttaagtataaaaactaataggagtgactttaatttgttataattataaatatcatgcttctcttcaaagaaaaacttattttatattttatgttgtaaatgttctcattgtgaccgacacctataccgtgatggacaaattcaatctttttattttaattagataattttataataaaataataaaaaattagggtttttttttatttttataatttaaaatattattttttttttttgtatgtttacgaaatttctacctagaaactcttataacaactaacagaacaacctaaatcgcaa

SEQ ID NO: 395339 - DNA, 1963 bp, Cannabis indica
gacaaaggtcagtggctctgataccatgaaaactgagaagcagagagaacagagacaggaaacaagagaaacacaaggaatgctttgaactcttacctcagaaaatgaggataagcactttatttatagtagcagactttgtacaaatttacataatagtaattctgtatataacagaaaacagaaagaacagaaagaaaagcaagaaacaaacaactaactaactgttacatttaacacagccaaccaatttaactgatcttggttatcacacacttggttatgcttttcgaatcagggacacaaattagtatttcaattagcaagtcatccggaagaattgagttgatttggaacattatcttcttcatagacttagtttgcatcaccattgctgtttcactaattattaacaaatcacttactctattattatctcttcactatagctataggggggacaattttttttaaagagtagatgtaaataatagatgtctaaatgttacttaactatatgttagaaagtttttacgattgttattattttcttaaaaaaaaaaattaaacgctctacggctctatatataaaaagctctaaaattttattaactatatataaactatacatctattaccttaataaaagtggcaatactttcgtccttaactaattgaattactaaaaattccttttattcgcaccatatgtattaacacataaggtaaagcattattaggttattcacttattctatattatccaaatcacctttattattattattattatttgttgttgttttttaagttcacatcaatatatacgctataatattgtaattcaactataacaattaagtgattatgaaaatgtggatttgataataattttgtggctatttaaaaaaaaaaattgtaactgtccataattacaatgacataatttttaaattttatatgtttttgtaaatatagtatttaataatttatattttcaaaaataatataggacaattccgtaggataaataagaatttgtccccaatattattactattgtaaattttggtcctctaaatttttattctattgcaaaaattcttttgactagaaaaaattgcaatttagtgtaatttctattaccttctatcaatttttttaatgtaatcacatgtcacaaatatatttacatttcgataatttatttataaaactgacattatttaaaatttaatttattgatactaaacatacaaaaattaactcttaattttttttataacacaatttatgcttgtattttttactaagatttttgaatcacgccatattaatggcacatccgtactgcatcaataaatagttttcaaaataaacgaaatgtaataaaaagacatattttctataattgctatagttcaagggaatttttatcctacaaaaaaaaattaatagaatgtgattctacaaattttataattcaagggaaatatttagtattttaaatttagttgaacgcattttactacctgtactataaaatttgtatttcacgttgcgtagcacgtggaacgataactagtataaatataaagtaaaaaaaacccgaaaccacatatcgcatccctctcatccttgtgctcgcctaggatgctgccagaggtttcgcaggtacgtttctgttggctttgccggtatgccgcttgcacggggatgtggcctaaaccgtccaaaagacggtccgtggtgtgccttggccacgagtcattcgtgagctagtttgcatacacgcatgggacggatgcaccatgatggaaagagacagaggtctaacatatgctactagtttggtggcttatctcgagggcctaccaacatgcgtggaggcatgtgttgtgtttaattcaacctgtcagatcctattacgaggagtttactactattacacttgatttgtata

SEQ ID NO: 395340 - DNA, 1324 bp, Cannabis indica
ttcgtttcgatcatgttcagtatttatgaagtggtttcgttattctgtttttatttttgaattgaatggacctgatctaattaattaaatattgaatctaaaattgaatggattcgatatgatctaaaaaatactgaattttaatttttttttttgaaaaaaataaccattgtaggttagagaaaataatgtcgatgcatgcaaaagcgaaaagattaaatttgatctgaaaaagcctactgcatatcctaaaggcatactaaactaattcatgggccgcaacattaacattgcaacttatatataagaaagagatgcctccacaaagctagacaataaaatattagatatatagatttaaattagtccaatagagatacataaaatatatctaatagatagaaccggtccaatattccattgaattaaacctaatctgttgattgaaaatgaaattattttgataattagttgagaaaattcaacatccaaagtataattagattgaatctaaatagttctgaaaactttaaaagtagtccaataaataccctgattttgctctttcttggtggttatattaatgtgggcagaaagaataacttcattaggcatatctgggaaagagacaaaggtccaaccaagagatcaaatacatatggtggagtctcagacaatcgccgaccaaaccatattgcctaattagtgtcaacgacaaagcctggccaggttatgggctatggaatatggtcctgggccaatgctcaaactcaactcaactacatccaacctagtacaaaatactaaatatatgatcagctaaaacaaacccaataactgcataatcaacactcttgtcttttaaggcataaaaagagcagtcaaggtaataatattaagagtattgttattaggtactgtatgatacctaatctaatactatactgatgtggagcgttacgattaattaactattttttatattatgtgggactcgatataaattaatttacactaatagtaatatattattttttgtggtgattgataaaacaggcatttctctaatattaataaaacagtcattgcaaaacaacaaaagcttgggccacatgagactctatttgatgagctggaatattggtgaggacacgaggcattatcatgacattaatctcattattaagaacattgtttgcaattaattcccatatatttattaattaacaggtaaacttgttgagaaatataataataatataacttataagtgtgttgattatatatgcatgacttttttctaatgtaacgtgtagaatataga

SEQ ID NO: 395341 - DNA, 526 bp, Cannabis indica
aatttggtgaatccttctataatctaataccttttgcaacccatatgatctttcccataagacatcttagacatgttatggccactagtatcccaaaagtccacataaaaccttaacgacctgactgatatctctcataagacctaataaaatatcgatcgaagatcattactttaaaccgcagctaaaaacattgatggtttcaaaatattacattttatgggaaagtgaaatagctattccaacaatataatatatattcatagttataaaatgggcaatcgacccaaccacaataatttaagtgtcgtgcctcattttttgctattctaatttgataaagccttctataatctgagttttgtgcctcatttatttcccaagtaccacccacttgcaatttaataaatccaggcatttatactaaattggagtggctaggtaaaacaactagattttgattttattcaatattcatagaaattcaggtatgtatacctgttgaccgagattttcggcaactatt

SEQ ID NO: 395342 - DNA, 1053 bp, Cannabis indica
cagagcagaacgagagggagagattgaggtcgatttaggtttagggttgataaattagaggcagatttaggttgtttagggtttaggcaaaagaatgagagagagtttaattagtcccctgtttcctgctgctccgacgaactgctcgagccaccgttgtcggcgaagtcgaacaaagtgaatgagaggggcgactgatcagttttaggttttgggttgataaatggggatagggttgcatatttgcagctgtagtctatactctttattattattattattattattattattattagcctaccaaaattaaatgtaatctattttaaaaaatatttttttaacaaaaaataaattgagtgacattatttataaaagatataatatgctttatttttaaatgacaaatgtaattaattattaaaaaaattagaaggtatcttaacttttaatttttaaaaatagtagcaattaagtatatctgaaacaaaattagtattatattctttatactatgcgttgcacttatttttgagttgaaactataaacgataaattatgaattataaatatgaatatgaattttttttttgaggtaatgaatatgaatttatttgtagacttcaacaataaataagaatattagatcgtcactttagttgtgccaataaaatttacactatggtgccgtttggtaacaattatgttttctaatttttaaattacaaaaatgaggtagaatttttgtttttaaaattttgtttttgaaaaataataatgtgttctataaccacttttatttttcaattttaaaagcaaaaaataaaagtgtgttctgtaaaatttatttttattttgttttttgattttatttaagtcgggtctgggtccgggtccggatcgggtgctaggttcggtaccagggctagggccgagtttgggtctgagtcggagtttaaaacattgattaaaaaaattgtttaaaaaaatagtaaaagtgacttttttgtttttaaaattttaattttcaattaaaaaaattgaaaagtaaaa

SEQ ID NO: 395343 - DNA, 1146 bp, Cannabis indica
tatatttctcagatatgacagatgctgctggttctcacgggggtgatggagatcctccacttggtgcgacaaatattgactgactgtgtgcgaggttatgtaatttaaaatatttaacttatgttattaatatttgtgtgaatgtactaacttatgaatatttaaacatgacagtaactcttccaaagaaatgtgaaccccataagggattaagcacaagagaaaagcaaaaaagccttaaacgtccactacctatcgagtgggacatcaaagaaaaaacatacaaggaggtaggtccgtacgtttcaaattttttgagaaatttaagattactcgtatgacagtacacagatccaaaactacaaaaattgagcacaatcaccagactctgagaagaggagggtattttttagagtagagatgaattatttttagagttaaattgattctcgttaattatttataacattaactaatgaaatttgttttatagaacaatcttttcgatatcggtcgagaaagatatggaaaagattatatttttggtatcttaactggcattgataaatcttgtgccaaaaaaaaattgtgaattcaaacatgaactcaaagaatacttggaaactaatggtcctgcaactccatatgctgggtgcactatagaccaatagaaaaaggccatcacattttttaaacaacctgaagtgaaggtatcttagttttattcaaccccaattgattttttattaaaccattttaatttcacatattaatatctctatatttatttttgatagaaacgctcacagatcagtgtagcaaataggaaaaaaattaaaggagttgagccatgaaggatctcaatctatacatgctttatgttacaaaagagtatgattaatttataatataattattatatttgtgttttgttgttattactttgaataataatattaaaaaaaaatatctgtcacagcgtgatccagagtctgggggattggcatcgatcccaaatacttgacagaccactcactgtaagcagggcaaatgatgggtgattgacactgctaaagagacattggtatgttttaagcaaatattatcttctttatattatgtctaaataaattttataattaattt

SEQ ID NO: 395344 - DNA, 873 bp, Cannabis indica
ataaattattcagaattatttaaaaaattataagtgatcttaaataattacaactatgcgatcatgatacaaaaatagactaaaaatatttttttaaatacaaaaattatagatagaaagtttacatgacacaatccttcaaagggtctaaaattttcaataatataattaaataataacctttcaataaatcaatgatcactaatccatttcaaaatgaaaaaataaaaaaataaaaaaaaaaaaaatcaactaataaatggatcaatcttctcatgttaagagtgaacatgcaaagtggtcccttatccctactactctttttatttttcattttttaattttttatttttaaggttcacattgccatattactaaaagtcaacttaagagaggcacattcaacattgccatatacaaattgctagtgaaaaaaaaaaatagaaataaatagtaaaggtatgggaaaaagaaagaaataaattaggcattattatataattgttaattataacatatataattaaaataagagtgttgtcattttttttcataatcttatatacagaaaagggcttaaatgtaacgaactttttaatttatcggtattttttattttttattttaatttttaacagaattatactattacttaatataatatttttttattaattttattaatattattatataaatttaaaaataataattatacagatattttatataaaaaatttaaatttaaaatacttaaatattataaatattttaattcacatttttaattctgttggtttaaactttgtaataaaataaagtaaataaattctaactcaatcggttctaccgcgatatcactttgatttttta

SEQ ID NO: 395345 - DNA, 764 bp, Cannabis indica
atcggatcggatcggatgactcaattcaattggattggatcggatggaaaaatccaatatccaataaataattggattgaattggatcgggtccaaaatccattagatgtgatccaatgaacaactcctaaaacaagatagttatgttaattatggcaaatagccttccttggattctaaaatcattacctatgtcaagaataacttatttaattgatattaaacttacataaattcaaaaataaaacaaataagacaattattaattattacattgtgtaatatttatcctttgaccagagctaataatataataataaagttacttcaatactaaattaataatctatttgaaaataaatatgttacagtctttattcttacacacacatatatatatttacatgcacttgcatgtgtttttgccactagttttattatatttgtgggataaattagccggcttaaggcgtgtcacactacacaaattatttatttattgacaattttcatccatttacatgttcttgttatatattatatgtaacatcatcacaagagaattaatatggcgtttgtggtggaggtaatgaaataaaataaaattaaaaaaaaaaagaaaattttattctatttttttgtttgattgtatattaatactttttatacactttaaattttattcctttctattactatttttattcttatatttttattcctccctacctaaaatcattttttaatatatatatatagagaga

SEQ ID NO: 395346 - DNA, 1067 bp, Cannabis indica
gctatttgcttctacaaagctatataaggctgagtctcctcctattgcagctgaattaggagccataagagatggtttgcaggatggtacttcaatggcggttgcggagatttacagaggaatcggattgcctcgaggcagtgaagatggtgcatgaaaatgaggtcagcggccgtgcaaataagagcatctccaatggtgatactctttaagcatgtcaaaaaatttcatatcacctgaaaattaaaaaaaaaaatttttattttttacactttttcacataaattttcaaaacttttattctaaaatgttccaataataaacaccttccaaaagatgtcatttttaagcattcttacttggcatttttaatttcactttaatagtaaatctgttaaaagatgtcaaaaaaatatatatatgtcatcaagtatttttttaaagtatttttattggagatgctctaataagtcttcttgagcaacctttgtaatttgaagttcttttatagaaaagctatagcttagccaaattatactttggtgatcaaagttagtattttgtgaattgggggttaattctccttgttctagtaatgctctcaggcaagacttgccattttctgtgtaatattgttcaagttgaatataatagtttcatttcaaaataaataaataaattataaaatataataaaataatattttgaaaaatatctaatttaagttgttctaaaataactaaattttcaacttaaattattttcaaacaaaatttaattaaataacaaattaagttgtaaccacttaatttgaaaaatattccattttaagttgatccaaattttaacaaattttcaacttaaaaaatatcctaagaatcttcaataactaattcctagaattcctcaacttaattttgaaattcaaaagatattcaaatttaagttgataaaaaaaattagttagaaataactaatttacaacttaaataggaatatttaatgaaataataaaaaaataagcttcaaaggaatctagttagttataattctatatttaattaaat

SEQ ID NO: 395347 - DNA, 971 bp, Cannabis indica
agatgtgtcaccaaagaagaagttggatggctatatgctcgaagttcacaaagatgtttacaactatcacgttgggggaaaagtctgtcaaagaaaatactcataaaagggtatttctggcctacaataattgaggattcaatgaattatgttaagaaatgtgacaagtgccaaagtttctccaagatctcgagagctccaccaaacgagctcatatagatacaatctccatagccgttttctatatggggaatatatcttatcgggaaactccttaaagggaaaggaggagtacaacatgttgtggttgtcgtcaaatattttaccaaatggattgaagctgaacttttagcaactataacttcaaagaaggtcctcaatttcgctgttaaaagcatcattagttggtacagtcttcagtttaagattgtattagaaaaaggaaaaaagtttaacagtgatatgttcaccgactgttgcgatcggcacgacattattaaaagcttctctattgttgttcactcacacgaaaacaagaaagtagaagctgtaaacaaaaccctcaaagacacactgaaaaagcatcttgaagaggcaaagggaaataggcccgaaaaacttctagaagtactttggtcatacaggaccactgagaggacaagcgtctggcagttaccctttgcattagcctatggctatgaagcaatgctgcctgtcgaattggaacctgttggattatattttcccaggacctagatttactaacaagtatgtttattaacatcctaaatatgaatttctaaaacaatgaaacttaagcacatataaagtttgagtaaccttacattgattgcagcgaaatacaatgactcctcccactcagatctctaacccttgttcctttctgtcgcagagtattatcaagatctaagttcgattcttcttcagttgtttggattcttcacagtctt

SEQ ID NO: 395348 - DNA, 1051 bp, Cannabis indica
aataattaaagattgttacaaggctgcgatcacaactatgatatatcttggttttttataatttttgttaaaacacttataaaaaaattttaactttttaaaaatataaaataggataatttaaatattcaccacaaaaaattttatttttagtcctaataaaatttatgattatataaaaataattataaattattaattattatttttatgttgtggctaaaatgtgtctataactaaaggtattagtcacaaaaattacaatttattttaaatatatttttagtcacaatacttaaatcagcgacatattgtatctaaatatatatatttaaatctatttaaaagtatatataaatttaaattaaattttatatatgaaaaatatatgatagaattgagttatatttattttatctaaaaatattaaaaatattagtccaaggcataaaattagtaagatactcatgggaccccaccaaaagatatcaatgtacatggttataggcataatttagtagttttcacatcaaatgagtttttgaattttctacgttagggttttgaaatcttgggaccgaacccgctcttatgaaaaataggtttttttggttttaggcccgggtggatcaaattcgggtgggttgggagggctatgctttttttgtaaaaatatgtataacttttttaacaaagaaaactacaaaataatgcaattacacaatatattattatcatatatatacaaagacaatacacaataattaaatatatatattattattatcaatttttattttacaaaaatatattaattatagacaatttgattttttctttctctttttattaaaaagtatttatatatataattatatatacatattatataatctataacatattaacaatttaacacactcatttgatcaatagtgataatgacgtggtttgcatttcatatatatacggcatttcttggtttaacagaatatacttaaaaataaaagaatattctgttaaatttaacgattaggtttgatctcccgtt

SEQ ID NO: 395349 - DNA, 657 bp, Cannabis indica
gactcacatatttacatatatattagccattttagatttacgcacgatttagaacagtactataatttaataatatgttattatatacgagatcatatctgatggtcgatcgttagagatccacacattgaccatgtgtgggagctagcttaatatatagtatatctgagatgtataaactattctgctctttctcaatatatatattgaaatatatattatactatcgtttaatacaaacctattacacttattttgaaagatcctaatcaaatctattatagtatggagtaggtaaaactactctgatgatgttttataaaagaaatgtacattttttctttctttaattaaattaggaaatagttgtaactttattattttaattcatattttctttaattgaaatgtaataagggggtaatttgtggttgtctttaatgcaagtacaatattctctctataagagtatatgaattacaataaattttatgctcaaataaaaaaaaaatgataagattgaattattgagaaaaattattgaagaatacaaataagaattatttaagaaaatgttgtatatgtatgttatatacaaatgagaaaatgatgaggaatacaaaaaattacttgtgactaaaatatagcatttagaca

SEQ ID NO: 395350 - DNA, 1224 bp, Cannabis indica
caataaaataatttctcaataactatttggagatattacaattttatttttttttggatgtcgacaccactgtcatcgatgatttcgaattattcatgatttgctcattggcatgatattgtgtagaaaattatttttttaatattgatattcatgaaaagtgatgaaaaagctattataatttttttttcttcattctcatgtgatactcttcattctttattatatttttattgctctctatataattattttttgtaatttttttctcaaaaagatacacataacacacatatttttgatttttttttatatgagattttaatatacaatcatgacttgcgataatatatattcattatgtaattattttaaatctttattgtataaagtttggatcatgtggtcaatccattctatatgatacttttttggttgatcccaagttccttgaaaaccattacaacacagaacagactcttggtaaggaattttttttatcatattaagtaaactctttataaactgtttattttttttatttttttttttaattttgtaatttttttatactttgtgactaataatttcattttttttttgtttgaaaaaatatataacttttattgtggcgagatgaatttagtgctttatttattttcactcaaacattaagattctttttattaattatttactatttcttctttatttttattttcttaataaataaaaaattgtattgctacaaatttcatttataaactagacaacacaagtaaagaaagatgggttgagttgtttagccactgctataatatacatgacatatactattttaatttaacgatttaaaatattttttaaaaaaatattgttttattttacaatattcacttttttttttttcattcatcattgtttgatttttttttaacaaaaatcataaacaaaatatcaagttcataaatttatatatataaatatagattattatttattattaatttttttttaagttttttgacattattatctaatatctcataatatatattattgcaacaaatgttaattctatttttggcatatttaattaacaaaaatattttattattctttgtataatttcggctggtatactttaatatggtttcctatttggtgtattcaaacttggaaggaaagttgtctagctttcctatttttggaaaaaaggtaaaa

SEQ ID NO: 395351 - DNA, 877 bp, Cannabis indica
tttggattgacgacggaggaggatgacgtggcggtggcggtggcggaggagggaggtgagaagagggagcatggtctgagtaagaaatttgaaatggagcagggaaagagaaagaaaggggttttaggtttggagggaaagcaaggacgagcgagtcattctgagttagctaggtccgagttaggtaggtgacagctcactaactaacccggctccacatttcatctacttggaccacacactagaggcgcctaagtatctaatatgtatcatacgtatacggacatgagaaagagtatgagttcgcagcacttttgtgcaatttaatattgggtgccttaggaataaatgtgtgtaattactcacagatccagaagaaaaatgttaaaaggtaccaatggtgtcaagcaccctcttacgtgttaatattgttattggtttaatttagtatcgggtcctatatagtttaatataatagcttttagagagtatcgctagcaaatcgtaaggcgacacgtcttaagggtgttaggcactactgatgctcaatagcaatgctcgacccaaattatgctatgtaatcaatattgggtgtgcttagaattaattatgtaattactatcctagtaatttaatactaagtaaattacacacaacataatttaaatttacaaattcattaaagggtagagaaaatgggaacgagaggggggtccctttccttggataacaccagtattaaggctagattctctagcacttctagctatcccatcagcaattacattatctactcgactaataaaaaacagattacgggctcgtttagaacggcgtattagatcgtattgtattgtattatattgcattggattat

SEQ ID NO: 395352 - DNA, 1121 bp, Cannabis indica
atatatatatatatgatataaaaggttcaaattgcctaatcttgaagcaagctagctttaggtagattaccaagtatggaatataatattggagaagatgggtgtcaccctcaaccttattttattataactttttagttagtctttgtgttcgaaaatatgtatcgaaatatttttttaatagcgatgtttgttatgctcacaatatcatccatgtaaattttgaaaattttcgaatagtttacagtattaaagataggttttgagtttttttgaacatgaccggtcaactataatatcaggaactcaaactggtactgtaatttattcaaaaatttacagagataatattgtaactataacgaataccgctataaaaaaattaaaaaaaaaaatattccaatatgtgatttcggacgtaaaaattaacaaagatgttataatagaagattgtaattaatactcctctataaaaaaaaaaataaaaagtctccaaaatagactccacatacgatccctaaatttttgtacagatgtcagggtgaggaacattccacagtcttactaagggagatgctaatcagtgatttattgttaaattatatctttaaaaaatttattctaatagtatattaaaataaatttgtcacataataaaaattgattcaaatatatatcatatgatataatataaaatttaaatcacaataaatatattatttttatatttacttttatattatttttaatattttattattaaaattaattattgcaataaattataatttttttacatttattttttatagctttatataataaaataataatgaaatcaataataaagttattattacgttttattttttaataaaaaattaattaaacattaaattttacatcaagttttataattgtacattaaagtacaatattaaaatataatataaatatatcacaaaattattttatgtgtcaaatataatacaaattttatatctttcagaaattatctaatgtgatgatgtccgtataaaaaatttattttttgaagaaaaaaacctaccaaaactataaattatctcatatttttttttttgttttggtaaaaaaaaatt

SEQ ID NO: 395353 - DNA, 806 bp, Cannabis indica
ctcacctccttattgaacaatctgagccaacattttgatcaattattattaaaactcaaatttatgcacacaatctcaaaaatcttcggtataataaccaaaaacatatagatcattaaggaatcacaacaggaaaaaccctagatcatgtatgaaagatggaaaaaactaaaatttaagaaattatatacattatactgattgagaaaacaaccgcagcaacacttgtgtcgaagtaaaaatctagaattgaattagataggaatacagaatgtgactggaagaaccaccttctttgctctaaggtcgcaaactctgaaagaagcttcaacccttttggaagatggaatttggggattagcagaccagaagtttctcttcagcactataggcccaaccctacaaattctaaatcatttctaggcccaatttctatcaggtgggcctttagtggagaaaactaaagaaaagatagtctaaaatgatagacaaattatgaaattagtttacttaaatatcacacttttaagtttgacaaatttatatcattttttttgtttttaattatttttatggtatttaatattccatatatataaattaggttagaataataacctaaagcaccattttttgtaaaaaaaattatatttttatatttaaatatttttacggttttctatagaaataatatgaaaacaacaaaaaaattacataaaaataacatgaaaaataaatctaaaataatatcaaaacaacaacaaaaaataacatacatatataagaaaatcaacaacaaattaaca

SEQ ID NO: 395354 - DNA, 740 bp, Cannabis indica
gaaagattggttaaattggcaggggaatttggattctctgcaagggctcctgaaatggattaggaagtcaaataattccaagtttctaaagaatgttaaaatggctactgttgcaactcttgtctattcgatttggagggctagaaatgacttgttttggaactcgaacaggcagcagagtgctgagattgtgaagcagattaaatgggctgttaaaaatagaataatgtttgcaatgccaaaaaaagtaaagcaaaaagatagagattggttccaactattgtaaataatgttgtatagataaaattaaggcattttatggtgcttttaggttgtaaaagtgagtttttttgagcaatgaatacattaattcataaaaaaaaactttatttagtgaaatatatactcatctaaccgaaatgtacattaaaaaaaacagatatcttattgtacccaaaacacacatatatatatatatagttaaaaaataagtgggatatgaagatgcacctaccttgaagaaattaatgtggtcgacgtagaaatggtgtcgggtgctctagcaggcaagaagtatatatatatagcttccttgaataatacaaaaagatacaatgtttaggttttgggatataactttctgaagagtaatacaaaaagatacaaagaactgttaaaccttgtttaggttttgggatataatgttttggatttagagaaaatgtgaaactatagcttaa

SEQ ID NO: 395355 - DNA, 734 bp, Cannabis indica
ttttttttgttgcaaaaattcttctgaaatatacaaatctttgcaaatatcttcttatagttatattctgatcattttttaaaacaatttgtttatatggtcataagttacagatatacttgcaatagagaatctatataataaatttaagatacttgaaatccagttttttaaaattaaatatacaaaaattagctctaaaagtatatatacatatttccataatttatcattatactatttttttatatatctattttttatacaaatgttatattaacaatatgtttaaagaaatgaaaccaatgtaactggagtctggagggaaatatttatggcaatctttataatttaggaagaattttcacggtaaaaaaaaatcaagggataaaactctacatagattatagttggagggggactaatcctatttattctaaattgagcaatttgcggcgaaacccccttatgttttgatttttatacacttaacccccttatctttatttttggtggcaaaacccccttatgttttaatttttatacacttaacccccttatctttctttttggtggcaaaacccccttatgttttaatttttatacacttaacccctctatcttttgttttggtggcaaaacccttcagtttacttttctttgcaaatttaaagttttagttaaatactaccgttaaatactaactggattactactgtatcgacttcgaggtt

SEQ ID NO: 395356 - DNA, 724 bp, Cannabis indica
ataaaatgttgctaaaatgtcgtaaaatatcgataacgaatcatgtttccatttgttaagcttcatatcgataaatgtaactaaaatatcatgaaatgtcgataacaaatcatgtttccatctgttaagcgtcatgtcgagaaaatatcgcgaaaatgtcatgaaatatcgataacaaatcatgtttctatttgttaagtgttatgtcgataaaatgtcgtgaaatatggataaaaaatcatgtttcgacatttattggtaattaatttttgacatttattatccccgcctaaccaactacttacatatgtcgataataatgtcggtaatacgacatgttaacatgtcgcatggtgtcgttagttgtcgcaaattgttgcctagattgctctgtgcatgacaaacacgtgtagaattgtgtaattcatttttgacatttattatcccaccttcccaactactagttgtgtctttataaaagaaattttctacttcatgagttacatatttttcttattatttaaccctagaaggtaattctcttagaagttctaaatgtctactacaaggaacaaggacaaatacccaattctaactcctgaagagatcaagcaggagcttgattgtggcaaaattaagactcaaatgtaaaaagttctagacaattaacatgaaatgttttgaaaatgaacgggttttgaacgagtggaggtacctacaactt

SEQ ID NO: 395357 - DNA, 512 bp, Cannabis indica
aaaatttttaaatatttaaaattcttttttcattaatattttgtgaactaaaaaaaaattatcatgtgtacacttgtgtacacatgagcaatctattgtggcattcaattgagattttcatacgacaaagaacaaaacagaatggagattcagtaaattttatcgttaaaattttagttttcgtggctaagtgttaaaaattaaaatttaagtaattttacaatcaatagtcctaaaaaatatatataaaaaataaattaaatttagaacaagattatttaattaaaatgagtttgagaggatcatttaactcaatatcctttttttttctttattactattaggctaattaggatttttatccaccaaactttgacatgtaccaaatcatggcccctgaacttttaaggtcgttaaaaattccccctgaactattgagattgttggatttaagggcttttgtctaattttagtaagaaaaagtctaacatggatgaaagttcagagagcat

SEQ ID NO: 395358 - DNA, 705 bp, Cannabis indica
tcacaatgccaaacattccattcctttcttctccaccaccatcttaaatttcataatttatagtccttgaagatgatgaaaatgtttttataaagtcttaaatgttttctctaccttatagttagtagagaccatattattatttttctttgtactttttgttaattataggtatgtttgtgtcattatttaattacaagaaaatgttgggttttttctcttgtactcttgtttgaggtgtgatttattattggtcttgtattgtcatatacatatgaaaaagaaatttgaaattatttggagtgttttgtaagcattgtatgctgtcccttgtactacatcaatatccatttatatacattaaattgaataatgccatttttgtaagtatttttataaattaaagaaaaggaaaaaaaaaatatgtcactatcaaaaatatgactatctaaaaatatatcactgtttaaattacaaaaaaaaaataaaatatatcactgtctaaattacaaaaaaaggacaaatatatcactatcaacattagtggtggtacatttgtggaaagtggtgtggtctatttttatgtgtaaattacataagtatgacctttttgaaaaatatatatatacgggctcgtttggaacgccgtattaggtcgtattgtattgtattgtattatagtgaattgtattttatgcaatattt

SEQ ID NO: 395359 - DNA, 1063 bp, Cannabis indica
ttttttttataacaaataatattgcatgtttcttgttgaccaaggttttcggcaaccaattaaataatagaatgagaagagctgtacgaagtttaatgcagatagtttaatgcagatgatttttacgtggttgagacattaatgagccttagtccacgagtctttgttatttatgagagtatttttacagagaatgttcttggtgaatccctctctcttctttactcccttcgattccttaattaatcgatcgaccccttttccattatgtctatggggtattagtgtttttcgggggatccctagaaagggatcacttgtctttttgtattaacctcttaggggcacaaattcctaatagatacaaaatagaaaatacatgacctataccgtaggtatcttagggattaggtggatacaatcctttatcttttcttgattgatgtgagttctcataatgtagttgttgagtctatactcgtcgattgttgtgttatcaccgtaaaaagggcttacgccatctgtcaaatccttttatggaggttctgataggtttccccccatgcagcattaaatgcgaagtgactgttcgaacaatccctttccttcccggagaatgctttgttacagtcctagcctttcagagagtaaaggtgtgtctcatgctcttctccaggaggctcactccatgaggtgcacattcctgcttaagacttaattgattttcgtgggtagacccttttttaggtccacgtgtcaccctcagccgctgccacgtattttggaaaaaatctgaagcaacatttcctttttaaaatatactacacattaattattttattctaaaactcaaccattgtacaaacaaatttaattaaaaataattatgattaatattttcggtctttaaaatttttacattaccaaattttagttcttctatcatattttattaaattaatttatcgtttaactagtgatacagtagatggcgtacaattgataattaaatgaatataaattaaatacatttttttttactttaataattaaaaattaaaac

SEQ ID NO: 395360 - DNA, 869 bp, Cannabis indica
atttatacacataataattaattggataatgaactcatttgttaattaaataattaacacatttatacacataattaactcatttgttaattatttaaataaatttaacttgttacttgtggaaacacaccaatcatttgattatcttttaaatgccgtgacccatgcctatcaaagtttttttgtctctcattaaagaacaaattattattattattattctttttttattgtgtgtgtggttttttttttttaattaaataatagtgtgttgtttcttttcttaaaagaaagagtggaagtgttgcggattatattgtttgatttatttttcatacatatatgtatacggtgagacttatctgaggcacttaccccgttaaagtacatattaattaatcatatatcttattttatttttattaattacatgtaaataaaaacaatataatatatattctttttaaaaataaaatgtatctgttatactattttattttattttttaaaaatactttgttctcgtaaatcaaaattattattataatctttaattttaaaattactattacaatttttaatatttttagaaaagtgagatgataatgtagttaccattacattatgcagtgaaatttttattacatttatgtaattaaaattacatcataaatattaaataaaataaaataattcacgtatccttttttatctaagaataaaaattaaagtatggatactattgtgaatttatcacttattctaatatttcttcgattaaatagtgacataagtactcaaagttttaggtttgtaagcggcatagacccaatgattttttttagtagcataagtacccaatgtttata

SEQ ID NO: 395361 - DNA, 985 bp, Cannabis indica
caatgaaacgcacgaaataccagtcaagggggggccccaaatagttggcaggggtcatgattgcatttgaaaaatgagcttacgatgagtccgaccgcatacaatccattctccattgaaaataacggaagtttggtttgagctggatcacattgcgcacgtactgtcgttgccagcaaatcagcatccgagtcctttaaaaagtacaattattaaattttaaaaaataatttaaaacaaaatgagattgggttataaaaaaaatatataatatatatcctaatacgttgtcgttttgtgcggtgaatgcacgtacggattgggtcacagccacaaaacaggttgatccacccgataacttgttggagctccagctgtgtttagcttaacaaaaccagttggtgttgttctcattaaaccacgtcacgtgggtcccactctcagtgttcctaatccaattggttgatttacttagccaagatgagaaacaatggggcccaccacactataactaacatagtaacaacatgagccaccaattcatcacagccgtttgtttggcttcgcttaacgacgagaatgacatcttagcttttttgtcactttccatcaaagataaaaaaaaataaaaattgatgcttttgttgcacgtgtatgttcttacattttgatccaactttaaaatataacatacattattttattatatgatcgaattcataacaattgaatgaggaatcccaatgttttaagttatattttgttataaagaaaaaaagttatattatttggtaacctactacactaaattaaagctagtgtttttagtaaatatactgttgttaattattacctactacactcttctcttgttaatatttcaaaaactaaataaaaaacttatcatcatacgatttgcttggttttttattttttattttatttatttttttattttgaatggatcatacgatttgctttgttg

SEQ ID NO: 395362 - DNA, 628 bp, Cannabis indica
caccaagtaaaattcctacaaaaacaatgtgtaaacaaccgtttttttagaataacatagtaaataacaaatttttttagaagaatgtgtaaacaacggttttttaaaaacatgtattaatgatttgtaaagaaaaaaaatccgtaaaattattaaaaaaaaacaaaacttgaaattttgtaaaaatgtaaattttttttacttatttttgaataattataaaataatccttaaataaatgtctaattaaaggaccggtgttacatggatatagggatggatgggtacttaaggtgctaactaaatagaaatgccaatacaagtaattataccgtggctattggcttttgcactttgtcctttttttacacacaattcatgctatactttctttgttatttttttttaataacagtctttgtaatttgttttagatttggaaaactttttcagaaagaaaaaagaaaaaatcgtactggaaaaaaaaaatggattcacacaaatattcatgcaattctttgttagttattattatttacaaaaaaaaaaaaaaaaaaaaaaaaaaaactactagccttaatttactgcaaaatttcagaattaccaaagtcaatgtcatgaccataat

SEQ ID NO: 395363 - DNA, 770 bp, Cannabis indica
gtatgttcatgtttagttacgtagtcttcatagttttgattagttttgtataccaagttacaaagtaaagttgggagttaagtgtgatctcgtgatttggtaaagttgagaaatttcaatccatggtaggatgtgatctacaaaaaaaagctattatataaatattacttaaataaattcgatgcctcacccattatagcaagagaattttattcataacggcacttttaccatttttttttaaactatttttacgttttttattttataattttcaattcaataaaacttaatttatataaatatcacttttgatttacacaaataaattcttcctgcgtatacaaatgaaaatgaaaagaattcacattagctaacatgaaaaaagataaaatataacaaaccaaagaatgaaaaaactaatttgtaaataatatatcaagcaataatataacagtttgacaaagaaaaaagacaattgacataaatttttactaaataaaaaaaaaacaaaacaaaagcaattacaaatataaacacttgaatattattcgaaccaagaaaacatatcattttcgaactttctataagcacttacagcaatatagtagcatgttagacttttatttgggcttacattaaattttattggttttattaaaacttgggttgattggatagttctttgctgtgttagcccatgttgttggtgatcaattgttaatgggcttagcatctgtgtgtaaagtctaggtgaagcagaagtgtgg

SEQ ID NO: 395364 - DNA, 1474 bp, Cannabis indica
tagtgtttcggaactgactttctttcaccatcatatacacaagaatccttcctacaaattaattatatatatatatatatatatatatgacgtattaatttgatcatatgtatatacatgtttaaatggtgctaattaaataatatattattggaagaaaaaaattgtaataataattaatgcatgaaatgaataattaataagcaaaaacatgaatatatatttacgtattagtaataataatatttggttcctatgaaatgatgatattataatgcatgcaacaaaattagtggagggtataaaccacttggtataacagtgcctattccattaggccatcgactattttcacccatattatttggcataattcttcttatttgtttcttctttggagacgtagtcctagctaataaggcatacaacacaaatatatgtatatatatatacatacatatatatatatatttcacattaaaaaattacttatattatatatataataatttttataaaaaatcagttaccatgtcaatatgcgtctcttatatattaagttcgatcgagccttcatcatcatgagaacggcagtggttgacaatatttccaattatacaaaaaaagttagaccctatatacatacatattaaataatgtagctatatatatatatgagatgagaatcatttataatatatatatataacaatatagtttgtagagagaacaatattagttgtaattataatacacaattttaagtaattatattttcagtattactagttaattctttttgtttaataacagcagtgagagttaaaattagctagggtttcccacttacacagaaatattaactgctgtttgaaagattttatcgaacaattttttttttttttttgtaaaataagcgtagttatatatattaaaagatatattagagctctcggtcattacacaaaatgttgttcggtaaagagtcaatcggaatatatctgtacatctggttgttaaaagctcaataagccacattatgggccataatattacaagacctactaatgttcgaaaaattacaacaaatgaaataaggagaagacttagtacaaaaggagacatagttctctagagcccaatgggatgctttcccattaagggcatcgatcgctagcctcgagtcactctccactataatatacttatgttggagctccatcgcaacagacatcgccaagcagcaggccgcagcttctccacaaagagcatcaaagaaatccaaccgggacgtgtgaacactcatcacccttcccagatgattccttgcaactacagctatacacatactctctaagcccacacgaacatcacaattaaatttgatccactccagaggtggtgggatccagctatccctcatcaacggcgaaggactaggcaaaagagtagtatgtatctctgcaaaagaaga

SEQ ID NO: 395365 - DNA, 984 bp, Cannabis indica
caaaaaaatctttttgtaatcttagataattactgaacacgcaagtcattgaatttatggcaccatatcaaatcacgtagtgtacatctcttagcaaaaaagcatataccatatgaaaactaatttcaccaaataaatattaatatatattattatctcgtcttctccgccgttgcctgaataataataataataggtaataagattaagaagtgatgaattaataatagagaggggtggaatcactttatgtaataaaagagccaaacacataaagcaacaaagaaacccactatagctactacacacaccttcgacaggtttttatcattactagatatatggaaactctctgaatagaaaaggccaaccagcataaagttataaagatcttcccaaaggtggcctaacaactgtgttataaaataataacttgtattataggctaagtttatatatagtaaattctgtaaaagagtgttttgttcagtaaactatatattcagcaatcttaaataactacattatccgtttatgtattacatatttttctgctaaatggtagttccctgaggaatgactatctcataattttctgtcatagcaacttgaactttggagttatattattgatatatatataaatatagggtgatattatggtagggcctctagtgatttgctgcaactctttgtaatctaccttcctaatctgatctctaaaacacaccaagtagtgaactgatcccttcagctattgatgtgtacgtacttcctcccgaagtaaggcttgaacaaatcttctcctgaagatatatgctcactcccttccgaaatgaaacttggaaaagtcttctcctgaagacccacacttgttcaaagattctcttcaacctgttctatgaatagtatgagatcataataagaaaactaaaacctagtcgaacactctaggtttttacaaatgaaacactcttctcacaa

SEQ ID NO: 395366 - DNA, 991 bp, Cannabis indica
agatttggtgctatctgttttagaatagaaagatcacagggccttgtttcaaatgcatcaagataaggctctgggttttgatgtgatgagtctgaaattttatcataaattatggcatattgtgggggcggatgtggtgaagttgattcaacatgtattctcttcggatcagtttcctattggtattaacgaaaccaatattgttcttattccaaaaaataagaatcatgtgaagatggaaaatttaaggctaatttctttgtgtaatgtggtctacaagattgtttctaaggttatggtcaaccgataatattatggtatcgttttagattatgcactacttgaagcgcagggtgtctggaaaggaaggagtcatggcgttaaaattttatatgagtaaagtgtatgacaatgtgaagtagaattattttagatttatgcttcagtcacaacatttggtgcaataggcctgatccatatttatgaaaaaaaatagtaattttttaatatttttaaattaatttgtaaggcacaaattaattgtttcaacaaatgaattttttttattatattaattattgttaaaagaaaaaaaaccttttgccaacaaaaaaatggtagaattaataatttcggatattattttataaataatttaaacattttagaaaatatacatatatttaaaaaatatttatgcaaaaaaagttataaaatatagatgaattctaaatatttttttttagatttaattcgtgcttacatgtcatgcttttgcactaataatttgtacttttgtgcttgtcgtgctgtacttaaatccatattttttatgtcatgctcaaacccatatgtatttgtgtcttgccgggctcaaactcaaatttttcgtgtcgtgccaaaaagtcaagcctgaatttacaactttaaaaattaggctatttaagattctcctcgaactataacttatgtattattgtgtcccttgaat

SEQ ID NO: 395367 - DNA, 572 bp, Cannabis indica
aaaaaaaaaatcaaattattttcttaaaattaattacaaacgtgatattgacatagcactaatgtgacaattaggtatgcagcaatgccatcattttatttgtcgtgtgacaaaacttgataaaaggaccaatttacaatactatgaatagttcatacattatttttaaaaggctgaaaagttcaaatagcacaataacatagtttgaggataaaatttttaaataacctaaaaatgacaaaaatgaccatgtattttctaaaataatacaaataggacattgagctcaatttttgacaattttttttaaataaccaactaaagataatttttagcacgaacggtgtagaaaacgtaaccagatttgtcataacacatttatatcatgttattgttaaattttattttggcaaaaaatttgttctggatactattttggaaaatatagggttcaatttattattttataaagggttatttgcagcaaaaccccctaaagtaggcagatttttgcaactaaccccaaattctaaaaattttggtgggaaaaacctcctaaacccagcttctgt

SEQ ID NO: 395368 - DNA, 1414 bp, Cannabis indica
ggccaagcctgcttcgctagtaaagcttgattaaaatgaatgaagctcttaaaacctaaacctccttccacctttggagcacaaagcagagaccaagtcttccaatgaatgcccgaaccagaggaattcgaaccccaccagaatttattcatcatcacttcaatttggttaattagtgacttagagaggcggaagcaactcattgcatatgtcggaatagattgagcaacagcttttaagagaacttccttaccaccaatagaaaataattgctcttgccaagccgaaagatttttccatagcttttccttaatctcagcaaacaagacttttttatcccttcctgaatatgatggtagacccaaatagcgctcatgacacggttgtattggcattacaaaatctgttgtagacacgtttggattgaagggagagtatttggggagaaagataatactgacttgtccacattcagcttttgacccgaagctcggcaatagatatcaatggatgatttaatggcagctgcagaacgttgattagcacggcatagaaccaaactatcgtccgcgaagaacaagtgagaaacacttggaacagaacgtgaaacccgtaaaccttgtaaattaccaatagcctcctcatgttggaaaagtcttgatacgccttccgcacatataatgaaaagataaggggataagggatccccttgtctaataccccagcttggatgaacagtcccttgaactgagccatttataagaaacgagtaagaggcactttgaatacatcgctgaacaaggtcaaccacagttggatgaaaacccaaggcaagcatcatgtgttgaataaaatgccattcaaccacagtaaaattgaattattatacaaattgaattttttatatctaaattgatttattaataaaaataatatttatttattttttaaattacttaattacttttaaattttactttcttttttaatttatttaatcattcaacattaatttttttctttctttttaacatctaaattaattttttaagaattatcaaataaatatgttcaatctttctcatttttatttagagggggaagggtaggatttgattatcaaagtttggggacaaaattactaatttatataaacacatcagtatttaaactacacagtgggagggaacaaaaccaggaaaaactaaattttttgtaaaatatcaataaagtcgtatattttaagagacacgatatgatagtatcataaatttaggagtataaatgctaatcttcaaagaatttacatcattaccggctagctcaagtggccatagagagtgcgtgtgtattggaggtcctggggttcgagtcccaaattatattgatgtaatatataaacgcttaaataaaa

SEQ ID NO: 395369 - DNA, 852 bp, Cannabis indica
tatatatatatataacaagtaattaaagtcttaattaataaaatagtacaatatatataatgggatcaattataatgagttattgtagggtcaaaaggggagaaagacaacaagtgataatatatatatatgtatattatgtatatatataagttggatgtgtctctgttgtgatgtgagactttatatatgacatatattagccaagttaaaagagttcacgggctacattttttattaaaaaaataaacacacaaaaatcacttctccatatggtacgtaaaaaccaaaaccaaaaaaacatttgaaaataaattattaaatattagtcagacaaatatatatctctgatataaagcatagctatatagaataataagtcatatatattaaaatagtacaaaacatctttgtcccttctcctcacatgttggatatatagcattattcccatctctacaaattgctgcaaaatcctacatatgaaaacaaacatccactgcatgattatacaccttgtttcaattaattgaactatataaatatatatgctttattgaagagacatttttcatactctttgacagctaattagattattttatataactttaggtagcttgattaattcccacaaagaaggagtcaattatttaaagcatattgttatctcaaattccaaacagagtgacgtggcgtttatctgagtaatatatggagtattttaaaatttggacgggtgatactgtaacgttcccgtttcaaacttctattgggcacttacacccacgaaataatagttcttatacacgagtacatcactctggttgcttcatggactgatgactgacc

SEQ ID NO: 395370 - DNA, 2246 bp, Cannabis indica
atgtaacattgtctgtggtacctattttgctcttgaagaattaaaattttgtgcatgcttttacatgttaacatgcatcaacattctcttttttggtaaattccttataacttttaaggtaatttttttaggttaattagtaatttttctccttgaactttgagatgtagtaaatcgtgtcccctgaacttttttggcaattaaaaatttctcccgaactattgagattgttaaatttaaggacttttgtctaatttcattcaattttgtttcagtgattgtttatatactaaaccatgctccccagactttgatatctaccaaatcatgcctctcaaactttgatatgtactaaacatgccccttgaactttcatccatgttagaattttttacataaattagacaaaagtctttaaatttaacaatctccatagttcaggaggaatttttaacggccaaaaaagttcaggtgacacgatttagtcatgtcaaagtttaaggaaaaaattactaattagcttttttttattcattatgcgtacatggtacaagtgtaaaaattgaatatgtatttttttttttttttttgagtgtcctacgtagtataatgatattataatcaattaataatttaagagtcatgagtttgaatctataccctctcctttttttacatctttctctcacccctaagttaggcttagtagattttttttaagagatttggtaatatatatttgtcctttgaaaattaaaaaccaaaaacaattataattggctatgtgaatggtgagaatggttgtagtccacagatggacatgcattgttctcatgcttgtaatataataataataagggtcaacttcaaatttcagtacttgaaaaaataactttgaatccattggtagtgatactattattaacttaatcaacctaatagaattagtcaaaggttacagaatattttgcattagtttatagtcatattaaatcatgttcatacatatgtaatcaaataagtgatgggatggtcgatttagaccaatgatacatattaaaataatcaaatggttggattttattacgtattatttacgtactaatttgattaactttcattcgatatgataatgactttattttatttactatatataatatattatatacaatgatcatgtcctttattccaatttgtagtttttaatgacataaatatatttagattactttacaacaactatatttgtcatatagtttacataattttattatcataatatcaactgttgatttcttgtactaaattatataattttcatgttactacatcatatcgtactgtttaattattttcttatatgttttttttatacgcttggatcttttctttgtagatacctattatcatcatccaaattaaggagaattttaataatctaaattccttaccttgaagaagtatgctaatattattaaaatttgaatattttacttttatttacgtttttttaatgtaaaaattattattatataccgtcggagtcttctgcaaaaattgtgtacattaaaactataattttattatttagtttttttttcaaactttaaaatatagggaaaaataaggaggaataccatatagtaaaactttaaattgtgtttcttcttttttttatttgtttttttttctttctttacaataaaaaaaaaaataaaacactgtaataaagaaaaaattatctcacctaaggtttttttttttctatagaaactcaaataatattaaaataattttattaagacatttattaagagtattattatttccttaattttccctaagtgttctgttaaaggttaattagttgattgtaaccttacaggttacagttagagtttatcctcacttctctaactgttttaacggtttctttaccacagttagtgttgttcttatatcctagtttaagttgggtttagttaagtgggtttgggttagttagtctggtttagtctggtttactcatgctgttatataaactctgcttcaagcattgctctgtaacaatttgtatcacaattaataaagtcttctctcttctttctattccgcaatatggtatcagagcgggaaaggaatgctttcccttgatccgttctttcctcttcgttctcgccgtgctccttctctggcgacgtcctacgactgaagctgggcttgctctgtttcgtctgtttctt

SEQ ID NO: 395371 - DNA, 845 bp, Cannabis indica
tacatcattcaaatatgatttttttttccatttttttgaaaaaccattttgaagaaacattagtcaaattactttacctttttaaaaactacaaaatattaattttttttttctgagaacacaattttaaaagagaaatttcatttaatatacataaaaaaattcctatttcaaaaaataccctcttaaatattttatacaatactaattaattaacttctcctttttccaaaaatacccttattatttatttaatttcaaaacctaaataaactcaaaaacgatctctctctccagccgcccctctcgttttcttcttcgcctccctaagtcgaccagccatcccctagctgtaccccagccgtcccccagtcgtcccccagccgcgtccccaccttccccagtcgcgtccccacctcccccaactacttttcctctctcgcaacaagctttcggagcctttgctttcggagtcgcagtgttcttcttcgctggtgcagaaggggattttgaagatgacatcgtgaaggagcccttgaccttcaagatatttgcagcagcaagaaagtgttatcaataaaatgttcatttttagttttattttttgtggttaatttagagagattatatttgatttatgttgaaatacattttactttgatgaatttttcttaatttatagtcggttttatatggttgttatggtgctttccaatctagtctggtggtggtggttatgtatgttctcgattaattatcgacagattctcgataggtaatcgacaagatgttgttaaaaaaagtttgtttttaatttttttttgtggttaatttagagagattat

SEQ ID NO: 395372 - DNA, 1076 bp, Cannabis indica
tcatcacaaccatgctcatcttcaaatggtattctctctggaaaatcttgctgaatagcaacttcaataaggaccctcggatagctcaacttattactttctttagtcattgcatcaacctgaagtggttttcccagttgcccaacaatcttaaaagagatttctctccccaagacttcaatacgagatcaggtaactgaatccaaattggcactggtctgatgccttccattttaaaattaacttcaggatcccaagccttcatcacaactggtcggttgttgaagaacacatatcccccattgagtatttcatctcttatctcaactgtatcaaaccgaactagaaagaccccataagacagagatccaaccttgtcagctttccctttccaaaccctcctaatgaaaccatcaatcacaaatgatgggggattggaacctagaacataacaaacaatagaagaactccattaatgaacctcatcctcaatatcctctaaagttattttaaccttgctagaattgccagaattgttaaaggttttttctaagttccacacaacatttccagatcgaagaattggaggagtggtaggattaccttgatttaaacttgctagcacagcttcgattcccttgaaggaagtattcaaaatccttgctaatgtcttcttgtctcttgatggattgcaacgatgattttggtgataatggagcctgaaatagatcaatatcttcacgcacttgctctgttccatcattcccttcttcctcagaaaactcaactggttcaacaccaataatcaaatcaattgtcttcatcttacgaacctcagaagtgcagtttggccctcgtttttttttgtatttcttgatctttgatttcaatttcccctgtctcgccctagtcttcgccatagcaccagcccaggagagctgcacacgagagagagagagggaaaagtctaaataacttgaatattttatactcttttagctataattattgttgagtagaaaataaaattaatatataaatttaaaattaaaaataattaattaaaattttaaaaa

SEQ ID NO: 395373 - DNA, 1079 bp, Cannabis indica
gaattgaaccgagaaatgtactgagtaaaatgttgagtgatgagaaaagtgactcgtgttttcagactcaatcattatccaccatgtccagagcttggagctttgagtggtaggaatttgattgggtttggtgaacacacagacccacaaatcatttctgtgttgagatccaacaacacttctggttttcaaatcacaatcaaagatggagcttggctctctgttccacctgatcaaaactctttctttatcaacgttggtgattctttacaaggtaaaaaaaaaataaaaaaaaatcaattttaatccaaacccaattccaaaaattcctacttttttcaaaattcttcaactttattgagttgaaagtttcttcagttctgtggttcatttctttattttatctctttttcttctattttttttaaataaataaataaattagaaagaccctaattcttataaatgaattaaataaaatttaatttatttatgtatttttgtacggatgtgtccggtccagtaaatgtcacatggcagagtcagattgagtaattttaaccatgtgtcaaacataagtcggttgtcaacttttggtgaaaaaaaattaaaataatttggattaatatttttattaattttgttattaattataattggtggtgcaggtaatgactaatggaaaattcaagagcttaaagcatagagttttggctgacccaagaaaagcaagactttctatgatattttttggaggaccacctttgagtgagaaaattgcaccattacctagtttggtgggtaaagatgaagagagtttgtacaaagagttcacatggtgggaatataaaacttctgcctataagtcaagactagctgataataggctaggactctttcaaaaatcccatattaattaattaattaataatcttcttgtacttcttcttctttgttgtgtgggtcaaaaatccctctttctctctctctcataaaaaaaaataaatatattaggttttttttttggggttaaagaaaagtggttcaacatagctaggtttggaaatagttgactaaac

SEQ ID NO: 395374 - DNA, 528 bp, Cannabis indica
ttgatggggccataagtatctcttatatatattcaggtctacttcttatatattattttactatttttttcccatctcttcttttataatggcaatttacttagtaatgctagttatttgttcatcgattcagcaaaaataaagaataaaatgttcatcgattaaaagttattaccaacttttttgattgtatattctttgtcatcactctcactagcttttctacattgtagttttacccttttcaggatacaaaactggggtaaaagaaatttttagtaagagaattagaaagactaaaaaaatggtagaaaagaaaagcgaggtaagaaaataagaaccttttagttagaagaatgtgtaagacaattgagagagaaagagagatttcattgatactatttaagagtgaaaaccagagtacaattaatggaactttatatgttgggttttatgccctaaataaaactcattacaatctgattagttatcaatttagaagtgaattatgattacatgtatgttaca

SEQ ID NO: 395375 - DNA, 635 bp, Cannabis indica
ggttcatcatttttccactgccactgagcttgactgatatacaccttcggtttaaaaatccctgccttcgatcgagtgatcatagggtgagaaggcttcagagttgcaggtgcattttgactggtagtatcataaattgcaggttgcaaaatagagcctgtattatcagttgagggagtgctactactctgttctctgtcagtgggagtatgttcatgagactgagagataataaattcagatgagtctaatacctgatgccgattttgatcactaggatcagtggagtcgagagttgcttcagaggttgctgcttcagtgacttgacacacagggtctggtgtagtagtgttagactgattttgagaagattgaaagaaagctgaccatggtgggacactaacacacacagatttttcaggttggaaattgttcaaaaaactagtttggaaagggaagttgtcttcattgaatacaacatttcgagaaatgtatattctacctgtggaactcaagcatttgtaacctttgtgagagtcactatacccaagattgacacatctaatcgaatgaaattgaaacttgtgggtttgatatggtctaatacaaggataacaagcaactccaaatgttta

SEQ ID NO: 395376 - DNA, 924 bp, Cannabis indica
aaagaatgtaaatgagcaatgagtgaatgtcatgaaagttgtaacagacaaactatactaaaaatttggaacataaagcacattggttaatagaataagtggtgaaataaaaatagaaccaacacatgcaatttttctagtagatccatcgggtaagataacagaagaatatgaagaattggatttaatattatgaaataaattaagatgggagacacatgatgtgtagccccaatgtcaattatccattgagttttggaaatacaattgttcttatcagaaaaattagaaaccataggctgagatggtggactgtgagagttgtcactgtggaatttctgagcaaggaaagccataatatgttggcactgattagatgtgagagtggaaaacgagtcttgacttcctccagatttatccttagcagcatcatcatttcttctagtaaaattggcagcaactttttcttgtggagctttattttgagttgtgttgtttcctttgtttgggaatctgctacgtagtctgtgaccagatggatagccattgaggcgataacactttgccatggtgtgaccattgagtccacaataagtacaaataagcttttgtctctgagactgaacatctccagcaaattcatcagttggagggaaaacaagtttctcaacatcaacatgaacaacaatgattcctctttgtctttcctcttgaataatggaagcaaaagctttgttgatgctctggagaggatcttgcatcaaaacttgagatcgagcttgactataggactcatttaatccaacaaggaactcaagaacacgatcctcttcttgagactgttgaattattttttcatggctccacaattatagataggtgtgggcctatatgttgggttttatgccctaaataaaactcttt

SEQ ID NO: 395377 - DNA, 921 bp, Cannabis indica
ctctctctctctctctctctctctctctctctctctctctctctctctctctctagaagcagcaagaagttgagactttttcagcttcatctttgagtaacctagcaagattagagtgtatccaattcaaggtaattgttctagcctctctctttgtgttttcccaagctcaaagatagttttgtgcatgatttttgagggtttaggtactgtggtgttagaaagtgtttggttctgtattcagaagttatattatagttgtttttgttgaattgagcttaatttaaagtttgttaaggtgattgagcaaggtttgagtttatgtactcaagttttgctctttaatggtggtttttgattcttgatatgttgggttgttttgttgcatgaattatgtctattatgatgtaattaggtattttggaggtatttgtgaaatttagaattgaattgaggtatttaggagattttgggtgtttcctgcactaaaccggtcgactagtttagtgggacctgtaggaactggaatttcagtttgtccctaggaaccccaccgaaccggtctgctagttggggcattttaggaaaccctagttctcctacttttatgatatttagggtattgccatgttatccattgatagggaaacttttagtttcaattttaagtctccaaaaagcgatttagcatatcactcaccagttttacgaataatgtgatttaggggcctgtaaatcatcaagcagcagttctactcaggttgaccggcacacctaatttcagaagtgaggtaagattagtataatgatatgcatatgtgtatacatgtttagcgtgcatgttagttaagtctattagattacattagaatagcggtatcagtatatttagtattatattggatatcgattaatgtatgc

SEQ ID NO: 395378 - DNA, 628 bp, Cannabis indica
attgtgtgagcacctacatacatacgtagacacatgcatataagttaatattaaagaaatgtaagtaggagtagcgccggtccttagaatatatgggctcatagggaattaaattttagggccatcataaatatatataaaaaaatttaaaaagaatgttatagaatttgaaccgatgacattgatatattatatacaccccaatcaactaagttatgactatttgttgtttacaatacatttaattttactttaaaaaaagtctaatgaattttttttttattttggcccctgaaatgattagatcctagacatgggcctaacccatcttgcttaggtttggccctagtaggatatgcacacattttgataaataaataatatgagaaacggttaattaatcacttattatagctttaacaaagctgaaattattaacattctaattatgttttttgttctctatttagataaacaaatataaatatttgtaattaatgatctaataacctacatttcattcttatttatccctttaatttatatattgcgattactatatatatacacgtattaatagttataattaaaataaaggggaaatttgagagtaatatctaaatatctt

SEQ ID NO: 395379 - DNA, 1099 bp, Cannabis indica
aagtatttgagtgtataaaatcagaaacattaggttatttatgccgcaattttactccatttttttttattattttttatattagcggtagtttatagtagttcttctaagattactgctaatggtatcaattacgcactacgtatttttgttactaattgtttatgaaagtatatttacgaggatgctaattgtcttgtcaattctttattaattctccaataagaattatttattttaatataatctatctttcttgttttttttaaaaaaaaaaaaaaaaaaaaaaatattacgaccagcgcaccatgcaatacaaaatacaaatcactactatagattttttttttgattcagcaaatccttatcagttatcatttccaattgacgtggagggacccaaaacaccttaccttcggaccttgttctttttttttttttttgaattaacccatcggacctgtcactcttccagatttttaattttctaattaatttatagtggttacataaggtttttttgttcattctctttctttatatatttttccttttacttttctcgatttttatttattgttccaaataaaactaagttgcacgagaaaaaaaatatcattaaagctactccggataggtcaaatcaatttttaaataaatgaacgcaaactcattaattctaactaagaaatatttataagttgtagtttcaaattatttatgttccatatttattggtataattcttctaaataaaaacatctcaagtcaaatcctgttagaaagctagtcatgttgtctagaaaggagtacagaaggcatgcttgtccacccaaataaagtcttcaaggaagccggtcgtccttcgaaaaggagatctagaaggctagttgtcctatccaggaagagagttctggattgcctgttcaagttagctttgtgcctattcgggacgtgttatattattttataatataataagtatagattaaaatgtgataaatatattattatgtgaataatatatattaaatgtatggtaaataaatgtgtaacatataattttaatctacacttttgtaacctacatgttgtaact

SEQ ID NO: 395380 - DNA, 832 bp, Cannabis indica
agagagagagaggtcggtttaggaaaacaaaactagaaaattggattaattccttgcgaaaaattctattttgttaataatatcaaatatggtcaaatgaccaaaatgccctccaaggccaaaataaacatacacactcatcaaaggcaaacttgtgatttcaccacacacaaaaataatatataaattttagatttcccatttatccaaagaatgccaaaataaattccataaatgtattttgggccccaaacccagttcggcctaaaatactcggttgtgactatatcgtgccgacttgtcaaaaaatacatgcagatagacagaataaatatactatataataatatattctataagcatgatatatcattacaattatggttttaccccttctcgggtcaaaattacaaaaatgctcttggcttaccaacgggatcttaaaatattatttattagtataattcatatattaaattatatagtaatataatttcttattagtgcacaattaattagttaggatttgctaatccaattttttgtaatcttagggtattacaaaaaaaagtgttgccaaatgcacccttaatttctttgattatataacggttaaattaaaataaaataagcctaagctagttaattactacttacatgtgtcaagtaatagagttgggtcaatgtccaaaattatgtctcaaaaatttaattaagtgatgcaaaattaaaatatatttagtaaattatgtgttctaataatgtgctaaaatgtaatgtaaatttgcatataaaaatattgtgtaaaatttagcacaagtactactttctt

SEQ ID NO: 395381 - DNA, 761 bp, Cannabis indica
gaggatttccactcaggaggtctttcagctaaaatcaaagcatcaattgctatctttgagtctgagaggatgatcacttcattcctaccttcttcaacagcccaattcaaagctaggagaatagccttgagttcagcttccagaactgaattggagtgagttctctgggctttaacaaaccactgtcccttgaccctgtcaactccaattgctgcaaccccagcagctccttttacccaagacgcatcagtgaaaataacgtatctctcccctgccacaccaggaagcatttgcagggcctggttctgttgaggagtaacagccgaatttgcaacagctctttgaatctcagtacaagtatgcagcttatttatatccttcaaacagccttctcgatattttgatgagctgcaactggatcagcaacaacattcctagcacagactgctattcctttggtttccaaatctcagagtaacacacaaccaataaaatttaacagctcctttctattgactattgtcatagaagaaataagcttatccaagaaattgatcatattgtcccccggaatacaatcaatcctcaaaggatatcgacttcctagccacactgcttttgagaagctgcaatcacgaaacaaatgcagggcactttcttcttccgatccacataaacaacaatctttatctcgaacaaaagaattttgagaagccacactgatgttgttttatttgtctgtctcttctttgctccataaa

SEQ ID NO: 395382 - DNA, 791 bp, Cannabis indica
aaccccacccaagcaaagactgcgtcaagaactagctatgagaacctacagttgaagaataaatgctgatggttttcactatcataaccacaaacagcacaacaagtatcagttattggtaggtgaaagatggtgagttttctcttgtgagcagtttagagtgggatgcctgccataagatgaaactctgttttagaacattcggaccacaccagatagcccttgcagctgggtctggctgctaaataatctgagagttatagagcatggaagctctaaaaatccctttcgcactagtagcttttatgtcttgagccgaaaagctcttcctcaaattacacaacttcttccaataccaacttgtatctaatttcaactcataattccaaaaatcatcccccttgagatacacaacattaacccatttaacccatttaatatgttattcatattaaataatgtaaactttactagaaggctttctttgattggaagacaatataattttacttgtaaactctaacttattttataaggaaaaagttccattatcacctatatatctatagaaacatagggtggtgagatgacgtcttttatatgaattatatttttaatttaatttttttcctcatttttactatttttttattttattttttaaaattttattgatttcactctttagtaagttaatttttttaaaaaaaataaatctcacattttttagaaatgaatgtagtatagcacttagagactatttatagatcattatttacttaagtttatat

SEQ ID NO: 395383 - DNA, 1013 bp, Cannabis indica
ggaccaacctaacctaaacaaatacagttaggcaagatcttgttttgattcactttagattggagcactttgttgtcggatacaaatcgaaaataaataaataaaatctgatttatacattgacatgtagttttgttttgttcttttatggaaccgatttctgcagtaggagtgtaaatgggttaggtcggatttgacccagctatgatccgacctgatccagatcatgtaaggatctaccccaccccgccccactagatcagatctgacccgaattattcggatcgaatctgatccgagtcgactttttttttttaaagaattttaatattaacttataattttatatctattttaattttgtattagtattgttaaatataatactatgtttggtattggcatgtattagtagattgtgtaaagataatatacttttaataaactctaccccaacaccaacaacgggttgggtttgggtccgggtctcggtctcagtctgggttcgggtccaagtttggctcagaatctgagtctgggtctgggtcacgatcctgggttcgggtctaggttcgggtccaagtttgggtcctggtctcggtcccagtcctgggacccggtctcgggtctgggtctcgagtccgggtccaggtctcgagtccgggtcgggtaccgggtccgagttcaggtcccaatttgggtccagaataaatctacgtcccgggtttgggtcccgagtccgagtctgggttcgggtactgggtccagatcctgggtcctgagtccagatcccgggtcctgagtccaggtctcgggtcctgagtccgggtctgggtccgggtttgggtttgagtcccgagtcaaggtccgggtcccgatctcgagtcctaggtcctggttcgggtctaggtctgtgttcgggtctaggttctaagggatctgagtcttaaattaagtttttttaaataaatttaaatcgggtcggatcagatccgatccagaaaaaaattagg

SEQ ID NO: 395384 - DNA, 657 bp, Cannabis indica
gacgaaacaaaaaaaaaaaaacaagaaagtgtacgaaaaatctgccatgccatttaagaaagcattaactagtagtactaactagactactagtctcaacgtctaccttacttaacacaaaataatcaatttttttttcatataaataaaacaatcaaattctcaagcctcaactacttcccttggctgtgtctactgtcttcctttttatttaaactgtgcgtcacatgcaattgcttatttatttatttattaaacgtgttactcattctcatacttcctactcctaccgctaccaataaagattgtcttcttatattacctttcatgaattttcaaatagataaacatggacccaatagtaaatttttattaaaaaaataaataatagaaaattttatttgcacccgataaatacattttatttgcaacaaaataaatttatataattttaaaaattacttttaatatttttctaatttttttaatattattttatgttaattttattacttattttgattttattttaattttttaattatgtatatttatttttctaaaaatatttcatattttttttattttaatttttttgtcatatcatttaaaatataatttatttttttaataaatatattttttaagaatataaat

SEQ ID NO: 395385 - DNA, 1318 bp, Cannabis indica
attccgctgcacccaatgtaaggtttcctaaactttatatgtgtttatttcatcgttttagaaagttcatatttagggtgttaaacaacatacttgtgagtagatctaagatcctggtaaaataatttccaacaccactgccttttgcagcccccccctggatggactttttgcaacacagatatcgcaattggggacaagatgtttgctggggctgccatcttcaggaatgaccaaggtactttttctcatgtttccactaagcggttctcttactctgattcactgccaggggaagtagctacgttagtttggggtgctaaatcagctcaaaggctaggccttcacaatgttgtcttcctgagtgattcggtggaggcagtcaactcggtatgctggaagagactacagggcctttccacctcattgcatcacaatgtccaggacctagtcagttcatttcatgactcagctaatcaacttggtctctgggaggcctcttggatccctcgaaggaacaatggtgtggcgcacgcggtagccaagtgggcactcgatgcaaaccagtttgggaacatcgaactgtccaattttgacagttccctgctcacttgttgagcagatggctgttttttactttcacttaatttagttgtttttgtttaggcctgtttgtctttaatgttttagtttgttatcgttcctgttagttgttagtctgtgtagctggccctgtgggggatagtttctgttctttgccggcttcgtccggtcagactcttgtttctctgttttgttgttctcgtgttttagtgctcttgcgaagcccagcaaatacaaaaaaaaaaaaaaatagaacctacccataatatacatttctatgagatatatatagatatatatagatattatattatatttttccttttttctttttcttttaaagcctacatataaaccaaaactaaatgtatgatatatatatggaacactttttaatgggtattacccataaatggttactaaacaaatttaactataaatattaattttaaaaatatcaaaccatcgaattttgatctaataacgaataattaaatcacaaatttgaatttctatgcttaatttaactaattaattaaaaaaaatatcaaaaaatatctctttttacactatatcaaaaatatgttcatacaaaaatatttaactcaaactcaactttttcttttcttattttcttgataaaaactttttttttaatttttttaccgtatagaacaaatctcagcccatatgatataaaaatgagagatttttt

SEQ ID NO: 395386 - DNA, 623 bp, Cannabis indica
aaagtatttgatgtgagccagcaggttttctcgtctagtatacatcttccataccgacattttaaacttcagaaagggcaaggacttatgtaagttgagaatggtaataccttcatctgatcaagtcaaggtctaaaaggctttgggccagctatgcccgggatcatgtccttgagtttgtccaactatgcttgcacaaaggatttgttactgtggggacctgattgactggccctccttagggaggctgcagattttgaagatattagggctagatggccataccctgggagagtgtattgtgaagattagccagactctgcaaaccctggtcggccattcccaagtacgggagttggcttaggtcggccaagtttactcctggttgttgtgctttagcgacgagacttgcattaggcactactacaaattacactatttacgtcggtcaacgctactattcatagcattgaccgacgtgaatagtacccaataattagacccgtttatttataaccgacactaataatatatgattcgcgtttgtttataaatgatggtaaaaagcaaaccgacgcaataaagcaaaaaatttaaaaaactgctttacaatttgcgtctgt

SEQ ID NO: 395387 - DNA, 1188 bp, Cannabis indica
ctacttcttctctctattttcatatatttgttaattatatatattatataggtcaaaaaataattactgctacaatttctaacccttaaaaagaccaactatacatatttctaggacaagtaaagattaggtaacagccaatgacatgtgatatatataaataaaagattcattaaagtacaactaatccaactttaattcactactttttcttattcatgtgtcccatttggatttataattgtcaaagattagttttcataaaatcttacacatacaagaaaattatacttattatatgatacatttttatattactttatttatcaattagagtatgtataccccatatcctttttgcatgtcacattaaatatatgctgtcatatatatcttcaccagccatataatatataaatttccaatatgtgtattgtgtaattgtaaatgagaggagctaattaaatttattatataatcataaatcatatgtgtagactttagtgcaataaaatatatatatatatatatgtgtgtgtgtgtgtggtgatcattattaaataagtacgtaggtacctaaagcaatattgccttaggatgtgaaatagaagatcatgcatgttgtatggtaagtataggaatgccaatcgggcgggcccgatcctttcggcccgacccaactcgattcggcctgactctttcctgtagtttagcaggtcaagctcgacccatatatatattaaaaaaaaaaattatttattttaaaagaaaaataactaaattaagtaagtaaaataattttaaatgaaaatagaagacatgtttaaaaatttgttaaatttttcgttgattttgcggaagaataaatacatcaatattttcattattcagctacttttaggcttgaatggcaacgctttggaaaaatgaacagcaatagggactaatttgtttatatttaaaataatatatatttatttaaaaatttatgatttgataaaattgccaaaaaaaaaaaaagagttaatgactcctttaaagagtcattgaaagatatagcctctataaataaaattatatttgtaagtggttctcttaaagatttgctccatgtaagagatgtaaaaagctaattagacacactcacaagccactaaggctactttagtggtgtagggaggaaggtac

SEQ ID NO: 395388 - DNA, 624 bp, Cannabis indica
aatatttgtggtgagacgtgatgattctttggtgttattattttaatgtaatgaaattaaagagatatgatattataataaattataattaaaattaaaattaaaattattatactatttatttatatatatggaatgattgatatgttcaatatttgtcacttaattttttttaatattgcttatttttttggtgggttagactaactatgccaagataatgatgaaatttaattattaaattaaaatatataaaattatataagttaaaattcttatagtttatagtgtgattgttcttattatgatttgtggtttagtttattatttttttttttattttagattgaataattttagtgttgttattgctcaatttttattagaaaatatttagttgatagtaattaataggtaccatttaatacatgttcatttaaattagagatctacacttctttaatgttttaacattagcgatttatatgtattttaattgaatgtgcttttaagattttttattcttatttttgtaaatgttataatttacctatcttgttaatttggggaattagcccatatactatttttttaaccttttttttttaaaaaaaattttacggg

SEQ ID NO: 395389 - DNA, 1083 bp, Cannabis indica
aatattaaataagtgagacccatgtcaaaagtcaattccaatctcttacaatacatcaaattttaatagtcataaaccctcattttatatgtaataggactcattttatttttaattccttacaaagatatttttttatagaagagtcttacatatttatagatgggaggaataattttcatattggaaacacatttaagcatgtaaaattacctgtaataaggtataaacattagccctctttcaaaaaaaaaaaaaaaccaagcatgtcatgcattataacagaccttcatcatatatataaagtacagaagaataattcttttgataataaaaaactaaaacatcaaataattgaatgctactttgcaattaaataaataaatagattttaaaatgaaaattgtagcaaaataattaaagtaagaggaaattaattggaaggcaccttcaacttgtccaatgcactcataatatataattatactattacatataaaactatatttgtgcgcatttatatgaagtggagcaagaatgttacatataaaggaatatataagtttttttaaatgaaaaaaaacataaataaagattaaattgtatatggtgtggagcatgtggatcaacttataatgaactattatttatatataggtcaacaatggcatacatatgtaatattaccagggcacttggtgatgcacctaacgcccaggttgatatgttctattcttgtgagcaataaaaattcgaagtagacgtagttctattatcgttgtgacacaagaagtgaactactataaatctcttgtgtctctttatttattttacttaacttatatttcatctcgctaatctagcgactaggggtgttcgcgtgcgggtggtgcaggtttaagttattttttcaaaccaaactgaatatgcaatttttgtagtttttcaaactgcaactgcaccacaagaccttaaaaattgcaaaaacccactacaaaaatacagtgtgatgcgtttaagtagtttacactattatcattatcaaatattaaaataaaaattaaaagattagtctaataaagt

SEQ ID NO: 395390 - DNA, 751 bp, Cannabis indica
agagagagagagacgtaaatgaagttgaaaattattataaagtttttcaaaaataaataaaataaaagatttatgttgatgtaaaaaagtaataaaataaataaataaaaagaaaaataatattgactaaaaaaaaaaacaaataatatagaggaggtagatagatagatacttaggcaaaaaaaaaaaaagagcagtgcaccacgtatacacctgtccaaaaaaaaatacagaaccatagctatatttcacacatgaaaacatcaacgttaattatgatattttcttcaaaattttgtcggtaggtgtaaatttctcttaaataatcgttattcattgaatgagctcaatactaatttatcctaaataaaactatcaatgtgatattttatttggaaaaattacacactatactgtcttttgcctattttttactgttatacggccatatggtataaattacatttatactgtataattttaatactttatacgacagtatacaacttttttttaaacctttttatatataaatttttgatggtggcgtgaactgttatttttagtgccagttttatttttattttttaaatactttttttaatattatttatatctttttcattttttacttaaaattactaatgacaaagttgaaaatatgtataaaattttgatttgattgattgatgttgtcaccttgtggcaagttttttttatttatttagtttttatttttttacttaaaatt

SEQ ID NO: 395391 - DNA, 783 bp, Cannabis indica
aaaattccacactgacacaccagctttcatctactgcgacaatcaatctgccattcacattgccaacaccccacttctttgaacgcaccagacacattgacctctatattcacttcatatgagacaagataaacaatccaccctacgcctcattctagtagctagttctctccaacttgtttatgcgttcaccaagttttccttccactactctttcatcccatactgtcaagatgtctatatatatgatacatatagttcaccttgagggaggtaacagaattctaacaaaattatgtatcttgaatagttagttcttttcttttcctttcttacccttagtttcttagcctcttatcttctctccttcgggtgtatatatattatgtacactatttactttcattaagtaattttcaatttaatatactttttcattctctctcagagatttcctttccacaataaatattttgatagtagtaactaattagctcaacaatattaaaatatttttaatctcttactcatttaccttttagatttgatatacgagtactaattttggttataattgagaacttaataaaaaaatggataactaattgcactagttatttagtagatactaggggtgttcgcggtgcgggtggtacgatttttaaccattttttcaaactaacctgcacatgcgatttttctaattttccaaaccacacccgcaccgcgatactaaaaaactgcaaaaactgtaccgcaaaaaatgatgcggtgcggtgcagt

SEQ ID NO: 395392 - DNA, 982 bp, Cannabis indica
cctaaaaatgccattatttttctaactttgttatgaaatcccatatttcatgtaattttcacttcttctaaaccctatttttcaaccaaaaagtcacttgatatcttataaaacgattaatattttcttttatataataataaataataatccccttttctttctttttatattcaaaacatgattcttgaatttaattcaagatataccatttctaaaggattataataactcatttaaaagtttttgtcattcataaattttaagtgtaagttcattgtcattttccaaacgtttaattaagttaattgtatttatcgaaaaaaataagaataaattcttgaagatcatcacttttgtgaagtttaagcattgtgaagaaaaatgtctctaaatgcaagatgtctccaaattatttgaatgtggtgtttttcgtgtcaatttttaatcattgcataaacttgttcaatttagctcgaacaagtaaactgattaatgaaaaattattataactgaaatagatggaacatcagtaattaagatagagattatataatatatagaagaagatatatatagtactgtcaaattaataataattgagatgtacgtagtactctagttaagagtggttggtatataatataaatattataacaaatcaaaccacacaattaacctctcaccttccgaaccaagaaaaattaattacaaaacaaaaaaaaaaaaattgctaccatttgggatacattgatcttagtcagtcagtccccaccagatatgacataaaacttctagattattatttcaactaaaaataaaaatgttttcacattatatcatataaaactatgttttacaacccgttagatcatctgtcttgtagaatataataaattaaattctgtattttttaaaatagtacaaaataatactttgagcttaatttttaatataactaatttgaagacaatttttagta

SEQ ID NO: 395393 - DNA, 725 bp, Cannabis indica
attttgagtgttaagagtgcttaccatcttgccctgaaggatcgtagtatggcttctatctcttcttttgatagcagtaaacgtttttggactaaaatctggtcttcaaatgtccctcctaaagtgaaacatttgatctggagagtgttgtcccagtccattcctgttgctccctccctgtttttcgtcacattattccctcccctatctgcctgatttgccatcaggctacggagacagtgaaacatgccatcttggactgtaagtatgctaggaaagcctggaaacattcggaattttttagttttatacttgtcataaaaatagctccgtggatatttattttttgttactacttttgaggtttttgatactcatcagattgctatgctgttttgttttgtctgggcaatttggaattacaggaataatgttttccataataaaaaaagatctatgccagaagatgtatttcaatctgcttgtaattattttaatgaatttcagttggctcgtataagcactataaagcaggttgctcaaaaccaagactcgcaagaccaactccctgccttgactgtaggagcttggaaagttgtactgattcagccatagatgcggtctctcaaaaaactagtttagcagcggttgttacaaatgatcttgggatcatcaaagcgggatttatgcactagacctgacatatgctatgcagtaggaattgt

SEQ ID NO: 395394 - DNA, 1340 bp, Cannabis indica
agagagagagagttgttcaaatggcaggggtagaatgaggttattttgaaaaaatgacatattctactagtattaaacaccttaggtttaggagaacaatattgacctaatgaatacataattagtcaaatgggaataacatctaattgttataaagaattaattcccaatttgagcgggtgataaataagaataaccgctaaattgtaatttgttataccttttttaagtttcttatgaagaaagtaaacctctatataaggataattaaatcttaataaaatatatatatagtttataatttttttttatgtataattaataattttatttcaaattataatacatgtatgaatattaatatatttgctcaaaataatttttatatgatatagtatgaaggactatatattattattgttacattgatattttttggggcaattttttttctagtgtaactctattcagttataaccacttaactaaaatatagttttcttagacccaagtgtattcttagatagagatcctactattttatatataaatatatatatatattctctgtaggtaatggagatagcaagagacattagtctaatcaattaataaattaatgataaaggttacaagtggacttttattagactcatttgacattaaatgaattttcattgtaatattttgtacttagaataattttattgacaatacatgtatttaatattttgataaatttattaaaatataattattggacaaagaatatgcattataatatttattaatttcactataatagtgttattacaaaaaaaaaaaaaaaacattaacaaagtgttattattaagaattcataacatgaaaatatgatattttttctaatgtataaaagaataataacaataatgtaattaaaaattatttgattacattttgaacatcaatcaatctatatatttatataatgttgttgtttggacagatgatgtggcaacatatataagctctcctcatatttttttattttcttatttttctaatttttcaaatattatttaatcgttaccaattttttcacatttaattatactaaaacaatataacagcccataaccgtattttggtatttactattctttttagaacaattattacaatataacaacccataactgtatttttgtatttactattcttttttggtaacaattattactattcattttctcaacttctttctacacctttccttcttcccctgctctccaatctccatgtgtctccaataagaagtgggcttgaagtcggaatatagtttcaagtgagtttttagt

SEQ ID NO: 395395 - DNA, 2009 bp, Cannabis indica
cttaagtagtaattggatgacacaaaaaaatcaaaaaaatcattattaactttatgtttgagaaaagtaaagaccaagaaaacctttttgaattttgattatatataaatatataaatgtgtatgtgtatgtgaatacaccaccaacaatcatatccttaagtacttgttctcacttcacctctttttgggtggtggtttatgggtgaaacttcgctttttttccaagctaaggaaactatatatacatcaaaaaaaataaataaaaataaaaaacctgtacaaatcacttgtaaccaagatttctataaatatatatatatatataaataaatattcatatatgtcatcattgtcaaatagctatacccatcacatcacatcataacatatataacataacacatcggtttctttgtagcaattatgtatatatattttccttttaattagtttagagtaagatatatcatatttgatcatgctatacatctcacctaatgttattttggatatatatatttttatatacacacacaaatgattttacaatttctttaatatattatatgcatggagctacctagcagtaaggcatgcaatgcatgcatcagatatataagactcctagtgtttaattattattattattattattattattattattattattattattattattattattattattattattatgtcttgaactatagtttgatataaaatgataattttgaatgaacatatacaaaaaggtcaacttttaaaatagagaacttgttatggatgaagttgataattgtgttggaggaaggtagaagataaccaataacgacaaagacccagattataaatgaaaaggttttgtctcaacttaattagtatttatttatgcctaacatattattattttctttcttcaattttttctccctcctcattttcgtatcttttaaattataatttatctcatatccaaagctgtaataatctacgtctaattaaggtgccgtttgataacactttttaatcagttttctatttttaaaattaaaaaagtgaaaaatatttttcaaaaacatgttctataaaactgtttttatttttcaattttttaattgagaatcaaaattttaaaaataaaaaaaaatcacttttaatatttttttaaacagttttttttttcttattcaatatcttggacttcgatcagacccggacccaaatctccccacggccctggcgctgaacccggactctgacttgaacccaaatctgaccccggaccttgacgcgacgtaaataatcaaaaaaaaagaaaaataaaaatgaaaaatgaattttacagaacacacttttgttttctgttttaaaattaaaaaacaaaagtagttacagaacacatttttgtttttcaaaaacaaaatttttaaacacaaaaattttactttcaattagtgattaaaaaattagaacacaaaagtgttaccaaacggcatctaaattaatatttaatacgtatacattttataaagccagccagagtcacccatccaaattacacaattaattaaagaatattagtaagtggatacattgatacttaccgtacaaaacagtcgaacaggttggcgagttggtagtattgcaatgcacatgaaactcaaattgaagggccgttttatgtccactttaagtcactacgaacaaaaaaaaaattagtgttaacaaagtgactaatagtgaaaaatatgtaattaattataaattattatttttatattgtaactaaaatatgtgtagctaaagatattagtcacaaaaattataatttgttgtgactaaatgtatttttactcacaatacttgttgtgactaaaactaaattagtgataacttgtatataaaaactatattttagtcagtaatattttgttgtgactaaaagtcatattcattcataaaaaaaaattatgttgtaactaaaaagttgtcactaaa

SEQ ID NO: 395396 - DNA, 746 bp, Cannabis indica
cttatgccgctatttacccatttctaaactattggttataaatttgtaaaaaccgaccataaccgaccgtttttcacccctagcttagggcactatttaatattattttaaaaaatatagagtttaatttattattttataaaatagagttcaatttataatttttgtaaaatatagagtctaaaatattatttactattttaattaaaattcatttgtttttaaactacaacaaaacatcattttttttttatttaagtatgagtgtttatggtgggaatggtgtaattttgaccaatttattagaaattaatatgtacgcaatttgaacaatttcttaaatgtaacgtattgcatagatctcaaaaccgcatcataaccatacacaaccaaattacaaaattaaataaaaaataaaggacatcaacacaaaattgatattttttgaatactacaatgcgatttaaactgtatttataaaattctaagctagctaccaacccacactgcactacctagttttggaaaaaatttcattttgctaaaactccacacttgcaaatattttaaagggaaatttacaaaaacactagaatttgggttaacttttataaaaatattgtcacacggaaattttttcaaaaatactgtgtttttgtaaaacactaataaaacacaaaacagaacaacttaaaacaaacagtagaacaactaaaaaacaatcagtagaacaccagtgaaaactt

SEQ ID NO: 395397 - DNA, 1439 bp, Cannabis indica
ttctaataaatattaaataattccatactaaaaagtaattcaccaaaataatcaattcaattcgaattttgcgaattccattggatttgagttattatgggacccaaaatataaaatctgcacttagtgcacattgaatactctatgagcaaaatagtgtgaattagattgaatgaataaaagaactacgaattttgaataacttgaatagcattaagactatctaattcgacctctactctggaataattttgagatttcaaccaactaagaacctccttaatccctattgcttatgccaaagaatgagacaccatcccttacaaacaagaagcagtagcgactaacaattcccctcttagaaccaaactgcttatcttcctcaaaaataattacatctacattaatcttaattgtatttatcacacgtttagtccagctctctgccccatcacatgctactaacaaattaagtgaaaggatattcccttcaccttgagcaccactccattgatcaagagttaatgaaaaaagcaacaacgccgctcgccgccttttttgattccacactatctcattacgagatttccaaatggcccaacaaagtgtcacaaatctccctaatttatctgcatctgccctactcatcaccacactaagccagacaaagaaaaaatgaaactcacggcctaccaaatctaaccttgttatgacccaacaactccatgaaaaatgtttcattgtaaatatcacaaaaataactagtggtgtcaataggaattttcttaccatgaaaattcatcttagtaagcagacaatatgaaattacttgtcaaataagatctttcaccttgaggattatatatttttttggtaaataccattttagttcttgtgttttgcaaaaattatcaattggaccctttgttttgttaaatgacaaaatagaccttgtatttgttaaaattgtataaataggaccctgaactgatttttttatcaaaataaaacttaataataatctgatgtagagatgttatgataaaactggttacattttctgtgtatgtccgtgttagaaattatattaaggttagttatattaaaaaataaaattgttgaaaattgcttagagtcacttcgaaaatcttacttttagccacaaagtaaaaaaattgtgaccaattataaattatcattcctatattatgactaaaaaaattcgtagctaaaggtatcaatcacaaaaattacaatttgttgtgactaaatgtatttttcgttcacaatacttattgtgactaaaatataattagtgacaatttgtaactagagactatattttagttcacaagtaatattttgttgtgactaaaagtcacatttagtcacaaaaattatgttgtgactaaaaagttgtcactaaagtagcagttttt

SEQ ID NO: 395398 - DNA, 547 bp, Cannabis indica
cacaactataaaagagcaggcaacattaaaagatgatggtgagggggcggaccacctataagcgaggaggggcagttgcgaccctacctaaaaaaattaaaaaaaaaataatatatatacattacaacatatatttgtaataaaagatataataagtataatattaactttagtgtaattgttaaactacttcacaaattagaggatatatataagagttctaatcccaccaatttactttatttgacccttccttaacaaaaaaaaaaaaaaaaaaattaaacaactttcctcactttaaatcttaagtccgccacagtttcttcattacagggagccgcacgaaacaggaaaggaattggagagacaaagacatgcattcataattaatttttatatataaatattcacacgtcttctaataagtaatatcaagtacatagtgctctattttcctttacctggttaataataactagctcttacatgtgtacaaatcatatatataaatgaaaattaatcagaatttacttttttttttaaaaaa

SEQ ID NO: 395399 - DNA, 556 bp, Cannabis indica
gaccaaatcgaccgacatacacccctaattttatgtgttaagatatgtcatatttttgttaaaaatattttgaaatatcatattttataatttttcttttttcaaccactattcttttgtgtctctcgctctcttttggcctcgcatgagaccccaacaatgagagatatttagctaaatgatcttaaaaagtttttctattagctaagtaatcttcatttttaaaaatttagttacactaaccttctcttttgatgaaatttttatatctcaatcgtactcttttattattttatatctattttttaattaaaaatagaaaaactatatcattaaaaaaaaaaatacagccctcccccctccatcatgttccccttcaacatggtgcttttatgttcttcctctatttttctaaaaatctctaaaaatcttatgaaatctctataaatttatagaaaattaatttgtaatacacttacttatagataagatcaacattgttgtcaagagagcgattacattcaagataagtgaatgaaccctaattttttaattt

SEQ ID NO: 395400 - DNA, 760 bp, Cannabis indica
gttttcatcggtttttactgatttgaagtcgacgattcttccttcgatgaaataaacaggtctctttcttctttttgtggggtactcttcgaggtcaagacggttggaagtttgtgaaatgttgcaaaatgagtgaataagtctctcatagatagaaacactttattagaagtatatataatgtgtaaatttgaaactcatcagaccaccacacacatgtccacgttgccatccttttatggcgagcgggtgtggtgtcaggaaaaatttatttattaaattattatttatttaattaattaaacagtttggtaacacttttattttctaattttctaatcacaaaataaagtaaaattttgtttttaaaaatttatttttgaaaataaaaatgcattctgtaattacttttgtttttcaattttaaaaacaaaaaataaaagtatgttctgtaaagtttatttttatttttattttttcgattttatttaagtttggtctaggtccggggtcaaattcagattcggcttagaggtcgggttcagcgccaaggttgggggagatttggattcgagtttggtcggagtctaaaatattaattaagaaaaaaaaaactattttaaaaaaaatattgaaagtggttttttttttaaaaaaaattttgattctcaattaaaaaattaaaaaagtgaaaacagttttataaaatatatttttgaaaaatagttttacttttccaattttataacataaaactgaa

SEQ ID NO: 395401 - DNA, 1328 bp, Cannabis indica
aaaaataaaaaaaataaacattagaatcagatcatcagatttttcaagttctctctacctctttttagatggaagtaatataaatgcaatataatgagtagtaagcttgagattggtaccctatatttatagaagaaatatttcatcagtatctgtatcatattaattctcagaataatttaacaattaatataaaaaaatcaaaatcgtgtaaataaaaaatttggtgaatcaaaatctagttatatataaaatatttatgtttatcaattaatttactgaaataaaatataatgaatatgattcattcactctatatataaatcaatatcaataatttatactgaaagtagaaaatattttaatatatttaattttataaattgatgcatatatattgtgtgacttggtatttgaaattaagaatatatttctaagtagagattaaggatgcacatttttcctgtggggatgggtcatgcggggacccgccactaaatggggtgaggattccccgtctaaatagggaacggggatcaaattttgtccccaaatgttaagcggggcggggacaggaatgatactctccgccccgacagagacccgtttaatttattaattattttttattttatctattcgtttgtattttttttagtatattaatatcatttttaaaatttttgaagttgtatttttgtataataattactatattgaatagtaaataatatgtaatattttatcttttatgtaatttaataattttatacatttaaatttttaaaataaactttatttttacaataggggattcgccgccccgtccccgccccattagttgatttcctgccccgtccccgatagagtataagcggagataggatggggatgaggattaaaatccttaacggggatgggaacggggagaggactccccgctaattccctgtcctgtgtttatttagtttgttttgttggatttgataaactaaattaatttgataagattagttattgtttgattgaaaataagattaacttacagtaattcgtttttaaatttacatatttaaattaactttaaagttaaatatgtaatttgtaaagtttaatatttaaaattatattgaactaacatttttatttcaacttgggaatttgataaaatttcacacagttaagtttattatgttcgattccagttaaaaaaaagtttagaagagtgctaccgtcaacctcctgttacaatctcttggtcaacctccatgcccgaaaacacatatcggtatagttttttttcacggggttattcgttatgcttacaa

SEQ ID NO: 395402 - DNA, 915 bp, Cannabis indica
tagtgggctttaggttggacattcacatattggacctaacaaaatataaaaattagaatttttataatgtgcggtgcggtgcagtttgaaccgcatatcaacaattcaaaattacaaaccgcaccgcaccacgcggtttagaacaaattcaaaccatgaccgcaccgcaaagaatttcaaaccgcatttttttgcggtgcagtgtggtgcgggtggtttgaacggtgtgatgagcacccctaatatacactagaaaaaaataatgtattttaggatatgaagttaggtctaagagtttatgccgacaattttttaggatttttggagaatggcggtcggctaatggtggggattttgagacttatgttgtcttctaacttcagttgaggtatacatcgctataatatatgcttttagcttatattatatttttttagtgtgtatgatataagatttgggtatcaccgtggtgataggataatctatggtggttgctagaaaatcaatggcggtgctcgaaagtatagtagttttgacggtagtagttgaaaaatagcattgtttaaggatttttattttagggtttcgtgggtttggggctcggcggtgacggtgttaacggtagcctatgttttcggttatttcataataatcgaatacacaagtggcctatgtcttcggttttttgaagtaaacaaagacataggtcccccatatgtttcggtatttttgaaacctacgtcttcgcctcaaatgtcttcggtagtgagaatttttttttaactaaagataaaccagcttaaaaaatcaaaatagaaagctctttttttctagtagtgtaaaaatacaataactgtattttagttaaaaaacattactatggaaattattccaacccaatttgtattgagcaat

SEQ ID NO: 395403 - DNA, 1219 bp, Cannabis indica
taaatggaaaaaaacgtgtccacgtgtaattttcccttaatgttactatgtaacatctatgtaaatttttaaaatgacatccatctctctctaatggcataacatcttaatactttgctacctaatttattcacctcggtaaatatcctttaaattttcaccactggagatgtctaacaactatatttaacaaagaaaaatttacataacaaacaaaaaatatacaataatacatcaatataaattttttcattttcaatctgtaaaattttttatttacaaaattttttttcagtgaaaatagtgaactattttttagttgttttataatttatttatagttgtattatagttatattataattgtgttgagaatatttttagttgttttatagttgtcgtggaattaatttcacattgttgtttaattatttttttttaacttttttgttgagcaaagtacatttttgtaattttaaaactttataaaagtatttttaaaattaaaaattttaagccgtaaaattataaatgaaatataaagaaatgtatttttaaaaattccctattaacaatgtattaaatttacaaagagaattgaaaataggagggtattgcaaccaaaaataaaaatggataagttaaaaaataattcttttttgtatttattaataaaaaatattcttacattatattttattaaaatatacttttttttttgagtgagttgtctaatataccctcactctttacttaagtttagtatataactagaaaacaggccgcacttcgcgtgcggcgttaaataattatattaataataattgaacaataaattaatatcaaataattttaaatttatttttatgtattttttattaaaaaataataaatttatatagaaaactctaaataattaaaaaaaattatcatacaccttcttatataaataaaatcacacaaatttttttaaaatatacattatagtgaagaaaattagaaactaaatatttcttacacaaaatagagatctaaaacagaaataatataataaatctatagaaaattcatcatataattttaaaacaactatcatcaccgtatttcatttatagtcactattgtatttaaaaggggaattttcataaatatggaaattgaaggtatagtttacttttttttggcataaataaataacactatagggttatgggttttt

SEQ ID NO: 395404 - DNA, 1032 bp, Cannabis indica
cacattgtttatttattttttatatagctagtatagtttctcaatcacttatatatgtgtatatatatatatatatatacttatatatatattagattctatcggacactataaaaaaatcaatagtgataattcatttagtttacgatatatatttttttataattaaatgtgatttttagtggtaaataaaaaattaaattacgtgtgactaattaaaatatagtatttaagtacaaattctcactaatttaattttagttacaacaagtgttatgattaaaaacacatttggtcataataaattgtgatttttgggaataatacttttagctatggactttttaatcacaacataggaatagtaatttataattaggcacaatcttttactttaattacaaattttgttgtaactaaaagtaaaaaatttatagtggtatttgagtatacattctacttatttttgtaaccgttaaattaattatttgattagttgaataatttaaaatattgaaagttaaatacatattatactaagcatacaatgcaataaactactcgaggttagctgaagtgaccataagaggtacgtgtaagtgcgtgtgtggaatcctctgacctaattaattatataaaagactcacctataaaaaataataataaaaagaataagcatatctatatatttatatatttatataaaagaaagcaaaaacaatataataagtgatattttatatgattttttttattttactagttcgtgaggctttaccattttgtaaaaaaaaaattgatgacaaatgttttagaaacaatcttatattgtttaggaactatttttaggttatcttatatactacaaataagtctattaatcttcattttaatttaggctaattagtaattttttatccccaaactttgacatgtacctgaacttttttggccgttaaaaatcccccctgactattaagattgttaaatttaaggatttttgtctacttttagtaaaaaaaattttaacat

SEQ ID NO: 395405 - DNA, 666 bp, Cannabis indica
ctcccactcccactcccactccctttttttcatatatccatgtttcttttatcacaaataataaatatttaataatttttaaattaatttactcatctattttaattgttttgataggtattggtgttctattggaatcaacagaatcgatgacattgaacaacagtacgggggaagatttagtgaactaaaaaggttttttttcctttatgcactttctagtttttttttttattttgatgatatgataatagatcaaaattttctataataggtacaaatataatatagatatttgttagaacacatatttagaaatatttgaaagctattcctaactaattaataaataatataaatttatttttttagtcactaaattacagtataattactcatcaattattaaattttacatggtcattttcgttttcaaatttttattttcattattttattctcaattgttaatacggtgatgacaatgacctttaatataatagtgattacaacttataagtgagaaatagtgaaagtgagatacgatgaggacaataattttaaaattatgatgagttttgtatagatttataagtaatattttttaaatcttattttgttcatatatattatataaaaaaatatcaaaatttgaaatttaatata

SEQ ID NO: 395406 - DNA, 1312 bp, Cannabis indica
cattattttgaagatccgaacacaccatgtctattagtttagatatgtacaatcttcactgagctccaaacactatgattcaactttattcttacctttacctacacatgaaaatatatttgcgagttgacagactcagtaaaaaaagcgtaaaacataaacatatatctgacttgtaattaggcatccataaacgtaattacctttagtctataacacgcttccaatgcgtatgagtctcaaacgttcttgactataataccacatgcaatcagtactcttatgcatactagtgctggtaccatcaatcatactctaagtacagctagcaataataccacatgtactcaatattgtaggcgtactagtgttggtaataatactagttcatactacaagtataacaaaccataatactacatggacctagtactctaggcgaactagtgttggcagcattagtttgtactttttgcaacgctgcacatatatctgtttgtatttgagtgcaatctgtgttcacaataccctgatatattaatctgttggatttctagatcatgcatgctaaacatgtgaatatgtgttactgatcttacctcaattctataatcaggtgtgtcggtctacctaagtagaaaaaatgctcgacgatcagaggccctaagctacattaatgtaaaactagtaaatgtctcaataaaatacttttggagacttaaacttataatctgaagtttccctatcgataaatagtgtggcaatatcctcaatataaagaaaatttgaaaaattagggtaccaaaaaattaccccaaacgggtaaccatttacctagggcctgcctggtcaaacagtgacctgatcatgtgcagaaattacaaactcgatcttttcttcctcaattctaacccaaacttgctcaaactttccaaaacatcaaaaacatacattctaaataaaattaaacaattaaagataccaaaaatccactgaaacaaaaatctatcattattaagctattttgagtttaaaactcaaactcacttaaaccaacctacaactgctacttgcctttgaaactaaccataaacaaattctaacttaaaaaaaatcatacaaaactaactgaattcctcaagtcacacataaaaccaatattttcttacaaattgaaagagaagaaaatatcttatggtttaccttgatttttctttcaaatccccacttaatttcttattgaaatccttgctaaattgctgaataaggtttaaattgctctttgttttccttttagagagagagagagaga

SEQ ID NO: 395407 - DNA, 1099 bp, Cannabis indica
atcttttcaaagttacctcaataataataataataataataataataataataataataataataataacaatattgctctccttggtaagcaaagttggagactcctctgcaatgaaaataatcttgttagtcagatattcaaagaaagatattagcctaatggaacctaccttactgctgaacttggaagcaacctgagcttcatttgaagaagcatctttgaagctcaaactctcctcaaatctgagtctcgttggtcaattggctctattactgatgtgaatattttgcttgatctttgattaccaggaaataataatggatacatacaatctcagcacccctctcttgttggccaaagataacttctctcgttacagatggtgaaaggagttgggacctttaaattcttgctgatctctttaatgatcgagactgtggccttattcagcagttgccaatccattcccatgatgaaagggaccatatttactggtttatgcactgtcaaattggttatgaattgttgcagcagcttagcgaatctaaccatcaagacaataatctggcttttggagggagctgtggcaccttaaaattcctccaaaagttaaagattttctctggagatgttgttctgaatgtctccctactagagttcgtttaaagcttaggcacatggacattgatgtaacctgtacgatgtgcaacctgctgccagaaacaagtcttcacttatttgtcgattgcacatttcccaagattgttagaggaaatcttttggtgcatcttgtgctagtgtggaagggacctttgctggctagtttgataaagcagtcaacaatgggcaaagcgacaataaggaagctgctgtgatgctctgctggagcattagagaagccgtaatgatttcatctttaaaaaatcccccttaacgattgataaagtggtctcatttgctaaactcactttggatcaatggatttctgctcaacactcaccttgcaatttctctcctaacaatcacactgtcagagagaaagatgagcagtggactaaaccaagtttaaatacgatcaaagttaatgtagatggtg

SEQ ID NO: 395408 - DNA, 981 bp, Cannabis indica
acaatttaaaaaaaaaatagtaatattttaagtgcctgcgtagtcccctatgtaatataatactatataatagagtcttgcatacaaaaattatatttataagcaaaacattgataaatcatctctaattatatattgacgaaaaaaatattaaacattatcttatatatatgtgtaagaattaaaacaaatcaattttaatagcagttttcattatatggcacgataacaactatatatacataccaagttttagataatgatattttattacaacatatgtatataaccttagtaaccacacaaaagtagtcgaacaatttataattaattaatatcaggtttgcatatgctaatttataattgattacatcctcccaagaaacctctctgccctttttttgtttattgtgctcctttgcacgttctgatgatatcatgatcatcccctcacttaatatatcacctctttatatatatttactcatttcataattatattaaattaccttcacttaatttaatttaccataacaattaacaatggtcatatacgtacgtacctaacataaataatataaacggtatatgaactaattaattaagatctgtttattatttgggacggtgattttaatttttttattcatttttacgttattttaaaatatatttttttaaacttagtttgctacatggattgtaatgtgaattgcgaactatattaggttacgatttgaattgcaactaatcttgcaattttagttgatttgcaatgagagtatttaaaacaccatatatttataatttataaatattaataaaaaaaagaatactttaaaatgtataaataaagaaacctcttattatattataaattattattgattgatgactttgcatgaatttaaaatttggagaaatttgaatttgtaatatgtatatatttagtgtatattaaatttttaaaaactaaaaaaa

SEQ ID NO: 395409 - DNA, 1045 bp, Cannabis indica
taccaaaataataatgatgatcatgattgggtttgatcaagatgacttatttttaattctccttccaacattaatgccactcgcccccacctgtgcttccatcaatgcctcagcattacggaccacttaactatgaggattatcattgtaatgacacggagtacttgctcaacgcagaaagtcagttttgatgatggtcaaattcaagaattttatggtgcaacaggagtttctcattaggtttgtcaatttattttaatgagttaatcattaattttttttaaatatgctaagaagtgacttgaaattttctattatggggttttaattttctttgatttgtgcttgaatatcatctggaagtggctataatgtaggctccgttttgattttgcaagcaaaagttataaattgtttgataaattaagaaaacaaaagttatggaaataaaatcttcgtggaatagttatcttatatctctcttatattaaatgtggttatctaacggttaatttaacgattcgttaaagttaacggttaaaactaatactgttacatcaatcaattaattatcttttattattttttttttacaaaaaaagaaaattagttttaaatatttaaatttaatttaaaattatcaacaaaattaaataataattattttatataaattttaattaaacgttaatttaattaattaatcatattttataacatatttattagttattttattaaaatatctaaatttatttacttattttattgtttaataaaattagttagatatattttcttaaaaataaatttaaaactagaataaattttatatattgaaaagatataattgaattgcattaggttaatttataattatttaaattaataattaagtaataataactataatacaaactctaaccaaacatgcattttattttagggtaatttgcggcataacctccttaagtgaccagttttttgcaactaactcccaattctaaaattttggtggtaaaacctcctaaacccaagttctgtt

SEQ ID NO: 395410 - DNA, 686 bp, Cannabis indica
atattattttactattttaagtttaattttttagttttttttttttatatttttaagaaaatttacaataaaaattcatataatgaagaacaagttaaattgcaactcaatataaaaaaccgctgacaataactacaaactataaattttaaaacaaataatatataaaataattactaaaaaaaaataataaatatttttaagaatttattgtttattataattttttttacactattttttattttttttttattttccaaaaaaagacattgttttgaagttgcagaaaaggaatataacaacaatgttatttcctttataaatatacaattgtggtaaaaataaaaaaaaaaatttataaagaagttttaaaaaaaaattgtgattttatgtaatttaataaaaattaaccaagtcaacttgtaattattaattattatttttttgtttggaaaaaaatattaaattttgggaaaatattaacaggaattgtagcaaataatggtactggagaggtttcagtagaccaatatcaccgttacaaagtaagtcttttacattttctttttggatttttaattttatttttgaggaattattgtgattggggatttaaattggaaaatttacatggtatactaactttttccctttttttttacaaaaatactgtcaggcggtat

SEQ ID NO: 395411 - DNA, 1263 bp, Cannabis indica
ttgcccctgtagcctcttgatgaatttccttgatatccaccacgattgtgtggatgcatgtttgtattggcaagatttacctgtatgttggtgagggaatccgtggtgagttgattgagtcgcatttcgtgacaatgaagcataaactgaacttcttgtagggtggggttgtcaattcgagaggtgagattaacaactacagattcgtactctgatccaagaccaccgagtatgtatagaatcagatcatcatcagatattggttgttctgctgctgctaaagaatctgcatattgattcatcttcaagaagtaatcatcaatggtaagtgatcctttcttggtggactgcaatagtcttgctctggatcttgtggcaaacaattgattcagaaccatccagatctcggccgaagtttgacagtgaatcacatgagcaagcattgcctcagatatggaattcattaaccaatgcataataaattgatttagacgaatccattgttgaaaagttgggtttggggcattacctgcaagattgcgttgtggttgagggtttgttccaagcaggtggccatcaagattgtaagcacgaactgcagctaggactaaggatctccacagagggtagtttgatcgatcaagtctcaaattcaatgggagcaggttgttgttgggtaaagcagctgtatttggtagcagattttctggagcagctggtgcagctgtatttggtagcggattttctggagcttctggtcgatcggctgccatagctctgataccatgtaaagacttgtaaaccagtggaattgaccagaaacagagaagagaaagagagagagcagaaatggagtaatggagagaaaaatgatcgatgaaaagatggagttgctcaactgaataatgttgagttttggaccttttatttatactgagtaatgttcagagaccttacaacaagaagctaataacagaaatcaagatgttacatcaaagcaagaaaatacaattaaaacggttttgcaaactatcctaactatcataaccaacttatccaagttgattagaatctgttgaatcttgctgatgtgttggttctatacatacaagagcacattctctcatcattttaataaacacttatgttttaatagttggccaccatacatctaatttacttttcctcaaaaattaagatttttccatgttggaataaaaattatgtataatgtatatgctattataaagtgtgatacaaaat

SEQ ID NO: 395412 - DNA, 912 bp, Cannabis indica
actaagaaataggaacaagtaagatgataatttattaattaaaaaaaatgatgatgacttataagcaaaaacattggaaagccatactgtactatatttccatacctaataattggaatatgataccaattttgtttaactttgattgaaagttctataaactcatactttgatgatgcaaaataggctttttttctttttttaattcaatgattgaacatatggactattgttgtgcatgtcaacatagcaggactaaaacataaaatgtattttaatgtaatgattaacacaaaaaggttttaataaattcaatcaacacggctatttattaaatattatgttaataagtaaataatgtattgaaaacaagatatttggaagtctcacgtttgtggttagcaaattctacaatcaatcaaataccaaagtttgcatacggcaccaataattatggacacaatcttaatttggtgcataaaataaaataattctgaagggatttgtttagccaaatggaaatggcaactacttggggagagaagttcataattaaaacaagttgctcaactaaatcaaaattaaataatccataaaataaaacgtaacacgaaagttaaagcgcaattattattataaaaaaaaaaaatcaattttatgtttttttggcataattttataaataccaaaaaaaatttacaaaaatatgactacacaaaattttatataattttacggttttgaagatttttatttgttgaaaatatagatttttttatttatttatgttttcatgttatttttatattgtacttttcttattgtattattgttagttttttattatttgtatattatttttatgtaattttttgttattttcgtgttgattttataggacactgtaaaaat

SEQ ID NO: 395413 - DNA, 990 bp, Cannabis indica
aagtaaattgatagttgggggagttttgctgcaaattactcttaaatttttttattttttatttttattttgaaaaatattgccacgtaggataattttttagtgacctgtcattgccacgtgagcgaaattaggacttagcgaggatggacagacgaaaaccttaaaaatgtaaacggaatagtactttgaagggtttttctaccaaaatatgaggttggatggttttttgcaagtaaattgataattgagggggttttgccgcaaattactcttttagttgagaggatttcattgttaaaagccttgaaattctttagtattaaacttggtagtagcatgactataattcactctccagtctttaacttccccaatttcgttcatcgcttcatctcctctttgggtttcttctttgataattaattaacaatattatgtcaagggagaggtcaaagacacgaccaagacaataatatttcatcacgacctctcatgatcacattttatccaaatatatagaataatagatctatatcattggtataaattcatgctctactattgtaattttgccaaatcttacatagatacaaattggatttatttgatgagaaaaattctctctgagctttggctacttttcgcacacaaaaagaatttattgatctcgcttcaactattttttattctaattatttctctgtattgatgaattgatgttattttagttcgtgaaagttaattgtaccaatcagttaggtttaaccttgtcgtgtcttttgatacatggtgcaggtaacatgttctaaggctttttgggttctccgtttgtatgaagaagagcaacataagttttatagcatcaaatcttattagtggttgcaaacaaggcggaccttatgttaatttgggcctagtgaaaaggtgaggctaattaaagggaaatttacatgctatactaacttttgtcatttttttacaaaaata

SEQ ID NO: 395414 - DNA, 1460 bp, Cannabis indica
ctaccattattttgctagccggtattaatcgtcatttagggaattttataatgaagttttgccccgtgcgcttatatcgttcaggataatattgagatttgagtggagtgtaaaagagcaagcacaactacctgaaagaggggaaaaaaaaaaagctttaaagattatgtcaatccaccttagagattaagaaataacaataataatgattatgccaatcagattcttaccatgtttgctattaaatatctttagaattgaaaaaaacacaatagaactataatggcacaacataggtgattagcattcatgcaaagaagaaacaatagttcatatagggctcgtttggaacgccgtattaagtcgtattatattgtattgtattattattaaattgtattttatgactaatatttttatgtaaaattatatgtggaattaacttttatggacacctaaatatataatattttagtataaattaaagtttaacatagtattatataaaaatatgatatataatccaattcaatataatacaatacaatacaatacgacctaatacggcgttccaaacgagcccataaaatattatctttaagaattataccattaaactgccaacaccataccatttggaatacataactcgattataacaagtaggaacaacttaatatagcttatgatggaaaagtttcaactgatattatgttttctacttgaactatatgaaggtaaaaagtaaagttgaaagtagtatagaaaattagaaaagaaattttctaaccaaataagggaacaaacacttacaaagagccgtgaactaaattttagatgtttcggacttgagactaacaaaaggagcataagcttgctgttgaaacaagttcgatctcacatgccaggaatgtctccaagagcaatccgagaacacacacaccacagaatacgatcactcaatctcagggaaaaattacttgaatgtgtttaagctttattactcaaagtagcttatggttaaaatgtgttcaacgatattacacagtaaagaattagaggtatttatagaagaagtacctctactaacataagcctagagaagagaataacagacttaactaactcctaactcctatcagctaactgtccaattgatacaaaactaaaggaaccgtgtacagaaccataggcatactagatctaacacttgcaaaataaagaaatcaacggagaaatatgaatatcgagtaaagctttcggtgattagaccaagaaagtcaatggacagagagccacccaagtaaaagatttagagatatagctgaggacctcaactattgaaggagagaaatatatagaataaaatgggtttgttgtaataatgataataataatagaggccctgctatcctccatatgagtcaaaatccaattgggaaacttcaatcgagttgttt

SEQ ID NO: 395415 - DNA, 637 bp, Cannabis indica
attattattattatccttgttaccttgtattgtatctatattgatttccaggtaacacacattaattatgattaatatatataaatatatagatatataatcatgatatcatgatgataagctctaacactataacatgtgttgatgagtagtgcaatgcatgcatatagctaaaaatataaaagactttaattaattaatatatataaagaccaattattaattattattataattcattcaaatatttcggctcatgtacgtacacacacttctaaaatctatataaatactaatgcaccctatatacctaaaaccaaaatatatatcaacaaaaaacaataaattaattatcaaaggaaaaccaaaagatttataatggcgttttgtgcaggttagttacttattttttgatatattgtgttatattgatcatatatatatataaatcatgtgcgtatgtatataatattaattaattatatatatatggagcaaacattatgactgattagtattttttgttttagttaaataataaattagatctgtatttttaaatattactaaatcatactttaaactgtattttgtttatataataaaacttaataataactcgatatatagaggtatt

SEQ ID NO: 395416 - DNA, 1304 bp, Cannabis indica
caaaattctgagggattcagtcacgattcaagtggttttaaagctaggaatcaaaggacatccattcagcgcgtgattttctatttaggtcgaccgacaaacttgaattcgaaaacgagataagactagcatagaatatatttatatatgaatgtatgtgtattatatgcatgctgatattgtgattcatatgctaccaacactagtacggtagaggtactgagtgcatgtggtacatcacatgatgtttaagggtacaatccgatgttaccaacactagtacagttaggtacgtagtgcatgtggtacaacactaagtggtgctcagggtacagttcaaaccctaccaacactaatagagtagcgatacgtagtgcatgtggtacggtggtcgtatcttagttaagaacgttctttattatctgataagccttgtggataggtgtatgggcgcctaaacacaagtcgaaaatatattgtatgttatatgcttttttttaatagtttgttgactcacaaatattgcttttatgtataggtaaagggaaggccaaagctgaacaacagtgagtctagagctcatgaatgattgtacatgtcgagatggtgcgacctgaagagtttggtctcaggaccacttgggcttcattttgtagtcgatgtgtgtcatgtttgtagaatatattttgaatttggatgtaaagtttaaaaataggaccgactttatgtatgaaaatatgtatatatttataaaagtttaaagttaaatcaaaattttaatttatcacgattttcaaaaaaatcctttggttagcaaaagggtgcactacaattagaaaatcactgtagcgggcctaatcattagggcgttacagttgcagaggtcacttggctccactcattgttctcagagttgcacattgtaattcctagacctcttgttgtgtggtgtgataacttgagcacagtcttactcattgcaaatccaattcttcatgctagaacaaagcatattgaacttgatttatattttgtaagagagaaagttctacaacagcttgttgaagtaaaatatgtgtcaaccattgatcaaatagctgattgtttaaccaaagaaattttaagcaaccagatttctctattcaaaaacaaacttcgaattgaagatgcttcaattctcagtttgcggggaagtgttaagaatacaaatgatgttaaaacaattagggtcggcccaagcatacagcttgggctattgcacaagactccttatattaaaaggcccccttttttatcatcccttt

SEQ ID NO: 395417 - DNA, 801 bp, Cannabis indica
gagaacagccagatctcagcaactagtagtcaggggggccgaccagggatctcaggctctacaatgcccccacttggacagcttttggccgaccagcctcatggtggtacacccctggcagatcagcagggtgaacttcctgttagaaaataaaatgagccacccctgctcctcaccactacttatcatgctctgccacctactagataagtcactccttgtgtggtccttctctgcaacaaattccttccctttaccattagaatatttcatgggatgctgatttggtggtccccacataattgtgtaatgattgtttgataattgtatgagttgtacatttttagaatattcttagtaataccttccatttataaatacaaatcgtgcgaaccctaattgtgtgtgctcagcttttcaatcattgagcacttatttgttggaattattacataaaaaatataaattgacattttatttacaaaaatacctccataaggtaaagataatatttataccttatatgtgattttaattaccgaaataccacttacataatcagacgatgcttgcagggtggttgctacgtggttgcattagacgaatcagacgatggttgcagggtggttgctaggtggttggctgaaggttgcatcagacaaaggtttcaatcaaatgaaagtttctgggttgttgctgggtggttggctgaaggttgcattagacgaaggttgttggaattattttaccaggatcttagatttactaacaagtatgttgtttaaacatcctaaatatgaa

SEQ ID NO: 395418 - DNA, 1494 bp, Cannabis indica
ggagcatattcaattgttgcggagtataaagtgcttgatatatcttttttgaatttttgatattataatattaattttttataccatggtgtttgttgtaattattaattaagaaatttttaaaaatatttttcattcatattttatttataattttatggtttaaaatttttaattataaaaatatgtttgtaaaaattttaaaattacaaaaatatattttgttcaacaaaaggtaaaaatacaactaaaaaacaattagaaattaacatcacgataactacaaattaactataatacaatcacaaaaataatctcataacaactataaataaaatataaaataaccaagaaaacaatttattatttttactgaggagatatttttataaataaaaaaaaatcaagagtaaaaataataataaaaaaaaagattcatattaaaatatttttataatttttttttcaaaattttagtctaatatataaatttttcttattagtttaagacatacaataaagttttaagacatttaaaataattacaatataaaaaaaagacttaaattaattatctattttacatatgcataaaaaagaagaaacaacgcatgtaatattgtttaaattttattttcgccccgttaaattaattatatttttttaaaatttactaagatatcttaaataattaagatatatattattatatgaaagaattaaatacgaataggatgcatcaatgtacttaatttaaaatgttatcataaacacatatcaaattgtaaagagtatgataatgaaatatttcaactaattgtattcaattaatatagattcacttattaaaaataatttgtcaaatttatctataattatgtgtacttgtgatattaagttaacattgcaataattcatgtgacacacacttattgccaccattgtgatatttttcttggtaaagttggtctttcggtaaagaggtttgatagcttagagccaaaaaatgctacacctaatcttccacccatgtattgtattattgtatctacctacctgtctttttatttaaattattattattattactcttaataaacagactataaacataaacaaattagcctctcttaggcgctcattttcaacgtgtgccactaattaatgggttttaattttataacaaatcaaatttacatatagcataggcaaagttgactatatacgtaattattaattctatttaaacatagaaagaatatattcctctgttatcttgcattttaaaatatatatatatagatataaagagaaaaaaaatatgtttggtagtgtttttattaatatttatttcatattttgtattttgaaattgtaaataccttcatattattttggggtttttttcattaatgtacaacaaaaattaatatattacaaaaaatgtgcaaaaaaacttaattataaaaactcatacattttaataacatattt

SEQ ID NO: 395419 - DNA, 972 bp, Cannabis indica
ataataatataaaaaagagaaattaattaaaaagaggaatataaagagaaacgagcatgaaaagtttcatcttggtggacgatacatggtctgtcacgtgaccctaacatggaaagatatcacataacccacaattacaaacataatattttagggctttccttcctatccgtgatggtgttcaatattactacgagataattttattaatttagaggagatttagtctctatatgagctaagggatcgaaaactagaaggtattgtcataatagtatttatgttacaaactggatattatttaagctaccaaattgtacttatagtagcatttagagcaaatttagcgagcgaattcgctccctcagccgtaatgaatccctgtaaaaccctagcaatatgtaacctagtcgcctaacaacccttaaaaccctagtgttgcctcgaattcttcctaaaatatgtggttgcggctgtgtgacacgtgggtctcaaggctccctcacccacgaaattagctaagttatatatagacggacaagtgcacttcaggaagtgagctcccggagaagcatataaagcatgtctctcctctccgggagttagagatatagcaaagcatctccgggagagggagaacctgtttgaacggtcacttagtatttaatgtggcatgcagggaaacgtcttaaaatacccataagaggacatgacagttggcgtaagcttcgtttacggcaattacacgataatcaaggggtctagtaacgacttcaatatgaaaaatcacatcaatcaagaaaggataaagattactctcacctaatccctacgatacctacagcataggtcatgtataccctattttacatcccttaggaacttgtgcacatacatgcatggctggcactcaaagacaagtgatccctttttagtgatccttaccaaactctataaatacccctgaacaaa

SEQ ID NO: 395420 - DNA, 920 bp, Cannabis indica
aaaatgtccatttcaccatgatttgctaatttgggttcgtgggcacaagaaaatttatagtatttttttttttttcaaataaaaaatatatatgattattttatttgtttaatgttttctgtgatcaaataaaatttgtatgaatattatataaattgaaatggtgaatccccatgtgggttttaaatgaattattgattacaacattattaacaaatttttttaagtcacattgataatgaaaaagaattagtgttacaccatcatttttaaaaacttaaatagtcatattagtggattaaacgtatttgtgcatagttgaattttattagttactcaactagatgattaaattaaattaacaaatttgttagaagtcacattaatatagaatagattactagtaatacattgttatctctttagagatagttgggtgagtaatcttgttatgcattgttatttgttaagatcaaaagatgtaaatttatttaattatgataattactcggtataaatatattatttttcagtttcacacctatatattatatgtttttttcgatgaattataaactatatgttacttttttgttgcaactgttactactaattacattaagtgttgatttaattaaggatgcgtttggaaagccacaatgtaattggatttgtgtgtaatttgagataattacacaatttgacatgtttgtctaactatgtaattacactgtaactgtgtaattagaagtaattgagaggttccaattacactctccaattcttatggccccccatgagaattggatgtaattacactgtgttattactaaaatttttccatattaactaaaaaatattattttctcatgtaattactaactattttgccaaacaagatattaggaattcatatgtaa

SEQ ID NO: 395421 - DNA, 738 bp, Cannabis indica
attatcatactgtattattttctctcttgttgggccttgactcacaagtacttgtgcaggcaaaggtaagcagtgtcgggtcatccaactcccctggggctttgaggatgacttgtacatattctggccaagctggaacacaagggttgggtccagcagggaattgtgtagaaattctattttgtcgtttaggttggctgtacaagaataacttgtaatatttttaaaataattttacggtatcccatatatgtaactttaaattctttcggtttaaagtaaaatatgttgataatttcaagttatttatttaattaagtttattatttattttaaattacttagcttatagactccgattaacgagattagtaaattgtaatcaggaaatgtagcgttcctttgagtaggacactacaccattgttggcattttggtttatctcattattactcatctagacattgcatatgttgttcatattattagttagtttgttacttctccaactattgttcattgggctattgttctttgcattctacgatgttgtcggggtaccatctttcagagcctactactaccttctacctcttctctagagttgcgagcttcctatgatgttgatcatggtcgtgatcccaccagcgaaaattcgtcactagtttctctatctttttgggagattctcttatttcttggaagagcaagaaataatctgttgtttctcaatcctct

SEQ ID NO: 395422 - DNA, 629 bp, Cannabis indica
tttttttttttgccaaattcaacacaaaacttaaatggtcttaactgaatgacatcagatctactacttatttttttttggaaaaatcaatattacaagcaattaattggtatttgagcaacccagttgacatttataagtgacgctactcctttatctaaaaggatggttttgactattcctaagttgactttcgtagtttaccttttatgggatttgaataagtatcatcggttactttcatatgtgtttctgatttaggcgtttagcttcacttcattcctaagtcagtctaccttaccaaaaaaaggggaaaagcctagcattcattaataattgcctctggctgtccataaataacatagaaatgctaaagagtacctagcattttcaagaggtattatatctttactaacagtcctcacttagagcttaagagggctagtctcatacttaaaatccacccaaattttgggaataaggtgagaaatatttcttttttgtatctattaatcaaaaatattcttatattagatttcattaaaatttacccacttttgtgagtaggttgtctaatgtaccctcacccttctatttaagtaaagcacatgatttatattaatctaagg

SEQ ID NO: 395423 - DNA, 572 bp, Cannabis indica
tttccatcaaatcttataattattatattggagtactaattttattatttttcattgaagatgatcttaccactcatcattttgcttcttaatttaaggttgtttacttagaaaaataaataaatatatttacagccgaaaaatatatgtcacattgaattgagatgggtaccactattgttcaacaataattataataagatgggcaccattaaaatttcatattacttatttaataaatgtttgatatacttggggtatgtttggaaaattattttataactaaaattaatttatacacaataatcatataactagaaataattgagagatcttaattgtattaataaatacgacaataattagaaaatctaatagttacattatgacttcaaaaaacacttaataaataaaaaaagagtaattctgaaattgaaaaagaaaacttaaattttttatattatggtaaaaaatagtaaggaaattatacggtgtattcttataattgttcagttttcaataaatagttgtgaaaaattttacaatacacccctttaaaatagatatattga

SEQ ID NO: 395424 - DNA, 547 bp, Cannabis indica
tatttttgtaattatttttggtctttcttggttagttatagaaaaaatcccttttcaatttgttaatctatgtttgagccgtcaacatagacccaaattcactttttaattaactaattataggatgtcacatcagtcagttaagtgttgggcaccttaaggtatcaaatatcaatgctcagtgaaaattgatgttagaggacaaaacttacgattctatgcaagttttttttagggaaattcgatgcaagttttatgtttgttattctgtacttattttcttacccaatatgctttcaatgaattttgtaacctatttaacattatttgagtaatattattgggataattttaaaaaaaaatacagaaacaacaaaaaattacaacaaatacgaaaatacagtttcacaaaatttttaatatttttacgattttatttacataatttacagtgttttggtatatttttatgttgtactcttattattttattgttgattttttgctatttgtatatattttttttttgttactttcatgtaatttt

SEQ ID NO: 395425 - DNA, 813 bp, Cannabis indica
ggtaaatgaggcttgtatgcggcatccggtgtctaataaatgcagtggcatgtgtcccaggcgtgcaagtcgtatttatgattgtcatcattgattttgcttttcttttgcaggaaacggttcacttcccgtctattgatagacctttgcattaatgccggtgtcagagaggtactcaaacgttttaaccgtcctttatcctcgttacgccagttcaccctatccgttggatcgcagaattcgaatcgatacaaattcccaccgtacgatggtgtctgatcacagctgtcttgtaccccttctggcctataaaagccaacaccttttctttgatgggttactttcaccacttcgcaattttcgacccaaccaacatattcaaaaaattcctgaaatctttgactttctactactgttcctccgccattgctagaccaaattctaccaccggacgacatcaacttctcgcctatcacctttgtgtaagtctctgtgcacactttttctattttttctgcatgttagggcaaaattagaacagtgaccttctcatattagtcgcgcttgatttctgtggtacggtggccatggcggaggccattgtacgctgttgcatttgcaagcttactgtcatttttctttggggctagaaaatgatatccttgtttgggtgctgtcgagcgtttgaagtggcttttatactcctatccttttctttccctttttttctttcttattgttaggttattttaatattaattttagattaaaattagtatatttttaattgagttttaatcgtgtttggagcat

SEQ ID NO: 395426 - DNA, 1061 bp, Cannabis indica
ctctctccttatatatataagatatattcatagtaaagttagggggaggggggggggcatggccactgcatggcacaaagaggttccgcttctgtatataatgtaatttccttaattttttttttctactattattattattattattattgttattaaataattccttctctctagtctctacacttaataaaccaaatgtatcaaattataaaggctcaacgataagaaaataagaaaaaaaataataaattaattgtgttgtaatagtagtgtaatggtagagatacacaaaattataagaaatgtaaatggacacatatcgttagtgtattttattattaggtctcatacattttgatttaataaataatatgagaaataactaactaattatagtgtcaccagataccaacctaggctaaaactaattaggcctgtacacaaggttctcccaaacccaagatccaaaattttaatacaatatattaatatgtagagaaaaaaagtaattataattttgtaaaatttattaaatataggtccaaactcaccaattaccacttcactttacatacaacccaaaaaaatattatgcctactttttgttagaactggccgtgagtgtcacgcgacatagtgttgagcactttaaaatgccaaataataatataaaaaaaattatatatatattttcaaacacaatgattatttaatttgtataataaataattatatattagaattacattattttctattaaatatgtacaacttaaatatatcacaatcattattctttaataatatttttggaaagaaaaagactatgaagatgttgagagttcatgttataatactaatataatagctttgatttaaagtaaggtgctaaatttatggcttgaattgcataataagcttgttgggcaacgtttcatttataatttagaagaggctaaacatcatctaaaataaataatatattatacaataaaatatatatatcaaatataacaaaaaatatgaactatacaataaaattatatataataaaaata

SEQ ID NO: 395427 - DNA, 2628 bp, Cannabis indica
ctctctctctctctctcaacctgatcgattctgatcgatccgactgaaatgataagtgttggtggtatttataggcgtaggaactcccctttgaccgagatctccacgtcagcataaataagagtgcatcagggagtgagtatgatggctctcggagtcacggaccaaggttctcgctaaaggaccttcctgaataggaatgagccaactagagtcgactatccaggattaccttctaggaggaacaacctagggctagctttcctgaaggctcttcctggaagaacaagaaagccttccaagattagcttctgcaagtcaactaattttcaggagtgataaaagctctaagagacctttttcatttagaagaactatacacctagattaacttatctatatagaaattaacgtttttcataagttcaatagattgcattctttatggatctattgcttggtaaaaagatttaattattaagcattttgccttgattaattgttatagggagattggaaaaaatttctgcttcagcgttttctgtggggttaatagtttaattgagaaattgaaataattcttattattattaatcttgaatgattgttgagggtggagattaattcttaactatttcttaatattgtataagtatttatctttatttgctttctaatttattatttaatctttataattaaaaattcccacttttcattcttgttacttatttttgaataataaattgataataatctttgtgggatcaacctgtatttaccgtcatactgaagcaattcgtaatatagaaatttattgtggtaaatgacacgcatcaccttacaacaacttctagatagtaaaactctctttaaataatgtctagtgaatagcagtgacactagataacaaaactaaataaattaatttatcatgagcaagaaatgcactaagggcagtaaagaaagtgtataaaaaggttagttgatgaaattataaatagggatggcaaaacagatttcgacacggcacacaaacacgaacacgacacgaattttatgggttaggattggaaaaattagacacaggatgaaaacaagtcaacacgaaataaaaacgggtcaaacacgatatgacccgcttaacacgaatttgacacgatttttttaaatattataaaataaaaaattaataataacataattatataaaatatatatatatttagtgatttaatgttaagttaaaaaattttgatttaattttcttaacatgaaattgaaaatattttaaaaattttaatttttattatatatataataaattatataatatataaatgtatataagttttctaatggaatctaaatctataatttttctctatatctccagcttcaataatagcaaaacgaaaaatagtgggtcgacacgaacacaacacgattttttacaggtcgggttagggttgagaaaattagacacgagtcaaaaaaatgggtcgatacgtctgacacgaaatgtaaaagcatgtcacgtaaaatataacacgaacgcgacacgaagacacgttttgccacccctacttataaaacctcttttttatcctagtgatgtgtgggatcaaatatgccccatttctttattctttggctatagtacatttggaaagacttaaaactactgtcatattgtttaaatttggggttgctaatgatgtgaattgcaatatggtgagataacatgatgagatgtaataacttgtgtgagtatggatttgtagaggttcatggcttatctaagatcccttcatcttcattatcttgtattgatagtaaagtttccattttgaaaatgaaaattttgtataggattgattcattaataatgataggaatttttatggaggggttggttgtgtttctataggttcctgttttagagactagactcattgtttgtatattgtttgaagaaataatatctttcttacataaaaataaataaaatatcagaatcaggtttgataatatttttattttaaattttttaattacaaaaatagaagtaatatttatttttaaaaaatttaaatgtgttctagaaccactatttatttttaatttaaaaaataaaaaataaaagcgtgttttataaattttatttctattttcatttgttgattttataatttaagtcgagttcgggtctgggttagaatctgagtcgggatccgagtctgggttccaaggtctaagttggggtaggagtctaaaatattgataaaaaaaactgttaatttttcttttttttgaaagtgacctctttatcgttttcaaaatttttaaaattttgattttcaattaaaaaattaaaaagtaaaaagttttttatagagcataattttagaaaatatttttatttttctaattttttaaaaaaatctaattaaaaagttattaccaaacgtgcatacacaatatattaatagaattaaaattattaatacaagggtaaatagcgacataaatacacaaagttttgagtttgtaagtagcataaacccaatgattttttcagtggcataagtacccaatgtttgtaaaactgtaattttgctctatttt

SEQ ID NO: 395428 - DNA, 794 bp, Cannabis indica
acatccacgacaatgtggcttaatttagtaaagcatccccaagtatggggagaatgaagcgaaaaaggtacgatcacaaggaaaaagtgtgcacgcgagctgcaaatggccatgctttctgtaagccttaaaagcatggaggtacaagtagtaggggactcactcctgcatatcttgacgccccaaccactaggactctccaaccacctgcaacccgggaccacctgacaccagacaaaggtacgaggtgcaagaccacttcctgaacttgagatttgcagcttgaaagcaacaacttatccctttaggaccaccatgtatcttaggccattagagcctataaatacccctttctcaagtgagagaggagattggaaaatcattcttttaaccaccatattgaagtaataaaaagttttcattttttctctactttgagatagacacttgaatttatatttcatcttttcttcatcttggttctgagttcaaagtagagtttaattttctggccaactagctagttggaaaattctcactgtcaacagtttggcaccgtttgtcgaaataaaaagcttaagacaagttgtttctttacgcacaatcatcacaaaatgctttgacactcccgtcgtctctaagaggtggagatagttctagacaaaactcagctcatcgcctcaaggcgagatccttcagcactcgtcgccggaggagagtgtaatatccagtttatctacatatattggtatttggtatattaagtgtgatacaattatattgttattattatt

SEQ ID NO: 395429 - DNA, 634 bp, Cannabis indica
gggtatttgctatattacgccggaggcggacgataagcagattgtttcgaaacggaatggaaaaggactgcgtactttagcactgggccattgggtggtggatatgtagattgcatttcaatgggcttcttctctaattgaagcccaattagtcgcgctttatagcctggttgctttgataacttgcttcatttctttttattttactttaataaatggattgaaaaatgaattttcttctttggagatgcttctaataaaaacatttttgtggcttttgattcttaatcaaatggtagcagttctttcgattgtcataggatatttccataaaagattaacaacttttattatttattttaattttttggaaaaaacaaaaccactcacgttgtaatacagttgattttaaatttcctaactgtattttcaacatatgtcatatgtgtatggtttatttccaaaaagaaaaagtcaaaccgtctatgatcatctacaaacaagctaagtagagatttctctcttttttttttttctttatatatcctgaactcttaaaagtgtaatgatacttcaattaggttaataatttttttttttctaaaatttgcgttataaataatttttatacagg

SEQ ID NO: 395430 - DNA, 1395 bp, Cannabis indica
tatatatatatatataattatgactatatgtatatatattcttgatcatttttattcttctttaagattatctagttttgggtggtaaataatgttatgacacctattgagccaacaaatgactttatgcaaaatataacaagattatattgtcttctactaataatttgtattttgtagatgcaaaatatatggcaataaataattggtgtatatatgggaaataaatataattatcccatttctaatgtccaatataatttgtaaatagtgattcaaatttatgataaatattgaaaaattcacttattagtaggaaggttctttttttttgtacttgaaaaaattattactcaatttatgtataatgtatgtcaagctaggtgtttcttatcttccaaaattagcacctctaatttttaggatttgcccaggccaattcgagaggatgataaagctcgctttcggagataaccatgacgggattgttcaacgacacacccactcgttgaggcctatcacagaccatgccacacacgggccatgccacttgtaggcatcaggcctctcgcaatctgtgccactcgtaggcatcaggcttctcgcaggcccaggccaccacaagccacatgtcgctcgtaggcaccaagccactcgcatgccaaaggcctcttgcaggctacatgtcgttcgcagacaacatgcccctcgcacgccaaaggcctctcgcaaggcctgtcgcgagcctcatgctgctcgtagcctcacgaccactcgcatgatggacactcgccactctcagcttcttaaggcatgtgtgcccctggacgacacgcatgcatgcctctcaacctcgcatacccattaggatattgcaacgaatcatcacatctctcatcgaggtgaccaacacttaactagtcgtgagaagaagaatcaaaaggatattgcatgctggtacaatcatgcttcactgtaacacctaagcatggggaaaggaaaggtagtggaggtatctcacctacaagctctgatgacccaataaagagtacgctgcaaccacaacttttgccccccaagaccacctcacacccaacaacggtaaatggcgcaagaccacctcttgcaactacagcctggagaagcaggacatccttcccttgacgcttgagaaccactagaggattcatcatgtaaatgggatccaatagagctcacctataatactccctttctcagattttaagagactggaaattttttgtaactgaacacttattgaagcaacgcaaactttctctttgtaagttttgtagtttactttacaagttcttagcatttcatctcactcttatttctatttttatcttgtagtttttcgtatctactttttgg

SEQ ID NO: 395431 - DNA, 746 bp, Cannabis indica
tcttatgatacttgacaacatttagtatttttctattttcttttcaaggaaaaaggtttagaaagattctaccatgcatgcatcccttaaaattaaaataatattttagatatagaattgtgtatgttgtagttattgataatattttgtaaaattttaagaattaaaataatttaatataccaaaaataaaatttaaggagttattttgtatgtgtgacttataaacattgaatattgttgtttatattataaattattttgagtttttaaaaatgttataaaatgccttaaattggactaaagattaagaaaaagaattaaatataggtacacctctctcttttgaagagtatattattgaagtacccaaaattttatatcatcacgataatcaattatttaacaatactattacttttctttttcaaaacatcaatcattttcttttcttttttatagtttattaaaaatttcatttggagtaaaacttctcaatcaagagtttagcaaacaataacaaataaatatggagtgattagatatgcaactctaaaaatgagaatattcatacaattactttgtattttcgaattttggacagttaaaattctaatgatattttaatattaaaattatacatttagggctcgtttggaacgccgtattagatcgtattgtattgtattgtattatattaaattgtatattatgcaatatttttatgtaaaactatatgtggtatta

SEQ ID NO: 395432 - DNA, 649 bp, Cannabis indica
aagaagtgagtaggggggtgaaaggaaaaagagagggtattttgggcataatagaaaaattgtcatatattttaaatatagggtattatgagttttgaggataaattttattatttattaagcatacaaattcaaatttccctaataaagtttggatttggtcaatttttttttattatttgatttaatgtggtgaacatagtatatatgtatatatttatatggaatatttttcctatagttagtaagaatatttctaatccgacattaaaaacataaatttagtgttttctcactaaaattaatctaaccagacactaaaagttatgatttatatgagattatttatattatttcactattgttattgggacactataaactacaccaaaattattattttttttattttttaataattaaataatagttaaatgattaatttttattaatgtatatgtattatttatatatgataataataaagaatatatatttaagtgttgtgattggaccagggaaaaaaataatgctaaaattatacttttactattggttcaacactaaatttaacttttattattggagttagcttaagaaaaataattataaatattaattttaaaatattaaattattaaattttaat

SEQ ID NO: 395433 - DNA, 978 bp, Cannabis indica
taatttacgtggatgatatcataataacaggaaacaactccaaggaaatcgggccgtttgttgacagacttaacaaggtattttcacttaaggacttgggtgacttgaactacttccttgggatagaggtgtttagggatcacactggaatttatctatcccaaaggaaatacatagcagaggtattgtagaagtacaaaatggagaatgtcaagccaagcccgacaccaatgacagcagggagagttatctcaattaatgatggagttcaactcgaaaatccatctctttacaaaagtataattggtgccttgcaatatctgagtcacactcggccttacatctccttcaccgttaataagctgagccgatttcttaagagtctaacctcagtccattgggggctgccaaaagagtgttaagataccttaagggcaccatgcatcatggaattaatattgcactgagtgacaatctgagcttacaaggcttttcagacgcagattgggcgtgttgcctcgatgatcggaggtcagttgctggatattgtgtgttccttggtgagtctataatctcttggtcgtcgaagaagcaaactgtggttgcacggtatagcactgagtcagaatatagatcgttggtacatcttgctgctgaactgacttggttgaaagaacttctgaaagaaatgaagtatgaaatgccaacaacaccaataatttggtgtgacaacatgagtgctagtgccctggcttctaacccagtgtaccacgtgcgtacaaaacacatagaacttgggtggcgtttggttggaggtaatgaaatggaatggaatggaaaggaaataattttcattccattcctttgtttggttgcattttgaagtattggaatggcattccaatggaatgctctttctaccattttggtggaatggctattccattttaaaaaggaaggaatgaccattccaatgta

SEQ ID NO: 395434 - DNA, 682 bp, Cannabis indica
aatgaataataatctcccttaagagacacgtaacaataaaaattggacaaaacaaaagttttaaaagaaaatcgatgcacaatattaaaaaaagcagtaaaattgtaaattattctgtggcacaataaaaacgtaataaaattaaaaaagtcagtgtacaatataaattccctttttttaatagaaatattaactttttcccaatacatatttttaaaaaacttttataaaaaatagcaaaacacaaaataaaaaaatataaagcaagtgaggttgttagtatgcttattagatttttggtgcacctctcttttaaaattatatatataaaataaaaataaaaaatattattgcacctaatagtttattaggtcgacaataatatcttaataaatatttttattttttattctctgtgtttaacatagttaactaatttacaatatattttaaatatattattgcaaattattaataattaattgtatatcgttcattatttaagtttttttggttttcaaaaaaaaaatctattacaaaaaatgttatttttaccagcacaatttgttatactgcgctagtattagtcatttttactagagtatcctgcaaacttgttggaatatgttttaccaggatctagattgtaacaccctaactaacataggcgtattacgtgatt

SEQ ID NO: 395435 - DNA, 1030 bp, Cannabis indica
aaacactttaccaagctatagcaaattatgtatataatgaatacatgaaaactaagagattgtttgactgtgttttcagtttttagaattatgtttacaaaagtgaaaacaaaaaatatttttttgtcattttaaaattttaatagtgtttggcacaaattttttaaaactatttttagattttttcttactaaaaaaaaaaacttaatattctacaccattccatgacatgaacccatcttaccccggactcgactcgaactgaacttagaccccagccctgaacccagacccggccccagaccctggaccctcgacccccagacccggactcagacaccaaacttggacaccgaccccaaacccaaactcagacccggaccctaaccttggacccggaccccaaccttggacccggaccccgaaccctaacctcggacccaaacctggacctgaacctaaacgtggatccaaaacccgaggctaggtccaaggtccttggccgagtctgggtccgggatccaagtatgggtttaggtccgggtctagggtctgagatctaggtcccgatctaggtcagggtctaggatctaggtcccggtttgggttcgggtccgaggttcgagtttgggtcgtggtctgggatcttgggtctaggtccaggtccgggtccgggtattgggttcgagtctggggtttgaggttcagggttcggggtatgggtctgggttcgttgtctgagtgtaggttcgagttcgggtcttgtttcaggatccaattcgaggtctggggtctaggtccaagttaggggtttgggtccaagtcagggggtcttgggtccgggtcaaggtctggatccgggtcaaggtctggatccgggtccgagtcgggggtcttgggtccgagtctgggtgagatccaattcggggttcgaggtctggggtccaattttggatcagggttcgggtcgaggttcggtgtcctagtccgagttgggatctgggagccgggttggggttcgagtacaggt

SEQ ID NO: 395436 - DNA, 1704 bp, Cannabis indica
taaaagctttgttgctccttcactaaaattattatcacgctcgtgtatatgaaagtcaatggtagcattaaatatatcaaaatgataatgatgctctattggaatgtgaacgttgacggcgaccacgtccttggacgtaacgagagcttaaatttagaatgtcaatgtcaaatttctcggagaaagagaaaataatttcaagaaaatttttccaacatttatttcttagctcttagataagaatttttgtagtagataccatatttatgacattcaataagtctaattttttttgctgcaaaacttgacaaagaatatcaataatacccatgatttctttcattaagtgtaatataaatataaattcaaatgatgttatcattttataagcagcatttgcatctctgcgttaatggtaatcaaattcttcctttattatatttttaagcaccgagcaagtggctccaaacatattttgtagactacaaataaaaaaatgagagccccaatgagtatgacttgttcgtttgactgtaccaatttaatttgctcctctaccattttcaagttcattaatagctatcatatgtgcaatttgtgttgcttgagcagcttgttcatcatgacatttacatgaagcccccagaacaatgataacaaaattcaaatttgaaaaggattcatgcacataaagtatctctctggatgtaacgactaatgttaattgtaatcggtgagcaaagcaatgaacatagtatgcatatgggcaatcttcaagaaataatgcttacaaacatttccattcagcatgcatagtactagcaccatcatattcttatccacgaatattttgatatcaacacaatggtgagaaagaactctagttatttcattctttaaagtcaatgcagctgtatctctaacatgtaaaagataaaaaatcgttcttgtataaaaccatcatcttcaacaaaccttaagattatagccttttgctccctaatgcatagttccttaatatcattttttgactcaagagtctcatcatgacctctgaaagcacatccttgaaatgcaacccaatgaacacatcaattgatgttctcacttgtagccaattcttgagaattttcttagagctttgtgcattcattactttatcaatatattgtgactgctttaataaatcctcacatgacttcataacattattatgagtagaacgaggatcttccccgacataatgcaaaaaggtacaatttttttcatcttcttctaatttctaaatcttgtgacggtaaatgcatcctatcaaaaatgtttggaggctttcattgtaaaaagataacaaggtaaaaaatatgcaacatttttttgttggatttatggtactaaattatgtacgcaacgaaagactttcgtattacctaatgattattgtaccatagcccataggatttccatatgtgtgtacattaaatcaattaaataaaagatataagtttagagtatacatcttgaagcctatcagggtatcctcgaaacttctcgtaagttgtatccgttaatcaagatgatgaggaaattataattgggctcacaccaatatcttctaaatcaatccaccgcacacaagaaatagtgtggactattagaataaagtgtatatcattgttcttgttgagttctcaacacatgagcaag

SEQ ID NO: 395437 - DNA, 567 bp, Cannabis indica
cactgctattcataatttcgatcccatgatcatacacatttctcactcaaatctcttgaatctgtcagctacttccttggctttgaggccaatcaaaatacttctgttttttatatcttacccagtttaagtacgcctcagatttgcttgctaaaaccaactttgaaaaatgccaagcgtgtgacacaccaatgattttggaaaacaaaattgcagcagctgacggtactccatttgatcaaccagaactatatcgaagcaccataggagcacttcaatacttaacttttacaagatcagacatggcttattctgtaaaaataagcttagtcaatacttaatggctccaacagtaaatcattggaatgcttgcaaacgtgttctcagatatattagaagcactccacatcttggcttgcacttcaaactagcaatagttcttgaccttgaagctttttttggtgctgattgggcatcaagtttggatgattgaaagtctactagtggcttttgcatgtttttgggagggaacttagggcccgtttggcacagcttttggaaaagcta

SEQ ID NO: 395438 - DNA, 564 bp, Cannabis indica
caaagtaaacggccgatcagagacgggcctgccgtgattggtcccttaattaaaataaaattttatactgagatttatcaatcacggcggccgcaaagggccctccaagattggtgccttatttttgaaagtttagggccgagatttgtaccaatcacgttgggccaatataggcatgccgagattgctcgcctaaaattttaaaccttaacaattaaccagccaactcgcccagccattcttcttcttccccaattttttttcggtcacttctctaaacttctgaaaatggcagccactattgagtctgaaaattcctcaaccaattcttggttttcttttgctctctttcatcacaatcacactaagaagcaaatattgaatttaaatatatactattgatttatatattttaatatctttaccctaatagtttttaatttattttagtaaaactagcttgtatttaaaggtttcaggtttgaatttgtttgagacactacaaaaaactgctacttttagtgacaacttttagttacaacatacttttttcgtgactaaatg

SEQ ID NO: 395439 - DNA, 1029 bp, Cannabis indica
tttattttttaattttattaaaatcaagaccgacaccaggtctgaggtcaggtccgagatcgagacaaggggagggtccaactctgggaccgggtctgagtttgattttcaaagtttaagttggggtcgtagtctaaaattttgattaagaaaattgtttaaaaacattttaaaactgatgttttttgtttttaaaatttagattcttaattaaaaaattgataagtaaaaacagttttatagaacatgattttgaaaaattcacttatttaattttaaaaataaaaatctatttaaaaaagtgttaccaaaccacacactatttaaattgttcgtatacctttttttaaaaaaatgtccataaacgtattaatttaaatccacccttatatatattggtcagtcgtctatatatatatattctattactatatacatacatacatacatatagattttatcctttaataaatttctctcgtgaaaaaaagtaaagcgactcttataaaattggttggcctttctcttacaatttattcaatgcaaaaaactaagtgttctactcgctcgacctcttgtattgatagcctagttcgtaacttctggtgagcttgcgagaagggtaacattggtctttacttgaaggcttacgacaagatgtgccttccgaaatctcaaggaggcctgggattttgaaagacttcgaagataaatcttgccttcttggccaaatgggggtggcagctcaccactggttgtaactctttgtgttgtaatgtgttgaaggctaagtactgttcagattttatgccctaaataaaactcatttcaaattatttgttatcaatagaagattagaagtcattaaagtttacatgtcgttttcatgattatggtttcaatatacaacttttatttaaatccaaaacatatagttattcacaataatagtgatatcatcacaatagaaagtaattgtgattatatgcttcaaagtaacttagtcccatgatttatgagtgcactgga

SEQ ID NO: 395440 - DNA, 973 bp, Cannabis indica
tcggtttggataccaccagcagcggatgtcttcaaagtaaatgtagatgctggtgtgaaaaaagggagcaggcgcagctagtattagcttggttgtgcgtgaccatgccggaattgttcaatcggctgctgcgactgttatgttgcaggaaatgactcctcttcaggccgaattgcaggccatagcaggcgggttacaagctgggctacagtgttctctgccggctttttatgtagaatctgattgcctccaagctgtgaagttggtgatgcaggaagaggaaggatgcagagatattgatggatttgttgctcatattaaaagtctaatgcaaaatgtaagggttagagggatttcttttgtttatagggaagcaaatcaggttgctcatgtattagccaatgaagctttgattaacaaagctagtgccatttgggttggggttgtacccccttgtgcgagtcacgctgtgaaaacagattcgcctaatccattgtattgattgttgtttgaatgaatcctgtttcaaaaaaaaaaaatctaaataataacaatatatatgtgtcaattctcaattactaaacgccacattttggcattgttatttataattgagcctgaccacataattaaagagccatgcattaatccaagagagttgggataatcatgaatacaagttataataataaatatgtacgctgaaatgtgaataaaatatttcatacaatttcagttaagtccctcaaaaactactgcaatagtctcaatcttatataatcctctcagataattgacaatgctagataacctgaaaaaataagtcttttcgaaaaaaaaaatatatatatatatgaggttgaaatcgtgagaaaaaccgagaaatttattactattttacaaattaatattttatgattaagaaaaaagaaaaaaataatgtaaaaaggttttgagaaattctataatgcac

SEQ ID NO: 395441 - DNA, 533 bp, Cannabis indica
gagtaaaagtctcaattataatttcatcactttggatgcaaattatgtagaggccatataaagacaatggcttatggcttcactttgcgaaatgtattagagacaatggcttagcttatttattattaaataagacctatttttaatgtcatttataattttattaactatgctcattagctttgagctttgtcattattgccaaattatgtgactattattaaagagtgcccaaatggcccacgtaatcttagtcaactgctatgcacgttacacaaaaaggagcccacagaagtcatggattaaacgcttggggctagctcaagtggccataggtgggtgtgtgagtgttggaggtcctgggttcgagtcccaagtaaaacatgatgtattatataaacgcttgaataaaaaaaaaaaggaattatttcatctatgtttctctttgaccaatggtctatccttatgggttgtacttttaatagatattactcaagtagtattaaaaaatttaagtttttatacttaatttt

SEQ ID NO: 395442 - DNA, 1189 bp, Cannabis indica
aaatcatatattatttttattaatcccagattagtcaagcttacaaaaaagaaaaagaccatattaatcaacaactcaaaatttattacagagtaatatcaatttggttgatatttataatataccgtcgattattttgttaaaagggatttcaacgatagcctatttgactagttttattaaggaagacatgaagatgtcaagcaccattggtataatttattaaggtaactaatagtaatgttttttgttttatttttttttgtgttttaaggttgtatttatcatttatgtatggacattcttcctaaactgctttcaattttgggacacccttcatcatgtcaggatatgctaattattatgttttttttaaaaaaaaaacaactgtgtaacttcactaagaatacataatagacacctataatcatgactggatatgctactttttttttagtgtagcgtaatggtttttacaatcatatattagcttaatagcttaaaggtcctgggttcgaacccatgacctctccttttttcccatccctccctcaccactaagctagccttagtggcttcactggatatgctacttattatgttgaaaataagaatctaattattaactcacacaaagggggttaaaagtcatgtgaaaaatttatactatacccttaaaatgttgtttcgatggtactttcttatgggttttgcatcttttgatcaccaatatttttaataggtacatatattttttataattgtttgaagttttttttttttttttttgaaaattaagcgtaaattatattagatagaactagacctcatggtcgttacataaaatgttttccggaaaagaattgatcgggatcgatccaaacacttggtgggtaaaagcccacttagcgacattgtgtgtcgcatagttacagttcctactaacgttagaaaaattacaacacattaaagaaggagaagacttagaacaaaaggagacatagttctctagagcccaatgagacgccttcccattaagagcgttgatcactagtctcgagtcactctccacaataacataattatactttaaatctaaagcaaccgacaccgccaagcaacaggccgccgcttctccgcaaagagcttccgagaagtccaatcgagccgtgtgaatagaaacccaccc

SEQ ID NO: 395443 - DNA, 736 bp, Cannabis indica
gaatgggcagtgggtgagtggagcagtactaaagcccaattcaatgagaagagaacgtacgtgtgagcatgggagtcgtagtatgcatagagacgaaaacaacggtcgtctagtgatctgttaagtgctaagtatagctaaaaagttgaggaagatgatgatggccaagacaacccacgcccttcatgctctcatcgcctcgtgctttctcttccattattattgtctttatttgtcccccttcttttacgttctcatgctctctctctcttataatattaatagcagtgatatactgctcctactagtatagtttattctcatatatttgcattaagctaataataaaataatggattaccaaaaaaggttttacaaatataatagtaattacattaatgtaccattactattaccatttcttctttgtatattaatggggaataataataatattaataatccgtggtcgtttggtttagctgcttctttatccaacaacaacaacactaatagtagtaatgttttatcaaggacgatattcagctttggcgattcccttttggacgccggaaacaaccacttcaacaagaattgctcttctcaagctgatttccctccttacggctccactttcttccatcgccccaccggtagattcaccaatggtagaacggttgtcgatttcatttgtaagtgggtaacatcaatatatatatatatatatagttgtcat

SEQ ID NO: 395444 - DNA, 659 bp, Cannabis indica
ctatttttccaaagaaagtacaaagtggcagccaaaacagcattccattatcaaaaaaccagaccttgtttcatgttgcagcagctatgaatcaactcagcagtcgagtttggccaatgaaagtcccctagccaagtattaacagcagcagtaacctgtgacgagaagctgcaattgaaaagtaagtgatcgtgagtttccatttcagcttcacaaactgaacaaagatgacttggaatagccataaaccgttgtaagtaatcccgagtaagaagatgggtattagctatctaccaataaatgaacatgtcttaggcacaacaagtttgtcccaaatagcccctgcaaaatcagccttaatcccttccacaagcagattataacatctttttgcactgaatttatttcccctcatagcttgattgagaatcacaacattaatgctatcccttatgttcaaaatcttcttgaagtaccaacttgtatcaaccttcttcaagcaattccgtatgtcattatccttcaagtaaatggaatttatccatttgacccacagacaatccgccttgctagcaagagcccaaagatacttagccaagagagccatgttccactttttccatcccgaaacccaacaccttcgaggtttttaggaaggc

SEQ ID NO: 395445 - DNA, 407 bp, Cannabis indica
taaattgggaatttagttcataacactcacgttcacattcataataattcttaaaacataaattaacataaagaaataaaaaggaaaaagaactagttggtgatctcgctctaggtcgccataattgcttcctttgctgcctcttttagttctagggttaatttttgagtattgtgcttctaaaatacgaaatccttatatagaaaataatgcagatatgttcgaatggagaaattataaaactgctcaaaattcccatctttagcccatagtcacaaccatctaacgcctagtcgcaaccataagctaatcaatatgcttgcatgactacccctctccgctaatggtaacaatccttgctcgatatcaaaaggactttcaaggttgtaattgttggaaattatttt

SEQ ID NO: 395446 - DNA, 701 bp, Cannabis indica
ttgaataaataggatttttggcctgaactatgaacctggcagagtttttgcctcctaaatttttctctattgcaaaaattccatgcgaacaatgcaaatcgttgcaaatattatctcccttcaattatattttcctcatctttttaaacaaattacttatatatggttataagtaacaagtataacagcagtaaaatggcttatttaatagctttaaggctacttaaatgcaattaaatatcaagtcccacttattttactttaataaggttatagaaaactgctaattatttataaaacgccacctcataatggtgctagacacctttgtgctaggcaccaagtacaaactctccattaatcaggttacctataattaaccaatactaggcttgaataatccaaaccctgagttcctatagttattttcttcatttgcttaaaaatcgtagagtatttttcactaaaaaaaattgttgtttggatgataaagtagttatattatatattaaaaaactttattattatttttctagtaaaaaaacaaaaaaacaaaagaatttacttatatatatatatttatgccctcaaaaaaaaaaaaaaaacctttaggtgatatatatatattattttaacatttttttaaaaaattaaaattggcttagttcttaaatttttaattaatttagtaagtttttaat

SEQ ID NO: 395447 - DNA, 841 bp, Cannabis indica
accccatcccatgggtaaatgtgcatccctaatctatttttcttaaacattgagtcatttttgtgtctagggatttcataaattaaaaaaaaaagttttaatcgagtgataatttataaattttacttactataattaatatatgtacgtgagatataatattcattttctattatattttttttactttatttggtaatctgaattggtagatacaataataaatactattaacaagtaacaaataatagatactattggatatatatactaattgttatatattaacaacaatagttactattaataagtaacaagtaatagatactattaggtgtacattcaaaattatatatattaattggtttagtattaacaagtaaaatatactattaaattaatagtatatatttggaattgtataaccagtaatggatactattaaatatacatataaaattttatatactaattggtatacatttaaaattggatattttaatagatactactatacattatttttttttatatatttgaaattgtatagatattatatattaggcatacgtataaaattatacataaggtatatattaaaaattatgtatactaattgggggatatatttaaaattgtgcaatactaattacaagtaaaaaatattcttaggtttgatattgtatgtactaattggtatatatttaaaagagaaatttgaaattatatgcatattaaggactaaaattggtatcctaatctaaaactatacataatttgtaaaatgggataacttttacttaaacccaattttactccctcatttctaaactctctctct

SEQ ID NO: 395448 - DNA, 548 bp, Cannabis indica
atatatatatatattatgcaatattggcgatgtcatgtacatatgtattgtgtgtttttttctttcaaaaggcatatgtttactgtttataagaagtagtactttataaagttggatatttatctaaccaaatatccaaccaatggttagctacgagtgatgatcatcatgtattatgtaaggtaaaattatagtggggacactatttttgtttgtgtagttacaaataattttattattggcacgtaaacaattataatttaaatattatttatttttatggtatataaaaaataaaattataataatatatatttatttgaacatttttgttgtagactcttatcagtgtcaccaactaaaatttttttagtgtattttttcccatgattataagttgtaactatttacaactacttatagattttcaaaattttttaaatagtttataattaaacaatcacttattacgtatatatataaaaaaaaaaatcgcacgtacaacacaatatgtaaaatcttattttcgatattataaattattcaga

SEQ ID NO: 395449 - DNA, 773 bp, Cannabis indica
ataatatatataggtacatatatctttggttggagaagaccaaatgagagtatcatggataacaaaggggtcagattcagaagcaagagtagattatggtgtatctcctggggtatatgggtttaccaagacaggaacaacttcttcttacaggtatgtaacgtacgagtcaggctccattcatgatgttgtgattggccctttaaccccaaacactgtgtattactatcgttgtggtggtgcctcttctccttcggctgagctcactctcaaaactccaccagctgccttccccatcaaatttgcacttgcaggtaccttataacctatttattaactttcactattttatttgtttagaagtaataatttttaattaatgataatatattattatgatattatcttagctactgtatttatataactttaatttacagtgattaatttcattaatggcgtaatattttaatgtcacattctcttttttttctaaatactaaaattgtactgtagtaatgtggctaatttttttactggaattatttcgtaatactcaaaatgaacaaaaaatatatgtatatatatacgtccttacggatccttttttgttaacggattatcaatatcatttttataaaaatatagaaagttatctctttctttttttctaaaaaaaaaatatatattaatatgactgtattttataaaaattatttattgaactttctattttgataaatgacaaattagatattatattttttaaaata

SEQ ID NO: 395450 - DNA, 946 bp, Cannabis indica
aatcgacacctctccaatcgcagaccctagccaccacttctccaggagtagatctcattatgagtagagatctttgagctgcacaatgaccatcatgcttccttgccgccataaagatgaagcaaaatggctctttgagaaacgggatgatttgatagccaaagattaggaagagagacgagagtagagagggataaaatggaggctgaagagtatctagttgattaagagagtaattaatgtggtcagatgggaaagaaaaaacaaagaagtaaagatttagaggatcagaagcattaaagatacatttaatgctctgaaagtaatcatagtaatcttggattaaaggatcggggcaccggaaaccaccacaccactccggtgggtggaccaaaaacccatttcgggtaccagagtaggaaacacacacaaggaccttgaacattctagagagaaaaaaagcctgtgatatagatcaacctcttttctttttttcccttttttcatatattagaatgttaatacaattaatatttaattttaaattggggtttgtctctctcctcaagcatccatgatttatccatataataactagttactagttatataagttgaaactaactagtttctcacaattagttaatatttatatattactttaatttttatcttagttttaattatgttattatattactcatttcaaatattgaaactagttatataatttataattaactacttagtttcttacaattagtaattaattataactagtaactagttacagtggtaactaactagtttctcacgactagttactatttatatattactctaatttttattttagtttagatcatttcattataatattcattttaaatattgacatggttactaataattaattgtaacaagtctataacatatatatatatat

SEQ ID NO: 395451 - DNA, 987 bp, Cannabis indica
  modified_base (884)..(884): a, c, t, g, unknown or other
ttgaaactaattgccaaattcgatgatgatgtggaattgcaaaattcaattgttgtttggtcggtttccatttttgtattttatgaacacccctattcaattcatatttaccaatagctatacaattacacatttaggccttcacactatttgacaaattactatatattaagccattacactattttcatagtgtgtaacaaatacccctccccattattgattgtcttctttattttgttgaaaaaatgtacacttaagaggactttacttaacttttttttttttttaaaaaaaaaaaaaaaaaaaaaacaaaacaaaaaagaaaaaataacactttcttcttttcaatctctattgcaaaaacaaatgtttttatactcggtctttaatgtcttggagccatgaatttttttttactttttataacaagttttaactttttgcaacttaaattggataacctccaaactattactgatccttctaaaaatattttggggacgattaatggtgtgaggtatcagattgaaactttgttgcttaatgaagaaatatattggtgctaaagatctaaagtctcttatttttaccttaaagcaagtgataaaatatgatttattttcgtttgataggaatacaatagtccagtcaatagagttagttagcaattagtttttctgttatttctgtgagacttacagctcggttgccaaggcttgtaccatcagaataattttctctttggtagcaacttttggttggtacattcaacaagttgatgccaatactacatttctaaatggtgaattaaagatgttttcatggagtaacacaaagattcattgatccaaacttcccaatctatgtttgtcgaagctacncaaacgtcttgtatggcctcaagcatgccccaagagtctagtttgacatgctaaaatcctctcagcatcagtcgagtttttctcgtattctaagtctagattc

SEQ ID NO: 395452 - DNA, 636 bp, Cannabis indica
tttgagatatatacatatcatatatatggatatatagatttacagctcaactatatataaagacacagttttccttcttttaatgaaatcccaacacaagttgtgttacagttcaactagaccacacacagtaataatactcattaatattcatatatttttatatatagtgaaattggatttgacagattgcttttgtttgttttcgacgtgggaacacaaatcctctttaccatatgagtttgtggtagggttcacttgtttttatccatatcttatatatatttatatttatatggatctgcttaattgtattagctagctagtattatttgcataaatgaatatattactttatattttgcttttgaatataaattaatcgatcatcccaaaacaaaagaacattcacctttttttttattcgttttttccaatttattagcatgcatgataataaaataattataagaattaattaaccaatatataatttgcattaggtatttctatatcacaggtaatattgtgcaatgtacatatgcaaagatcacaaatttgtgacatgcaattacataattagtgtttcaaatgtattgtttcatttgcagatatatatatattatattaagagag

SEQ ID NO: 395453 - DNA, 726 bp, Cannabis indica
tgaaacatttggtttctgctgagatgaagtgaactttgagtgtcagagagtatagtgacacatatttgattaatggtgtttgagttgtttttatatatgttagtgaaccttggcttgatatagtttatcacttgtctgcaaatcttatgttaagatcacaagtgtatcacctttctgacatatttacggattataaatgatttggttggtctgtttcttgatgtcattagtatccacttgcattttggatccaatcaacaaattttgtctgtttctgaaaatggcttagagtattgctcagatgcttttactgattattgcaaaagttggaattagtagacacaagacagtaccaagaacaccacaacaaaatggtttggcagaaaggatgaataaaactattttagaatgggttaggtgtctactaattcactttggattgccaaagaacttctggcgtgaagctgttctatagcctgtttcttgataaatcattgtccctcctctacaattggcttcaagacaccaattgaggcatggacaggaagagatgcacagtatggacacctaagggtatttggttgtgtagcatttgctcatgtgaggcaggataaactcaaagcaagggctaggaaatgcatttttttggggtaccccgagggagttaaaagggtacgaaaaatgtggagcattgagagtactggagatcatcaaagtaacgtcatc

SEQ ID NO: 395454 - DNA, 602 bp, Cannabis indica
tagaccccgaccccgaccccgactcgaacccggaccttgaccctaacctcgactcggactcagaaaacatgccctggactcgaaccctagacccggaaccaaaccccaaactcaaactaggacacgaacccaagacctcggaacccaattagactcgagacctcggaacccatccagacatgagacctaggaacccaacctgaattgaaacccaaacccagaccaggacctcagaacccgacccaaacccaaaccaggacatgaacccgaaccccacaacccgacccgaactaaaacccggaccctggacccgaaccaagacccggacctcagaccccaaacctgaactgcgacccagaccctggactcgaaccaggacttagacccaaacccttgacccaaacttgaaccgaggcttggacttcgagatcgggtccaggtctaggtcccgagcttgggacctgggttcagggtccaagtccagatccgggtcaaggtctaggatcgggtctgggttcgggtccgggttcggtaccgagcctgggttggggtttgggtctaggtttgggactgggtctgggttcgggtccggggtccgagtc

SEQ ID NO: 395455 - DNA, 776 bp, Cannabis indica
tatatatatatatatcataagtattgtgatgtgttctactagttcgtgtactacaatacaccacatatataaatgttattacatacactcattttatatacataatacatacatatactaacatcattcatattatttattcaaaaaaaaaaaaatcattcatatattatttgaagttataggtccaattgaatgtgaccaaaatatttttgttgagtgtctacataacacaaaattttgccttttaaaataaatatatattttgaaatgatatataaaatatataactattagaaaaagtgcattcattgctaaataacaatacaaatccaatcattttgtttatttatatcacaaatatcctagcccactaacaaaagttgcttctttaaaattccaaagaaaaatataacatttcttttaaataaaattgtaatatttaatattaatttttttaatgtaaaaaaaatcacttaaatattagttgcactcttatagggattttttctattttaggttaaaattactcaaaataaacatttataccattctaaggaaaaataaacatttgtacttttactaattacgaaaataatatttataaagtttctttattacaaaaatacaatggagagataaataccaagtgtaaaaggagagagtgagatacacatgtgaataggataggagagtgagactcacacgcgagtggggagagtaaaattttttactgacgcgcgtcagaatgtggcagtgactctgcggctgccacatgg

SEQ ID NO: 395456 - DNA, 537 bp, Cannabis indica
aaaaaaaaaaaaaaaaagtaccatggctgtagagaagaacgacgcgtttgggaactggaaaataactgaagaaagttctgtattctgtgccttttgcttttttcttacaagctacgtacgaaactcgccgttcacagccgcgtattgggcccactagcccatttgagtaatggtaaatggacctaaaacctgatttgggcccagacattttttcttctttgttacttcctttcaggaaaatgtaaacattggaaaagttgtgttccaaaattctaacaataataatttcctagtatttaattatattactggaaaaatataaaaattaaagaattttaaatttatttccaaacatgattagtgtttacatagtgtgacatatgaaaagaatatgttttcgaaggaaaagattaacaattaaaactgaaaacatataagaatggctaattatgatttttgttccctgaactttgacatataccaaatcatgcccctgaacttttaaagccattgaaaatgctccctgaactattgaga

SEQ ID NO: 395457 - DNA, 894 bp, Cannabis indica
cattgtcttcaagttggttgtattaaaaaaaaaaaagttgtcaaaaattaagctcagggtcctatttttactattttaaaaaatacagggtccattttgtcatttaacaaaatacagggtccaatctgtaacttttgcaaaacacagggtccaaaatggtatttaccctaaataaattgattttattttagtataaatattatatattttattactaatatattatatatttaggttctaccaacaaataaattattcaatatataagctaatttttaattgtgtactaacaatatttatagcacagcttttagtttttttttttttaaaaaaaaataaaataaaataaaattgagaaagtcggaccctaacaccaaatgagtgtcatataaatacatagtgatataatacatactttttcaaaatagtaaatcctgattattaaaaataaataacttaaactttatgatactatactatcaaactgtgcatataccacttattaataaaatctcttagaaatacaaattttacagtagtatgtagagatggaaattggtcggttaatgtacggggaatgcaatccccgcccccatccccgctacctatttatacccccatccccgccccatccccgtctaataaccaacggattcggggtaggggaatacccatcggttatggggaacccatcgggtatccattaaggtaaaatgaaaaaaaaacattaatttaaaataattgaaaaaaaataaattaaaccaatattctcacaaatatttattatgcattcataattcatagaagataaaagataaaactacttaaaaaaagcataacctaatagaaaataaaaactaaatatgtctcaaagtttaaaaaaaaaacaaaaaa

SEQ ID NO: 395458 - DNA, 1170 bp, Cannabis indica
aacataataatgtatatttttataattagtactactaagtttttttactttagttcacaaattttttgtagtactaaagtaggttttttgagtggtgattcatatttcaataaaaataatataaaattaaataataaattaataataaaattaaaaaatacaattgcatttagtataaatagatatataactataaatagtatttgtttatctatatatttattaattaaataaatattatttggttagtttttttaactttaaattattttataagtttctttattaaaaaatacttaacaaaaaaactatatcttttatgttttatttacagtataaaattttttaaaattatttaataatttttttattgataatatatgagtggactactaatctgtttacacagattaatttagtctattctaatagaacttaatggtgattaaaaaggtaatataaatgtaactttagatatttaatccgctaaaagaaaaaatatgtggtatataaatatataaaatttaaaacatcaggtatttatgccacagatattcctatgtttgaatagaatttaacagaatagtatagtaacggaagtaacggaaatgtaacttaaaatatttaatccgtaaaaaaaatgtgatatttaagtgtataaaactgaaaacttatggtatttatatccaaaaatactagaaaaaaaattaaaatttacgacataaacaaataatgaaaaagaatataggactaaaaagcaaataaagtttaaatcaggggtggacaggatctaatctaattgaaccaaaacgaaccaatctaattgaaccaaatcaatctaatccaatccaattataataaattagatatccaattacaattagattggattagatgttaaaaattgtattttaattggattggatcgtttgttggatgtcaatctcataatctaataaaaaactcatctaatccaattacatctaatacatatttaaaaaaattatttatatttacttatatataataaaaaataattatatttatgcatgtcttttttttttttttaaaaaaaaatttataatacttagttgttttgtgtatttattttcatgatgttttgttcaattttattaattggtagtgttattttagttattttaaactttt

SEQ ID NO: 395459 - DNA, 1073 bp, Cannabis indica
aacaaagtttttaagccaaatgatcactatacgttttttaataacattactcatatgccaatcccaaccaatgaataccttatccatcatgtcttcaatttttgagatcttcattttattctccagtaaagctcccactccaactttattcattttcaagagactcgggacatcttgttgcatgttccttttattcaaccctctgacattccagctaatgatattggagtaatccatcagaaacggattggaaaacttccccactttcagcacccttcccctgctcttgaagcacattaaagccattatgcaccttcgtaagatcagctaacaccactttgcctttaatcttacaattcccaaccttcctaggaacctcccattcattacttttgccctgctttgggtatataattcttttgctaagcaagagatcatcacagtttatatgaacttctttgcttaatgtttcttctcttaatttttctaatttaattaaattttatttagttttactataaaaattattatattaactctcatttagttttataactatataaaaatattttatattcatgatcacaaaactcaaaaaaacatgtacactatattgataaaaactaataagagatgattaatacaataagtaaaggaatcaataaagttattataaactgatatattattttaattatttaaattaatatcaatgttaaaatattaacaattgcaccatatatatttttttcaactttaatttttttattttatataattatttttttagtacatttttttctgaaaatacatttgtgctactctctatattaatgtaatatactctatgataaatgttattatactagttatgtgttgacctcacttttagccaacgacagtgaatctttattaaagcgataggaataattaactaagagaaaagcaaagattgtaaaggaaaatactaaatttataaaggttcagccccttttagttggtaatagcctactccactttttgttgtactaacatatgaggaagaatgaactattctctctcaaaatctgtta

SEQ ID NO: 395460 - DNA, 940 bp, Cannabis indica
actgtgcatgatcttgttgtattatcaggtaagcaatatttaattataattagtttgtccattattacctataatatatagtatatattacgacaacaattataattacgtactcatatatatacaagaagtgtgacaaaaactaaattaataaaataataatatcaaaatttcacggactaatcttacacaattatatatatgtatgcccaactgttcatatatataagtataataaataaatgtcaatgaatttgagctctagtaatatatgcacgagaaacaatatataaatattaattaatctaactacttatattattatattatgagaaatgctaaaaggtactagtggtatataatatttttttatgtgttaatattgttattggtctaattaagtatcgagtctcatataatttaatgtaataattttcagagagtatcactaattaattgtaagacgacatgtctagagtagtagacaccagtggtgctagctagcatttaggagaaatgttaaaggctaccactaacaggggcggacacactaatgatattctgggagctatagcccaagtaaaaaaaaataagtgttaaaaaaattaaatattttcttaaatgttttctatttagttaaataattatataataaaatagtaaaaagctcccataaaataattataattttaatgtaaagtaaatataaatatttttataacaattaagcctccacttatcaaaaatcccgagtccgtcattgaccattggtgtctaacactctcttatgtattaatatcgttattggtttaactaagtatcatatccgaaaagcggattaagtgtaattatatggaaaagtgtgcccgtgtggggtctgtggaagttatgtttttttaactgttttttctccctaactgatttcttccttttctttttt

SEQ ID NO: 395461 - DNA, 803 bp, Cannabis indica
caaagacagatgtacaaacctgctaacaagatcttggccagacctatagctggtttggctaagagtgacaagtatcaagcaatggatagccttcagcaagactaaccggccaagtgtgcagaaacacaccaacacttgtatttttctcacaagccttccaactcgccttcagcattctcatgatttcagagcagttcaaactgcccataaagatagggactctccatccaaataacaaccttgttctttaggaattatttattttgtatttcaaatatactttttaagctctattattatataaaaggtaagaaatcacacttagaacatctcaagactaacaataagttctctctcttttttcatacttcttacttacaaaatacattctcgttataaggaccaaatatctataaattttggtatcattacatttattatcattctcaagtaacattcataaacaaagattcaattgattctgtatcgattggctaaatctacagtcaaccgtaataaaaagctataatcaccacaataaatgtcacttttgccagcacatttttgtgctggcaaaagttggtattgcgctagtaaaatagaatttacttgtgatgtgttggcaaaaggggttggcaaattaatgttggtattagaacttttgccaacataaaatgaaaagcgttggcaaaaataatttttcacagcgcgtaaatgcgctggtaaaagttagattttagccactgcaaatgtatgctggtaaaactttgacctctttgccagcgcagtttgcaaaatgcgct

SEQ ID NO: 395462 - DNA, 582 bp, Cannabis indica
ttttggattgaccaatctttttgtgtaaattatttataatatttaagggaaataaataatcagatgtaatgaaggctggttagctttggattttcatttttttaaaaaattaaaagaatttagtgtatatatatgacatcatgaatgggaaattaaactataatttgtattgaaattttatgaagctaatacaagatttaaaaataattacccatagtaagagggtctttgagtaatatacaaagttaaatacaggttagaaggctggttatgctaattcatattttaatgaaaaaaatctaaaccattcactttaaatattgaaaagccactaattttgatcacaaatgtctaatctaaaacgctttatatatattctagaagtgtaaaattgaacagaaaaggattgaagccttcctagttgctcattttgaactttgttaagaattcaacaaaaattcttcaatcaaaaaaaaaaaaaaaaaaaaaaacaaaacaaaagtctaactaaacttaaacttttttttaccttttttttacgtactacgttagtaacgtaacgtagtaactaacgaaaaaaat

SEQ ID NO: 395463 - DNA, 1187 bp, Cannabis indica
cttgttgttattatagaatgaaaaagaataagagtatttggttgatgatattgatagggagaattatggtttggtctccaattgtgtttcgtaaagtatgtatgagatttcttcagctgaatttgtttgatgatatgaaaaaattggtacatattagattaccagagctcagagccatataattttttttaaaaaaaaaaaaactaaagaaatatggtcttgtatgttgcagttatgtgatagaagaaaaaaaataataagagtgcaaaataattttgtcatgatttctttagaatacgtcacttaatattactttgctttgagccttttttgctgaatttactttgctttagttaattgcccaaaacaaaataaaaattactaaattattgctaaatcgccatatttttcatcttttagtacatgtaataaaagaaaggtaataattgtaaacttaatttgatagtacataaaaaaaatgggagtgatataacatttcaaaattttcttacatagtctaaacatacagaattagtcaaatcataactatttctcctatccatttacttcttttttcttttccatatttctaaaagtaaagtatcatattaggataagagagagccatgaaaatgaaagaaaataaaaaagtgtgcaatgtaacaaactacaacaccactccagcttttgaagtgttgtagtttgacttaaattatttatttattatttatttatctatatatgtaaagttgtaattttttttggggtaattattaattggggagaaaagaaaagtcttggtgaccaagttttgatgagtcttcttaaggaagagttagaatgtattggtcctcaagttgttttgatgcccaaattttgtaactttataaatatgtgttttgtgtgagagaaaggtattagtgtggaaaaaatagtgagttgtgaaaagagaaatgtgtgagttttgttatgtggtgagagtgaggaagaagaaaagtgtgtattgggattttggtggagagattgagatagagagtatatgtaattttgaagtgataagtgaaatatatctcgctttgtgaaactaccaaactgagtaaattgttttgtttcgtttctttgttatttcgttgcgcttgaagtttatcatttttcccaacaagtggtatcagagccaaggttcagat

SEQ ID NO: 395464 - DNA, 662 bp, Cannabis indica
ctctctctctctctctctttgacagatagatcacaagggcatcgaacttggaccgcgacaatgcaaacattacccaacttggtcctcatcttccaaaaatccaatgccaagcaaacaaaacccactagtttttgttgtttggtatttttcatagattatttttgtaagttgtgaactattgtaattttatagattatttgcatgttatgttagtttttatttgggtattacattgatacttattatttaaaattctgtttttatgtttaccaactaatcatttcaaataaataattaattacagttcattacgaaaatatttacactgatacaacaactatttaaatagaaactcaatatgtttaaatagtttaaaacataagatacatataaaaataaataacacacaaaattatacatggtgtcaataatgtttgcagattgttactagcctacagagccacacccatggcatgaaattttttaaaagaatatttgaacaattaaaaaaccaaaatgacttacacaaataaagactacatcttgaatttgtcgcaactgttataatcttaaacttctaatcaaaacttttgtgtagaggatggtgaataggattgtgtgttgtatttcataaaatagtatatatttatatataaaattag

SEQ ID NO: 395465 - DNA, 1012 bp, Cannabis indica
ttttttttttttcactaacatattgtccacagaaacttaccaatttggtgtaacaatatgtaatatataatcaattcattttccaacatatcaagcaacaaaatataatatagtaacctattaaacattataactattataatgtaactacacacatagctttatatagaggctggatattgtagattatgatgatcctagattgaaagtacacatatcataaatgatactatatataatatacttataatatatattgcactctactagggcatgcagtatatatagtacaaagtagttttctgattttattatgatgtatataatgtacagagagatatagcatttgtgttagatattgtgtcagaaaatgaatcttcatggaaccgaagaaagaccaatgtagtaaaagattggttgagtaaaaagtgaaacaacaattaaacctgcactgcatgctctttttgttatatttatataaatatcgtatctgaaaaagatcagattgttctgcaaattaattaattgatccaagcattcataataatccaccttatcaatattattatgagtacgtacttacgtacggtatataacattagctataactagctagtagctagttttgatttttgttattattcgtattaatatttatttgcagttcacactatatgcttgtggaagaagcaatgccctacattaatattattggtccaatataattttgtgagtttattatattaatcataataattacaattaattaaatagtatatatatatatattaattgtaccatatattatattactcttgttgttgagtgtctctctcacatcatgagctaaaataactcaacattttatacaattatataaaacgttttgaaagaattaaatcatttattaagatttatttatcgatgaaataccacacaaatagatgcacttcaaaaaaaaaaaattaaaaatacaacttatatggattttttttttttttaacaggaacaa

SEQ ID NO: 395466 - DNA, 648 bp, Cannabis indica
  modified_base (45)..(45): a, c, t, g, unknown or other
tagagttttcataatatactttaaaggatggagtaaaaaaaaatnttaggagtgctcttaagtgtaaggaaatttacttggttatttcataatttaaaatcatatacctataattaaaaatggaagttacaacttacaattagtatatcatgtttcatgcataataaaagttacaaattacaatacaccttaacacttgtttataaactttttctttttttagcctagaaatattttaaaattaactaaattttattcttccatatcaatgtttaggcataatcaattgattttttatatatgatttttttaattaatatgaatttaaaaatcaatcacaaattacgaataaactaatttatgtttaatttgttgtgtaatcctcatagtatatatttaaatactagatgaatgttacgtggtgagccacatattgttaattttatttagggtgcgtttggaaaaccacaatgtaattggatttgtgtgtaattagaggtaattacacaatttaacatgtttgtctcaccatgtaattacactgtaactgtgtaattggaagtaattgaggggttccaattacactttccaattctcatggctccccatgagaattgaatgtaattacactgtgtaattactaaaaac

SEQ ID NO: 395467 - DNA, 858 bp, Cannabis indica
ttattaattgcaacactgtaggtggattaattatatttttaagtttaactaactaaatgtatgttgaccctgcaacatctaataatttgtttatttttttttttttaaaaaaaaatcatccaataataattctcataaatcaaaaattctattatgatatatcaatctcatatgtctgtaattttttatttaattttggttttttttttaattcaatgtagaagtgaaggactggagtaaggtgtcaccgttacaagttcaaatcttattaatagctacaattcttttttttttttttaaaaaaatatcattatgagaatttgaacctagcactttaggttattacactaaaaataatttgacataattttgtgttacatcacgtcagtatgattttaagacacatatacattaatatgcaattgcctcacctgaattttacttctaatttcatccctacatgctctatcgctgttgaatttgaaatatgttgtacaatacgtataatattaataatacatacataactaattattatttttatgtgataagtacatatatagaatttttctaatatagtagacttcataccctactagatatatatttcaaaaaataataataaaagacacatttttattattaacaaattttattattagtttttttttgacattggggggagagggattggaatttgagtcatcctcttttgtaaaaagtttaaaatcactgaattatgcctacgaccactcgcaaattttagttttgattatttgatataacatgatagaattatatatatatatatactagcaaaaaaattacaatgcgaggcacgtatactaaatttttatg

SEQ ID NO: 395468 - DNA, 662 bp, Cannabis indica
aaaatcttacctggatgacgaatacgaacaggacagatgagagagacgaaaagcgaggaggtaactccggctaaccagcgaccagcagagagagagagagagaggaggttgaaagctcaaagtgtacaactttcttcaatggctgagttcattcgtagagagaagagagggaaagatcggagcctgggtgaggctgtgttggtagctctgttacttaggttttgggtgggctcatgactggactatgggcctcactgtctaaagcccaaactgaaaacctttttttttggaattattttaaaaatacacaaaaaaaaattgtaatttagtaactacttataaatatttatcaaaataatatcactcttaattatgtgatcttaattattgagattaattacttacatatcttgttgtttgtaactttagggtggtttcaatctttattcaaatattatatgtaatgatatgatatttttttatatgtatatttataatattttattttattttagatctacatcatgacattaaatgtataagtttatcaagcatttacactataaatgtactaaaaaattcatatacattataaatggttaatattaagagtaatttgtagtataaatacttaagtttaatttttatttgtaaataattac

SEQ ID NO: 395469 - DNA, 1331 bp, Cannabis indica
cctttaccaccaccatacgactaacacatggatataccacaaccaaaagacaaaagtcgccttccatgatcaatttaacacctggataatcatgttacctctttttaaaatcctccacatgtcaacactaagggaatgatgcaagcttctaccatacgtagcattttgaaagcttgggggtaaatattattcgatttctagcaagggccacgtggagtcaaggtcatcatcaaaggcccacttgtgggtccccaaattatataggatcttccaggaatgtacttcaactctgcgaacgaataaccttttgccagtgacaactcatatccagaaggaggtccattactttgatgcccgaaggatgagatagcatgttcctggaagactagttcgatttcgctttatattcctatgcacagatgaggaaataattgtttgccggatctcaacagaggatcatatcaagctaaaaggggagacttcctaaaatagaaaccaaataattaattcataattaattgctcacgatcaaaggacacagttttgactaatccaatcgtatcttatctgccaacatatcttctcctttgtgggctagacttcatgaggtagcccaagtgtgtaattcattgtaaactccccaatggaggaaaaaagaaaactaagtataattcttaaaatactataaatacttgatgaatcctattgattaagggttgaattctcttgcaatacttgctcaggcaaacttgagaacttacattcattgtattcccaaaggcttttcaagctaaagagttacataataacatcgactcgtggactaaggttagtcaatgccccaaccacataaaaactgtttgtgtctctattactttttctcttttaattatttataattagttttctgaaaatcttaataaatagtacctaaagttttaagtttataagtggcaaaacccaatatttatttggcataagtacccaatatttgtaaaactgtatttttcttccagtttcgtcaatacaaactctgttttgaatttattaaaagaacatttgaaagtaactgatactacatgtttctctctagacccaatgatctagcatctgggtcttgtgtgcgccctatttaagacaataacaaactctgtgaagacaaaattagacaaaaaatacaattttataatattgggtacttattctgccaaaaataaatattagatttatgccacttataaacttaaaatttttggtacttatttactcttttttgaatgatatagaattttttgggccacttttgatatcacttgccgatgatgcgactt

SEQ ID NO: 395470 - DNA, 694 bp, Cannabis indica
acacaaaatgccccatcaaagcccaaataacgaccaacccaatccaccatactcttggcacacttagtctcacacagaaaaataaaatcgggcctcttttttgagaaataatctcttttaggaattgaacggtccacgggttcccaagcccacgacaattccaaactaaaaagattcataatctttggcgggccttcaatctagagcccgccccaattgagtttttttgttgcagtggggcattattactgtccaccacgtgatcatctaagtcaatattctcttccatgaccatatcaacttgtgatattgctccattaatgcccattgttactctccttctttttgttcaaaaacaagctgactatcctccccattatcttcaatatgtatcattgttgactttccatttttatctcccttaattccttccccatcaatatcaccttgaaagccaatattcttatcccccaatcaattgttgcacaattttctcccataattcccgcccctaacgtcactgaattactgatcatcaccggagtgcagttcatcagcatagcagatgattccccagccagtttcaccgccatttctggtctcaaccaccttgaaccaatggaatgtgattgtaaagaccgcttagtttaatttaaaaattagcagttaattatgtttaattatggaaaattat

SEQ ID NO: 395471 - DNA, 922 bp, Cannabis indica
aattggtgatatatatcgataatggaaattagatttaaagactttttttttcttttttctttttcatgtattttttttgttatatattctattcattaacatattatatatattaatattaatatatatgtaatatggattattaataaagaagatgactgattagataggaaaaaaaacatctttgcttgcaattattttcttgagttttgaccccccccaattgttggggatcatgccacgtgtaactattttctcaaattaatatatcgattgatttatatattatatacttctatttataaagggaaaaaaatcattattgatcaagttcactgattaaaccttgaacaaattattttctttctttcctatcctaataaataaactcttgattaatagatgacaaaataaagattattattataaataattatcacataattaatatatgtaaatatataggagaaatatatatataggtataaatacacaaagttactaaaacaataatttttttaccatcacatttaaagacctaattatcaaagatatagtagtaacaaaattactatatattttaataactttgaatattttaccactaaaatattaaaaattaaatatttgtcggttgcaaacctaaaaatattaaaataatcctaatatatatacataataaataataaataataaataataatataagttattaaatcagccataccaatctataaaattaagaaagatgggtcatgctcatttttatggaatcttttttttttttgggatattttagaggacctaataaaaagcatatatatttatattatatatatatgatgacatgactagcttagaacctttttattattttttttcctttttaaaatagtaacaaaaaacaaatagcaaatccagg

SEQ ID NO: 395472 - DNA, 677 bp, Cannabis indica
attatgtgaaactcaagattttaaacagtttaacattacattgtaaaagttatgtaagactcacaaaaaagttacacattcacattacaaaaaaaaaaaaaaaaaaagttaacacattcaatatacatttttactcttctattccctacttcctataccaaacaccccaaggcaccattcgcttaataatccttctcgagttatactctcaagtctcaattaaactgattgctattaacaaaattataattattcaaatatatatgtttgtataaaatatatttaactcaaactcaatgttatttaactcaaatttttctaatagtatccatttattttattaggttgatgttataattaatttttttaattagatttaattaagtgatgttaagttcgattaaagaattaattactttcaaaatacattttatatattatgtccaaacatttattttaaaaaataatgatagtgatagatactaatatttttaatttgtagtttaggagagtgtggttattataaagtgtacaaattattagaagcatatatatatcattaattattttttaaaacaaaaaaattaaagatttaaatatatatattatatatagatgtgattgtatatatatgtaatttttatttttaaatatatgattaattaaattttttatta

SEQ ID NO: 395473 - DNA, 518 bp, Cannabis indica
atgatgcaaataatttattacacttgtattttcttaatacaaatatataaacaaattacttaatcttaatttggacacgggggtcactctagtacgaatgattatattgagtttttagctttttgattctacacgatttggctcttgatactgttttgttaatttatttctcctaaaatgcatgcctaaatttaattaatgtcgtacaatattgtgtcttttgaccatgaataatgggtacacatatctgtaattattatgaatattaattgaaaaaaaaaataactctaataatctgatatagtccgcagaatgaaaatggaaattgagaaatatttgttcagtgctaaactatcaaaattaataaatagtttaattttgttttaaaataataattataattgatttataaaaactaattaatcatattcacactacaaaaaataaaggctaattaggacccatgaactttgacatgtaccaaatcataccccttgaacttttaaggtcattgaaaa

SEQ ID NO: 395474 - DNA, 1136 bp, Cannabis indica
acaatgatggagttgagagtaaactatcgtaccatgccaaaacagctgataatttgaatctctgactgttaaaaaaaaatgctaatgtttcaaaataggatatgaaactattttgagagtgaactattgtactatgttctttcgttgagagtaaactaggcattccgtgaaaatacaatcacgagattttggcccgtgattgtactttcacagaatgcattctgtgatgtacggcaaccgtcaaatgagggagttatttgatctaacggttgagattgatgtagattaggttaaaaagtagaaacgtattactctgatttaatgtaccctgagacccatctaatgtaacacggaatacattccgtgaaagtacatgacgagacaaaatcatgtccctatatatatatatatatcttttttccaaatccaaatgatgatacttgggaaatcttttgatcttactttttcttaaatgtcttataaatttttggttaggttttcgtagaaaataaaataaaagtataggatgaataaaacatccgagaagaatatctatcatttatgaaagtgacagaaaaaaaaaccaattcaaaatggaaaaactatttggcttttaaaatacatgtgtttgttaaaaataaagtaaaaagtggctaaacaacatttaaacatagaaaatatagatggaaaaagatttcattcatccaactaagttagaattaagacaatgtatataaaccactgagacaataaaaaaagaattaatcatccaaagattaagacaacacaaaactaaaaaaaaaaaaagtttcaattgattaaggagtgaaaaattgggttaaacaatcctcactataaagtaagaatttacatttgactgatataataaattaaatcatttgcaaataaaataaacatttataagtaacaaaataaaacaataaaattgtatccttattatcgtttgttaagtataataatatgttatcgttttcaacgtaagtaacttttgaccgtaagtagtatcatttttcctagaaaaaacagcattgatatctttactttaggaaaataatttcccttatacggcatccttttttgttgtgttttttttttttttttttagtatttatatt

SEQ ID NO: 395475 - DNA, 410 bp, Cannabis indica
aattattttttgttttgagaatgtagtaaaggtggtttttttttttagaattgacttagacaaataaataaattatatgaactgagcaaagcaaactcagtgctgatattaattaaataacctttttcttttaaaagaaaatacaatattctgaaaactgataacatccaacattgacttagttttttcttttcttttctttttttttcctgaagtaatttaggtgaaaaattaatatggaaaaaacaatcaattaaaaatagtaaaagtttcaatagagtatctaaattattcttctccatgtatcaaaagagaaattgatagttaatgaattgttagaatgaaaacttaataaataacaattttggaaaaatttataacaagatgagtttaataataataataataat

SEQ ID NO: 395476 - DNA, 662 bp, Cannabis indica
ttttttttttttagaaaaattaacaaataatatatggggtatgtataataatagaattttaatttatttcacaaattttatatatggaaataatcaaatatggattaaaaaaataattaaatattttataatattttttaataaattttaatcaaactgataacattgattgatgtaaatattttacaaaatgaattcaaggaaattggtgataaacacatgtagataattatgagttaattataggcatatgggaggcaaagttgtatgtatcacatgagaaataaattaaaggttatagcatgggtgatgggtgttcttgccaatttgcttggatctcactctcttacacttacagacagtactactctttttacactacttcagtaggttgcttccaatttacgtccatcttaacataattacaaacatgttgaaaaacacacataaagtcatgtttctaagatttactctcttagtagtgcatatcattaaatactaatatatattattcttttaaatattatgataatataaaagaaaactactgcttcattatagctcaagtcacaaaaagtggggtgatgatactagattcgaggaaaatccaaatagaatcataacttttttttttactaaaaaaacttaagttctattataaa

SEQ ID NO: 395477 - DNA, 824 bp, Cannabis indica
aataccactttttaaaaaagattaaaaatgactgaaacccaatagaaatttctatggtaacaaggggacacctgaatgcagaattgtgtttctactttgtattagaaaaagaaaacaacattaatagagcgcacgagtttagaggtgagattggtcccaaccaaagggtgttgaaacataacgaataagcccatatatttattaataaaaacaaataaaattataaatgaggtaaagtgaaaaaaataggattttattaaattcataggtagggtaggtagggtagttaattaagtttatttgaagtagaagtgaaaaacaagaagaagaaagacgttgacgcgtgtaaactactttggacacaaaagcgcgtcattctagaatttcaatcacagaatcttttcatttcccttacatcatcaatttcatcattcaactattttcttttctatttaatcaaatttaaaataaaacatatataattactccctcataaacataagtttacaatatttttcttaataaaagtttttttttttcttctagacattgacttaatctcaagccataaatgatgtttgtgtatgtagcataattatttctatgtaaaattttggaagattcttaaaattttattggcttggtaatttatggtgtaattattgtcgttatggttggttaatttatttttttttttttaggctaattagtaattttttcccccgaactttgacatgtactaaatcgtactcttgaactttttttggccgtttagaaattcctccgaactattgagattgttaaatttaaggacttttgtctaa

SEQ ID NO: 395478 - DNA, 511 bp, Cannabis indica
tttagtttaattttattttataatatatttaagactacttataaaattttagaaaattctaaataatttacagtactaaaaataaaatttaaacagttattaattatcatgtatgcatataagaaaaataatcgtgcgtgtaacaaaatatataaattttattttgaatatattataaagtacttggaatgtttgaaaaagttatgatgatcctaaataactaaaatatatgcgattatgatgaaaaaaattaaactaaacaactcttctaaaagtcgaaacagataaaaaaatttaccgaaacacgagtaaactatggacatatgtatttatatatattagggtatttattgatccagactcatgatgatgatctcatatatataatacaattaattacgttattattaaaatatgtattaattaacttctcttttattagtttcaccaactatattataatcatgagttagaatatacttcattaattattaattaataatatatatat

SEQ ID NO: 395479 - DNA, 950 bp, Cannabis indica
ggttatctcgatttggtttgggcaggttattaggtttgggcggtttacaaaagtttatgtacagccctactattcacactctgtgccacctacactgtgtccaaacaaagtgtaggcgtcacctatatagggtgttgccactgattttatttttttggttaattaattaattttaaaggtaaatatttatttaaattcgaatttaaaaagtagttatagatattttcttatggttgagatattctctcaaggtagttaatagactctctcaagcagttgaaagattacaaaatgtattaaatatctctctatattacaaaatgtgaatcaacattaatcagtatggacatagaaccatcgcctaaaattggagcctcaggaaccagaggtaagacgctatcttaccatacttaggattgataaattcgctaagttaatccaggtcgaccaatcataaagaagttcaggcttcaaaagcagtcaatttaggttgaccagtggcaaaaaagtttaggcttcgaaaaggaaaacaaagctaaaacccaagaggctcaggtccttggaactaaaacctcagggaaccagaagtatgtaatttttgtttttccaaagaaaaaaataaaattgttgaaatctcatggtaaagaccattggaacaagaatcccaaggaacctggaagtaaatagtttattaataaaaataaataaagtttaagtataaaagttgaaattctaaggttcaggtccttggaaccgaaaccttaagaaatccagaagtaggctaacatagaaagtaaaaaattcatttaagctataatactgcttaattgagtcaaataagaatgatataataaataaaggtgtttatgttagggattttatgccataataaaactcatttcaatctaatatatacaaaatctggtaagcccagaatatatagtcattca

SEQ ID NO: 395480 - DNA, 1240 bp, Cannabis indica
cctgcagcgccacctttggaggagctgaagcttccaccgatgcttctgtgccttgcggataaggatctgattcttgacactgagagagagtactacgaggctatgaagaaggcgaataaggagattgagattctgatgagcgtttggaatgagtcacagcttctatctcaacaagattgcagtcgataatcgaccccaccacggcggctcagaccgacgccttcttcgcgtggggtcgtagagttcatcaagaagcattagtgaaagtgaaagtgaaattctgttataacatcatataaatataattaatacttattatttttcttagtcaataaattaaagaagtgaaagtgataagtgaatagctttcatcagaaagaaataaaagaaaaagagaaaaggaattgagtgaataacgtagcgggccctgttagtatagtagtacttcctttttatctttctattggaattgtacgtgttacacaaacttaatatatgcaccaatggcacgtgttatttttggatatttatatatttattagtttttttttttcggttattagactcacaatttatttattttatttatatttaaattttttagctaaaattttagtagtaacaactttcaaactactgccatctatttttacagttaattgttaaaatagattatttatgtgtacattgttgatatgtcacttttaaaattattttaaaatttataaatttttttattttatattattctatttttatttttataataataatagcaaaacttaaatttattaatagtttaatagtttgaaaagttttaattacagtcaaaatttaaatttaaaatgtttaaaatatctatattatatttaaagcattactcttaaatacaacacatatgtagtacttgatcataatgaacttgcactagcacttttggtccttacattaatttgtcataaatttatatgatacacacaatgacttgaatagagttagaaaaagaaaaaacaatgacttgaatatgtgaggtcgtactattgttgaaaggtataaggacctctcataattgttcaaacccaaaactttaattgctatgatgtattaatacagtagaacctctattcaagaatacacttaggaccaagtaaattatattctaattgggaggttataactaaatagagttacactggaaaaaaaaaattcaaaaactagaaaaatatcaatgtaacaataa

SEQ ID NO: 395481 - DNA, 1448 bp, Cannabis indica
tctatgtctacatagaagctataacttatgtatctatgattacgctcccactcaattgtactatcatgtttccaagatgtatgttttggcctgaaccaattggtaagtgatattgacttagaaagatagaacagtaagcttataatatttttaccaagatcaatattggtcacagtccaatgtatactccatacatccgatactagcattctttaccaatgtcttggaaaaaacataatacttatccaaggtgtaggtaaattttatcgttgactatcacatcaatgtaaatccagtgccctaatgagtcatgggacataaacttttgaagcttataatcacaattaccttccactgggttgacatcactgtaattgtgaattacaatatgttctgaatttaacagaatttgtatattaaactataaacatggataatacatgtaaacataaattacttttaatcttctattgataacaaataagattatattgaaatgtattttatttagggcataaaatccaacactatattcatgggtaattaatgatatattaattacctgatttccaatcatctactttccttttttaacaagatattattctctgtccaaaagcttagaaaagtaattcttgatcttgtgcgaattggtagaaaacatgtaactatgatagtcttctagatacacgttgaggacctcttccagatatacggagatggatcttctagatgctgactaggcttgacaggacctttcctgggcgagttatgttattattttcttagaaggcacaatgaatcatgggcttggcccagtttatgtcatttgttttaaactaatatttagaatccacatatccattaccagaaacacgaataacagattatttttcagaaatggtcaaatttttacaagtgcatatacaaaaatagtcgcaaatcattgaaaaaaaataatcaacttgtatataaagacaaaaaaagatagagattatggaaatccaatcgcaaacctatcgaaatgtcatcgagaatgattggcaatatagaaacaaaaagattaaaaacatatgagtgagagagggggtacgatctgttgggatgtgggtctcgacggggtggattcatgcaaaaaacaaagtgtgggggcgacagtagggctgggtctcaacagagagacggagagagagggtaacaacaaggttgggttttgacacgagaaagagggatagagggtgacaacggggttgggtctgacaacaagaaggagggcgacgacagactgagtctcgacgaggctgggagggtgcgtgtaaaaaagaaagagagtgaaaaaggaggagagagttagagagaataggaggatatttggggtaatttggggaactaggtgaatacttgcataaaggggagatcattttgcatcccatacaatgaaaaataca

SEQ ID NO: 395482 - DNA, 1654 bp, Cannabis indica
ttatttttttcttttctagaaattgttgtttttgtttgtttattttaattattgtggaaacatagaataacagcaataacttatattattttgttgttggttaattatgtgaaaataatttatattttattattttaatattaaaaaaaataactaatctaatatgcactattgcagattagatttgatttgatttgagctttcgtgtggattagattggataaaaaaatataaaatttacacttagtacggattaaatgcactatgagcaaactaatgcagataagattagataagcgcctctaggtacaatacaataaagatagccagaccaccaaactttatgttcaaatttgaccaaagctaacttggctaaggagtaagcaactccattagccaacctagaacaatgaacatggtcggtcttgaggtatatagcgcttaagacaaaattaaattttagggccctatataaataatttaattattatcaaaattataattctaatattttggtgtagtggtaaatttttttaaaactcagctgcaaggttcaatccttcataattacacattaaatatctctaattaaaaaagatgtaaaagtagaagttgaaaattgatctcttaacctctttgcttaaaatcacactccctaccactatagtaaacactattttgttatatttctgattatttaatcttttatttatatactaataatttttttcataatttcggggccttgagcgcgtggggccccaaggcgcatgcctggctcgcctcacctcagggttggcaactcaaaaaaaaaaaattagtgttggttacaatttaattattatatttaattcaaagtttaatatatatatatatactaggttattgttacggacattgcacttatacttagttatatttttattttttttatgtgtatttttaaaattttataaattaaaagaaaccacttattaattttttaatttttttaaaaaaataatatttaaagttttaaaaatgcgaggaaaataaatataaagtttaaaaatattaaaattcaacatactcccaatattaaaaataacaataaaaaataataatgttacaaataataaattaatatttttatatatttaaattaatttaaaattagtataagttgaattaacctaaaacaagtaatattaatatttatatatatttaaattaatctaaaataaataatattaatatttataaaactaatcctactaacatcgttaactttaataaaatattcttatattcttaaaagattttgttaaattaataaaaattgttagatagcctcttttatatataaagatatattatatttaaaattttgtataaattgtattaaaaacctaaaaatttacaaaattagatcacaatataatatagggtgcacacattttttaaaccaaaaattcaaacatatgaggtattttaaaaaatttttcatacctcatattgcaatatgagatatttttaaaagagtaatttgcggcataaatacttaagtttaatttctgattacaaataaatacttaagtttaatttttggcggcaataatacataagttttatttttagaactctgtaggtatctggttgttaaatattaagtaaa

SEQ ID NO: 395483 - DNA, 1541 bp, Cannabis indica
cgctttttatgattagagtatccacaatttaaaagatttacaagatatgcaattatagtatattataaaaatatatttaaaaagtgtagaacatttgaaatacaattcttgacaacttagcaccacttactggataagctaatctgtacatttgctagataagattgctaactcatggctatctaaacgtctctacgtattacctgcactacatagcacctgtgagtcacaaggaactcaaacaagaaaagtaataaacaacaatcatataatttattattcaaatattatcgtttatagtcagacaattaggatcaaatgattacacattactcataagatgaaatctaattcactactaatatcagtcgcaaaataaaagttagtataaagatatttggtaatacaaaatcattacgctaataatataagttatcttcatttcctgatacagtgtttataatcaatgttcgtacattacttgcatgcacaagccaagtcaatacagactttcattcaaaatcaacatcaatatatatatttaatgatataccaatacttctaataatatcaattatgtttgttacctcataaagtaaccattttatgtggttggctaatcagacaaccctgatgctcttaccctgcatccacatgtctcattgcctaatcaggcaaccccgatgccctaacctgatatctatatatctttgtcattgtctaatcagacaatcaacatgtacgaaacctaacattagttcctgtttatagtcatgacttttgatacctaactctttagtatcaaaatatcgttgcctaatcagataacattttcatcattacctaatcaaaaaatctttacatcatttcctaataagacaattttttttatcattgcttaatcatacaatcttcacaacattgcctaataagacaatcttttcatcatttcctaatcaaacaatcttttcattacataacggtaataactgtattttaatctcaatatcaatcaatcctaaataataataattatattataacataacgtactatgtagtacaatgcacttttcttacctttaatctgaattcatgcatatcagccaacctaagtggagaaatatttccaatgatctcgaccctatgtcgcaacaacggtaaaccgataagtatttattccaaaacactgtttaatattcacattagacaacttgggttttctaccaaactctgtggtatatacatcctaagataaaacttacattttggctctaaataatataccatattgtagagctcctccgcaactttcaaaatggtatatacaatgcctgaaatggacatctgagtgaaaatttatgatcaaaatacaattttcgatctcctcaaaaatactaaaaatggcagacctttttattctgctccaaaaatggcctatcattttttcacaagtacaaaataacttaattttaaacttctcaaaaccccacaaaaccctaaccaattaattctaaacttcacaaaacaattatacaacat

SEQ ID NO: 395484 - DNA, 748 bp, Cannabis indica
ttttttttttttttttgttatgacattaagatttggattggaatcctaatcctagttgaacattccattcgaaattagagagagaaaggaagaagagaaaagacttttggccttttgcttatcatttatcttttcctttgatttctctaatttttctttaatcccaatagcattagaaattattgttacctttttaatttgtaatcatattcctagttgtataggaatttcaaaatacacttaaaaaggagaagggaaaagatataattatatcttttacttaaacttaaagtaacctatccacttagaggtaaaatggtccaaagccataaccctgaatgaccccggcattccaaatgtttaacaatcttgcctcgataattctaatatactcaaccctatcaaagtgcctctaatgggcaaatcattgcatttcactgttaccatgcataaaatatgaaaaatgcaaaaaaaattatatataatatatataatacagctagcattcacatatatcaccgtaattaagaaataactaatataaatcttatttctgatcataagccctaattatctattaattcccatcataaagttaagcgtcgttacaattatcgtcccgtcataaggatttcatcctcaaaatctatcttgaacaactatagatactgatccctcatatcagactctaactcccatgtggcttcctccaccttactatttctccagagtactttgaccaatgcta

SEQ ID NO: 395485 - DNA, 993 bp, Cannabis indica
atcacatctaattgaacaaagataagactactcaatcatagcaaatcaaagcacagttcatacaagggttcataaccacccaaatctcaaagattttagttcataactgaaattaagaacttaaaaccagaaaataacaagttcattgtgctaaggagaataacaaagagtagaaaatgatagaaaatggaataggagagcaagagaaatgagttgttaagctcaaatcttctctttagaggttgccttcttccccttcttcttaatcttcttcttttattctttgtactctctccctttctttttttttctgtactttcctctgtaattttcgtactctctttctctcaaagtgcagccaccattttttttctttctcctttttttgttgccccccaattagggtactaaagtttatcctaattggaaatccaagtcatgatttactttcccttctttttccacatattagttaagtcattgtccacatttttgccacacaagcatcttttattcttcattaacgccagctggaatttctgcgaaaatacacttactgggcttgctaattgctatgcaataattgctatagcaatcacagtcaacaacaagcctttttttgctctttttccttcttgtcccgaacatttccctatacccattttagcattttttctgcttaatacacatgaaaacagcaacataagtctatttaacactttctaacacacacttctatttattacaagaacacaataaattaaacacaattccataatataaacactaattactctacaatttagattaaaattcaagactaaagatttcaaaataaccctaaatctttgagttatcaagacttcactgatcttaacaaaacatgtccaaaggattgcttcctgctgcccagaatcgatccgatggtagattctatctcgggtttcaagctattatcttttatggatgcctacttgttgggttttatgccct

SEQ ID NO: 395486 - DNA, 1693 bp, Cannabis indica
catccggtgaagctcggcccatgaggtattaattttctactacatggatgccatgtcatgttgatagttgtcaaaacatgtcctactttgtggataataaagatagtgcttgattggcaattatcttatttccatattcaaaatattagactctcagacaagatcttagaaataatgtcttgatattgtgggagataataataaatgagtgggatactatgctcaacatatagaggctcattaattactcttcttggagcattgcttaatgctactcggagatctgcttagatggatacttgtttgcatggacgaatcatctgtccatcatctggatggcttgactccattaatggatctggtctattaccttgaatgggcctgcgtttgggcctgtattagctgaattaaataatcttggaatcacacgtgtcctccttccagaaacacgaataatatttagccccaagctttcagaactctgggattttgaaggcttgtatttttccttccaaatggcatgaggacatgtggatgcttaaaaggtgaagacctttttcaattctaagtgaacacgttgtggttgacaacttcttactttttgaaatggagtgacatgtgccattattttgttggctagtgaagactacgtttattgaaggagcgcgcacatcgtggatttgcaaaactatcgctgatcatgttagcgagtgtcccaagaagaatatcatcattcgaatatctcagttccaagcgatgtattaaatgaaaagctgacagtttttctagaccatcatatatattttctattttcttggatgcaatttgagccattaacttaagggcacgcaaattgccattttggtcctataaataatgtggaaatcatctatttaccatttttcccatttttcattttgaatttgaattttttgagagagaaaaagtgaaaatttcttttggtgaatgaaccattactttgacgagtgtattcaccttcttctttgaattcgtgcacgagaaaacttcggagcaccacctatagttctcaccattgattctttgacgcagttggaaccattagatctttaggcagagatcaaagccctcataaataaacttggtccatttgaactagggttgtgcatcttgatcaacctctcacaataagaatttatgaatgactgacacacgacgttcgaatccatcacataagtattttacctctttgatgcttgcttgtctttcataaaaggtagaggaataggatttaaacctttggggaagttctgaacattttttcaaaataaggacacttatatatatatattgtttgtagtcattgttaggttatgtaaattctgtctccattagtaaatttctggttgtgtagcaaacttcaacataatgcactcaagtattgctgaatgtaattcttccatctgagatctttgttgcctataaataggtaatgtggcttaagggaaaagatgatgatacatctcattccttcagtaaaattttgagcctcctttcctatagcatagctgaaaccctattcctctctttctctcttcatattttcataccttgagtgatagagtgagtgcccacatacatcaagttggtcctcaatcatagtatgtaagactgtgaagaatccaatcaataagaaggagaatcgggctcagat

SEQ ID NO: 395487 - DNA, 674 bp, Cannabis indica
tattaaaagaatatattttacatttaagcatgataagttaaattttcctaatttcaattactattatacttcatttgtaattcttgatcatgcacattattttaatattatgccattgcgttccatgtgttaaatgaggttgttaatttgtaagggcacgttggtttattttactttaagtaaattagcccctcaaaataaataagtttattattgggtaaaccgtaaatagaaccattaatattatggtcatatcatattttatgtatatatatagtgagaatataagtggattgcaatggatattatggcgcaatggccaaaaaaaatagaaaagaaaagataattaagatcaataataattattaaagacttcaacttgtgtggttataaagctaacatataataaataatttatgtatttatttagtgtattatttgtataaagatatacccaatacgtcacgcttgttgcatcttgcatacgtacattttacaacaattataattatcaaccaatctatgctaattattgataaacctcttcaataattattttgatacgagtatatataaatatatattatatgagtgatataatggttatatttatagggaaatttgattttttatgcttacagttggttaaaattttttttctaaacaaataataa

SEQ ID NO: 395488 - DNA, 852 bp, Cannabis indica
taatgactatggtaacttccttaggcaggaaactatgccctaatctccccttttacttcgtacttttaataaatgcgttaacactttatcttgtactcgcagaaatgcatttcgagggtcgtcatgcacagaaaagggaagaagagagtgaccaccttggaggctcctactgatgtcgagatggaaccccctaaaaggctgaaaaaaactacaactaacaagaaacgagcctcccagaccggtaatcttgaggtccctgagattgaaacccatgatccgattcctcctccggtctccgcctgttccgacgagcctcttcccaaagcgactcaagcctctgcctcctcaagtcaggcccttgaaacattgcttgttgaggccggaaagactggctcagagttcaccacgaagtttggaggggcatgttggcgtcagttcaaggctctccttccccatgactgagatttgatcaaccatggggatttggagggagtgcttacaaggagtttgtctcacagcctcttggtaagttcccttatccttatctattcacttcttttattcctcttctcttttttttctttactcatgtaactttgtttatgggtttccaggcttctttcctctcctttgccgcctattggcgaggcttggaaaaggtaaaatatttggagggcgagatccagaacctaataggccattgcgacgttgtggccaagaaatttaatgatgcccaactggagacttctcgccttaccaaggatgccgagaggatgaagaaaaatcttgaagctgccgagaaggagacaaatgacaagaccgatgaatgcgagaagctcaaagggaaacttg

SEQ ID NO: 395489 - DNA, 1176 bp, Cannabis indica
aactcaagagaacaatttagtcaatttatacattctgattaggtttcttgataaagtaaagaagataaatcactattattctactttcaaaaaaaaaattagttaacaacatattacaaatattgatttcgattattcctcatttattttgttagatttctccattaatttatttcggttccgaataatgtatggtaaacgtgtcattaggtggcatttgattaagaggaataaaaatatatgaatctattttatctaaagtgtctctatttttgggcgatttttttttttttcaagttttctattcaaaaataacagttttacttatatagcctcagactttgatggtgtgcttttgggaaaaactattgtcggagaatttaactttagatttttaatttattactcctagccttcttcttcgtcccagaaatctccacaagtatctcccaagcaaccacaggttttcgactttctcttgttttctactaattccacaaatatcgttctcaattcttaccactaattacatacaaccctaccagtgaaaattcagaattgatggcaaaaattttgggtcctaatcaacgatgtctagattttctaccatttttggaaattggtaagtgtttgtctctttattctcttctctttactactgttttaatattccatcaatctcatctttctatctccaagcatgacactctccatgtctctcagctctctctcacaattttctctcagccgtagcaaatgaagtgggtttgttcaaatcgatgaagtgggtttaattctttgtttaaacataagcctttttgttattggatgcttcgataatgtcacagaagagaaaccccaatgagggccgagctcctctactataacgaactaatcctgacgattctggtagaaagattcctaatttcaaaaagtaatactcttttcccaattcctattttcaatagaaaagaaagaagaaaaaaatgcttgaatttcaaatgttgaatattatatatgaatcacgaattctgtgttgtttgttaccaaacatattcctctagaccaaatttgtcctatgtgtaaccagttgcctgagaccatttaccatttgttggtgcaatgttcttttgcacggtcttgttggcatctttcggttctaaattggagtcatac

SEQ ID NO: 395490 - DNA, 803 bp, Cannabis indica
tttttatataattttttcaaattttaatatttgaacatttggaccggacttgacccatgaaacccgaaaattagaaaacacatgttaagtacatgcgggttaagttgtacctgtgagatttgaacaaataggtccgagtttatattttacataaatataagcctatgtaaagacagttagaatggtagttagttgttatccaattcggttacaattctgttatggtctgtttgtttgcttttggctgtttgagccttgtatatatttgttactttttccttttcaatctctttctctgtttctttcctctttcttcttctcttctccttctctttctatttttttgttactatgtaacaatggtgagaaaaaacttccaatacaccggtaccaattattattattatcagttttaataaaataaccaaaaaatttattgataagaaatcaaaggtacattggtagaaaaacaaaattctaattaactaatctcgatttttatatatagtgtacatctagtgaaataatatacaacaaaactagatatacacccgaaaaaataaataacaatgtaaacgatcttaagaagggagaagagaatagaattatccactaaaaatatcaaactctttaaattcaaagagaaaaaacttttagaaaagaaaacctttgttatatctaaaattttaagaacaaaagaggaattatatcttttgtagtagagtaagataaagggaaataaataaataaacccaaaccacacgtgacccgttggacccgtccacccgtgaacttattagttc

SEQ ID NO: 395491 - DNA, 1136 bp, Cannabis indica
taccatccacctcaaccaactaagctataaatatttattgtttataatacacttaaattttacttaaataaaagcctaataattttttttattttttttatttcgggcccccggaaagtgtgggccctaggcacgggcctagcccgcctatgcctagggccggccctacatataggtatttatatatttaatttaaataatattataaaaaattattaaccactcgtaaaatacctacttctcatattagtatagtatagagtacactaatgtctaaggccaacaatcaacactatatcactatttgtaatacatagtattttttatttatgtaaaaaaagaataatttattttattaaaaaattaatataataataaataatattatttttagtataattttttgtaacattatatattaagttgtgtgaaacaaacaaaataaatcctagaacttcaattattattattattattaaaaacataatttaaaagattgggttgggtttttgagagtttatattctgcatttgaaatttgaaaatgattgaatattataaaataatatagagagaattaatgtaagaattattaaaggaagagaggtggcccaaaatcaatggatgttactacttcttctatttatttatttttgataaatataataataattaaattttggtagtggatgttactacttggtgggcataattctaaattaattaattaattaattataaataataaaaagggaggtttagattggagatatgatatctcaccacgttaacaagagcgcgtgaaccaagagtgggactctgtccccccttgactcgacagagccgtacgccgtcgatttcatgccacgtgtcgatccacagtgcaatccatcaagtcctctgaatctcatttggccgtccatttcggaccaaattaaataaatacataaatagtagagtgttctttcacaattcagtccttgaatttatatctttttacaattagtttggtgatagcaaattcaattttctttttgttaatttttaacaaaatttaagagggggattaatttaaggtgcgtttgaaaagccacaatgtaattaaatttgtgtgtaattagaggtaattatacaatt

SEQ ID NO: 395492 - DNA, 776 bp, Cannabis indica
tgtcatgagttaagaatttggactatgatggtcaaagtatattgtgattattatctctgctatttaataaatactaattttatttttaagatttagactaaaaaaatagtgtgttcctttttcctttgataagataataatacttaatttgaacacaatataatgctttcaactctctcattaattatttaacaaaaatgaggaataatttgtttatatcgctttatcgatatgtcacagttagttgtcatgtgatctgtaaggagaagtattaagtaaattatacaatctcacattatttgaagaaggtagtgtgatgattatatgattgtgtaggtatgagactttagagttgaaaatagtttaaatggattgataggtagtaactatatcaacaaagtacatcttattttttagtagtccatcaccaaagaactctaaagttaagcgtgcttgatttgaagtaatcttaggatgtaaaacctcctagaaaacgtgtgaatgagaacagagtacgttagaaatactcatattgatttgtaggatcaatcatcactctatgaaaagacttaaagcaaaagtgttacaagatcctaattaaggggtgcccttctcttgcttttgtagagttagattcagattattattataatttattatgtagaaaattaaaactttctggctccactgttatccgctacattcaattgggtttgaggttgaatcatatcattttttatctgttttttcaatgcaaagggcgaagtaaaaaaaaa

SEQ ID NO: 395493 - DNA, 769 bp, Cannabis indica
gagttgatcaggtaaattttgggataaaatttttatagcgaggggataattataatatcctgggtttagtaaatggattaacaaccctaactaaaatgaattaactatatttgtagatatttcaagctatggatggatatggaaatctcttccacaaatcttcaacagattttgactaagttaatgtaaaatagagacactttgcatcatcacttgccttcgacacttgcatcaatcgaatatatttggacagatgaaccctaggatctattctggcttcatataattccatgtggggcattttaaagtgttcccacaaaggcgtctctattattcttcttacacgtggttctgaatcttcttctttcaaatcaaacacgaatctactttttttctaagcttgatgttccgtgaccttagttaacttagctatttgatctttcaaacgcttagtattgttgtctgggaattcacgaccacgaactttgtcattaatgtgatttctgagatcatttccatgaggcattgcattctgactctaactcgatatatttctttggatttaaattttcttgaaagtctattattgacatcatatatataatttttaattacataaggttggaggtaatataaatgttacatatgattatgattaataaaattataacattatgatataatatttggctggttaaactaaaagtatattatttaatataacttttaaaataaaatatatataaatagtaaaaatgatttaagatat

SEQ ID NO: 395494 - DNA, 799 bp, Cannabis indica
ttttaaaatttaattaattttcaagttctgcttcgagaggagacgaatggatgctgatttttggagatgagttgatgataaatctggacccttaattaagtcggtataattgaaagatgggtcccattaatcaaagatccaatccattatggattgatatgaagaaacaataaaccaatgtcgttttcttcttcatttttaaaagacgacgtgtcgtttaatatcactgctattgtcctttcttcagtttttgtaaattttattacattatcctgaaattttcttaatgtataactgaaatgtaaataatacaacatgactgataacatctcccataaacatgagacccccacacatatacataaagggagaaaaaaatacaaaaaaagatgatggatttacaagtactgatgatattcgtagtatcatttctgtttatggtaagttccaataattgaaagagtgacaagctaacattctctttgattaaatttaatagtgtacattgcttgctcacacactaaaaaaattcctgacactaataatagagaaataatttaagaaatatttttttaaaggtgcataaattgaattctagatcagctctaagaacctttagtcagtttcacttgctgaattcaccatagatagagacaacaaccaagacattaaattagagtttcttctacttcactctacgtacttcattgggcgattttttgtcacaaaatcgtagtatttctcttctccataatgtcccctaaacaaaaagaaaggcgaaaccttcatgagtttaatt

SEQ ID NO: 395495 - DNA, 1086 bp, Cannabis indica
taaacttgactacggtaaaaaagtaaaaaaacgaaaaatcaacctcaatgacaattataaatcaagtaataaataaactataaaacaataaaaaacaactaaaaaacaaccacataataactataatttaacaataaataaattataaaataactaaaaaataatttattattttattgaagatgtattttgtaaattaaaaaaattaaaagtaaaataatttttttttctatattagtgtattctgtattctttaaatttttggtctattatataatttttttatgatataagaaatttatattatacatataaaataaaattaaaaaaaaaaatgcatgcaaatagactattttaaaattattttttcagcacataaaattattttaaaattttcaaaattttcaaacatatcttatcatatatataaaataataaaattacaactatttaaatattaaaaatattaaagagtgtattgataaactaatttttaaagttacaccataaaatttcaaaataatttatttacatatcatttataatttgtagggatttttttattaatattaattatgataaagattatttttctttttcctttttgtcaaattatacaattgtcacaatcacagtagggcctttacattacaccacttgtagagtactacagtgctaccacccaacaagttgaaaattaaacttaatttttgcttatttaatgttaatttttgggaaagggtattattgggaatgaaaaagatttgttaaatttgatatgaaattgttggattaaacagaaacaaacccagatcactaattagctgattttaattaaataatgtgtcagattagcttcaatgattaaaaagggtcaatgggaagcatgttagggttgttatagtcatttcactttcagaagtgaccaacccccactgatttctaagaagaaacttctatttgcagttttgcaccttataaaatgataaactacactctattaattaaaaaaaaaaaactgaaacttaaataattaaaaattaactaataatattttttactctatattattttatgttaatttca

SEQ ID NO: 395496 - DNA, 1204 bp, Cannabis indica
cttttagcaagataattactactatttttagcttcaaggactttgatagataatataattttcaattgaaacatttcattgcaatttccttttgttgatcactttaccaattataacacacttttttcaaggatttattggttaaaaattgattaagtgagaaaagtatggattaaaagtgaaaaaaaaaccatggttatggttattggtattgcctagtagctagccttttcaacctcctaccgtttgaatgaaacttgataattaaggcaaaataaattaaagggattaaaccaaacttagttagttgtgacaacttttgatgttaactggtcctttttttaataaaaataaacttggttctttctattctaagatataaattattttgttaagcaaaaaaaatataaattattttttatattgaggtgtattatctagtcactatttctaaactaatttggttatagttttgtcaaattctatcaacatcagttttggaaaaggaaacttcttttttcagaaactattaatatacatatgttttctacttaagaaataaaaataaagaattaaaaaataaaaaaaaaaaataaaaaaaaaaacaaacaaacacttgcagttgcgggagaattcaaataatttttagttgaataacagaaattaaattatttttaataagaaattttatctcttaaattttgatatcaaacaaatcgtacgctctgaacttttcaagtctttgaaaattcactatgaattattaagattgttgacttaaggactttcgtctaatttaactaacaaaagtctgatgtggataaaagttcaaatggtacggtttggtacatgtcaaatttgagggacatgatttggtacttattaaaatttggagatataatttaatacatggacaatcaccatgttagtaaaattgaacggaatcgggcaagaatccttgaatccaacaatcttagtagttcaagaaaagcttttaacagcctgaaaagtttggggccacgatttgatacatgtcggggagcgaaaatcataattagctaaaaaaaacatgtaaattgttcaaaaaaatcaactattttctttcctttttttttgttttttcgatattgggagaggttggattcgaacttggtttggcttaatatacacttagggcccgtttggtatgcaggattgaactgga

SEQ ID NO: 395497 - DNA, 1358 bp, Cannabis indica
gttcagatcccttgatccaacagattagacgaaaaggtatgatgaagagaaagggcagttgaaacgtttgattacctttttgacaccagcattgatggagaggatcatcaataggcgggaagtgaatcgtttcctgcaaaagaaaaaaaaggccaatgatgatgatcataaatattgcctacacgcccgaggcatgtgtcattgcattcattgataccggagaaagcttacgtctcatttacctacgactaaataagacttagggggtaaaggtcaaccaaatttattcccaatatatgtggcagatgttatatgcaacatgtggcatatatgggcacgtcacccggagacgagttgaagacttaaccaaaccatctcaagaaagaataagtgcaattcaaagggctagctcccgaacatgtgcaagtaggcctatcttctcctccgcgagctaaagcacagatgggcttctccgggccagtaaggctgaagttgaacagtcactttgcatttaatgcggcatggagaaaacgtttgggagtacccataagaggacgtgtcagatgtcataaacccaacttagggcgattacacgataatcaaaggagctagtgatagctccattatgaagaatcacatcaattaagaaggaatgaaggctaatttcacctaaaacctaagcaacctattatgtaggtaatgcatgccctattttgtacttttcgagaacttgtgcatgcccatagttgtcacttaaagacaagttactctttttcttcttcccaccaatcgctataaataccccttactaaaattagtaagggatcggaaaaaagacacagaaatattctctgtaagaaatactctctcattaataacagagattcgtggactatggctcattaatgcccgaaccacgtaaaaactacctacattaattatccctaagctccaattattacattatacatttggttgctgaaaacctcggtcagcaataatcataaaaattatttacacgaatcaaaattcaaacaaaaaaataataatcaattctcatatatttaagtatatatgaataaaaaataaaatataaattccttacactaaattttattaaaattctaatcttgcactctgtcgtctaccgtaataacttagcacaccactaatcttgtaaatatttataagcgaattgagaaagagttaacacctacttgtgccattcaaaagagagatcacactactacaatatttacacatttagtgacacaatttaataacctgcacacaaagtgcgggtaactaaatattttagttaatttttagtgacacacattactagacagtaaaaattt

SEQ ID NO: 395498 - DNA, 715 bp, Cannabis indica
gaaaatgaaatcctcttacatcatcctaacattaataatatactaccatttctcatctattcttatctaccttccttttactttttctttttttttttaaaaaaaaacaaattagatgatcataattagtagtacaaccttaattttctcttaaaaacatatcataacaagagaatataaacataaattagtaaagtgtgtgtagcacatttcatttaccatttttttttatatttaacacaatagagaccacttattagagatggatattttatattagaaaaagttctatatgtacttatagaaatgaaaaaaaattaattgtttataaatgattggttaattaataatttaaatgaatatattacatcaaaatttaagacataaaataaagccattatttttaagagtcaaataaattaagctcttttgagaattatacaatgatgagagttaagctatatataacatcttttattaaaagaaaaaaaatatatcattttttcaactaacaaaattaagtttagcaacataattttattagtcttaaacccatgataggattttattacttggataaaattatatttattgtgatcaatcgaaaaaaaaaacaataatttcattagccatagttcataactcacaaatgtttttaatatggatattcaatatatatatatataagcaaaataaaaaaaatcaaaataaaaaa

SEQ ID NO: 395499 - DNA, 758 bp, Cannabis indica
aaaatgtttgcattaatttctcctattttttctttattggggttgtttccatcttaatagttactatatatcttacagatcttttacaaattgaattatttcacttatttcttagaatcttcatgaaagcgtgcagagtttttttttttttttttggtataaaacaaaaaaagggttgcaagttgcaatatgagaatgagattgaggggagttgtgtctcttgagaattttaaaagagactttcctttgaccaagtgagaaaggattatataaaatataaaaaggagagcttcttggcaatttcagtaccccacatccaaggaaaatatactcttcaaattaattacaaaatcccttcctccctcattcaactcaaataccaacataaaatattatgacaatcccttataaaatagtggatcccatctaaactaattgttattggttataataaataatcacctctcattgtatatataattttaatgtagatatcattaatatgagaaatgctaatagacatccgtggtgtctagcaccctcttatgtgttaatattgctattaatccaattaaatattgggtctcatataatttaatataatagtttttagagagtattgctaacccatcgcaacgcaaaggtgctaagcactactagtgcataatagcaatactccattaatatatatcacaaactaatatatggtttttactttttaaactattataattagaggagtgttaaattaacctcct

SEQ ID NO: 395500 - DNA, 1140 bp, Cannabis indica
gtatgatattcatcatgccatattctttccatattacactttgtttcaaataccatattttaatttttattattattttgtttatatttattaataacaaaactaacaaaataaatttttatatcgcaaatttctcaatttttttttttaaaaaaacatttgacattataatacaagaattcatctcttcttacacatttctcctcccccttcatctctccatcttgccaaacaaaagagttcatcaattcatctacctctctccctccacccatctctcatctctaccaaatatagtgttagactttcttagttataatacagcctacatcaactagaatctaatctttatattgagttgaataaaatttaacgtaaactaactaaaccgaaccacgtacagccttacaaaaagggtgctctaatagtgtgtcaaaaaataatttaaatatgacacatagtaaattttgtgccaaatttgatacaacatttactataatgcaaaacttacatcacaataaatgtattacttttttatttacatttatgctatttgtatcattttattagtatatttaactataacattaaattatgataaaattagtagtttttattatttaataaaaatattaattaaatattaaaataataataaattttatgataaagttattagtttttattatttaataaagtttatgaaaaaaataataagtaaaaacattaattagatattaaattttgcatcaaagttttacaaatattgtgcattgggacacaatggtaaaaatttaatgtaaatctaccataaaactattttttgagtcaaatgttatatttatatttcgagcaataaatatagttgtgacacgtgtataggaacgcaaagtttagtaggctagcatattgaagagaattaatatgttgtttagaatgcctccaatttccttaaacctaggcaatgactcaaattctttcacataacgtgagcgtggtggaccaagaacttctacaactatatccatatggggtgggtactggcttatatcatcaacaatacacgaagcagcagatgatgcatttgtagatgcagacgcaacttgggatgtcgttttttttttttttttttttccatcg

SEQ ID NO: 395501 - DNA, 518 bp, Cannabis indica
tatatatatatataaaaagcttaattaataatataaaaaaatattatggagattatatatgtttatttatagaactaataccgaggtccattatgttgtcgacccgcaaatgcaatctgagtctgccaagaaataattaataatatacccttaacttttttcataaaagtctaattattactataatatataataaaaaaaaaacttttctttttcttgaaaaaatacataaatggattctgcgagggttgtattaatatttgtagataattaaaaataaataaaaaaaagttgtatacatggacgtcgtctaaacgttagagaaaacctataaaaactgtaattaatagaatcttaactgtcacgtccatatttaaattcaaagctctaatctctaagctataattaatatatatatatatatatttggataaatagtgacataagtacctaaagtttcaagtttataagtggcataatctcaatgtttatttttagcggcataagtacccaatatt

SEQ ID NO: 395502 - DNA, 1515 bp, Cannabis indica
attgaaataaatgttatccttttattttataagattaaaatagattttaaatatatatttttaaaatattatatatatatgatatatagcatgagatatatgagaccatacggtacaataaaacaacaaagtgagtacaaaacttaaaaacacatttttaatctctctctctctctctctcctactcgtatactctctctccctctctctctctacacgacacacatacacacactagtgtgttatgtgttctctcaatttcaatcacattgtctcatgagttgagaatacattgtgatcataaaattattttcacttcgttaaattgaaaaggtcactattttcttgagtgttgaagctgatttggcaaacagtggtgtgaagtcttagacgagttcttatactggattggatgtttgttttatttatataaaaagtagcgaggaaatcctgttaggaaacaaggggtaaatctctatactaattagatagatttatattttgtattattattttgagatatggggttttttgttcacatcaaattcacaaatatttttttaaaccaaattaatttttactcttccactgcaacattgatatgaactctaaaaaccaacaatatctaacccacgatctaactctctcactctgactcgcactcttgattttatttttaagtttctttttctctcttgtgtgaattttctagggtttcaagtttcgccaaggttcatcaatggtggaacctaagaaggttggggtttctctcaagtctactccaggatcgtcctttgttgctccttctgttgagttttctactgctgttgttgcttttttatctttggcttatttgatagtcaaataggagtgttttatgtgctttgtggtcaatttcgaccctattcccagggggagtagttttgttgaacaaaagagagttgtttgttattcgtggttttgttaatctttttcactttaaaagttaacatgttatgttttatgtgttaacaaactttcatgtagggaaaggttgtttctttttttttttcctcaaatctaaagaatttctcttactttatatataggtcatccacttatcattcgataaaaaagataaaaaagggagagagtattcttatactcttacttttgtttccaacacttattgtgcaagtttcttccttgttggttttattataaaatattttgtgaatcgaagtgtcaaagtggaaaattgttaattttatttttgacatatttaattgataaaaatatttatactctttatgcttattcggttgtacttatatacatattatttatatatatagaatattttttaatggatattacccattgatggttactaaacaatttaactataaatattaattttaaaaatattaaaatattagattttgatctaacaacgaataataaaaagaaaaatttgaatttctatgtttaatttaactacttaattaaaaaaaatatcaaaaaatattacttttt

SEQ ID NO: 395503 - DNA, 712 bp, Cannabis indica
gcaagaatatgaggaagcacaagttaaggattagtcctagaattaaagcaatcacaaaagacaattcctcaaataaaaacggcccctcataaattttgttgccttgtcctagaaattataagctaagtgtggatgtagcagttcatagccaaaataatgtccatggatatggagcactgatccaagatagccacgacatatttatagctagttcttactcctcaacaatctcaggactgcccctattttcacagaagtagaatcccttcttagagctttaaacttatgctaggtgctccaatttccaattgaaatagttgtttcagactgtcaagtgctaatctccaacattctcaagaagtatagggatcactcgactctttctgataaagtgtggaaaatcatctcctctttatcccactttcctggtgcaacaattagattcattcctagaagttccaatgttttagctcaaaaccttgctcaacaaacattaagaactgatgaacagttgctttggaacaattgtgtttcaagttctcactggatctttgtaacctgtttttcctatattttctcttgttacagatcttgtatctataccaaaaaaaaaaaaaaacttagcaactagggtgcatataggttggactgacagcatttgaagtaaggttgagatgtaaaatgaccctaaatttaaaaactaagttagtaa

SEQ ID NO: 395504 - DNA, 1339 bp, Cannabis indica
agctgatgagagtggctttttaacttgtcataccaggccctaggcgcctgtttttaagccatatagagacttagtgagcttgcagacatactctggatactccttgtcttcaaaaccaagtggttgttccatgtaaaccgtctcttgaagttgtccatttaggaatgcattgtttatgtcgagctgccttatttcccacgattttgccactgcaattgaaagaacaatccgaactgtggaagccttgataaccggactataagtttcactaaaatcgatcccaggcctttgattaaaacctttcgcaacaaggcgagccttgtatcttcggtgtgtaccgtcagcatttcttttctccttgtatacccacttatttccaataatattcataccaggttttctaggcaccagaacccacgttttacttctctttaaagctgagttttcctcattcatggctgctgtccatccaggatgttgtaaagtttcatcgacagtaaccggttcagcattattacaattccatgtagcctgacccgtgtacactttcggcttgaaaattccagccttagcacgtgtaatcatagggtgtgtggataccacgggcattggctgagttgtgtttctctctgcattcgagagagattcaaaggcatggttgtttgttactgaagtgggagatggagatcctggttgaattatatcagtggtcagatcattattttgctcattaggacttagttgcttgtgagaagatgatgcctcttcaagggaaaagtcagtgggctgattgatggtaccagattgaataatattttgtgtttcaggtgatggagaaaatgcagcagaccatgagggaacatgaacattgacagtttgctcaggttgatgagtgtttagaaaacctgatctaaaggggaagtcattttcattaaaaatgacattcctagagatataaagtcttcaagttgtgctaaggcatttatagcctttgtgcgactcactataacccaaattcacacacctaacagagtggaattgaaacttatgggactggtatggtctgatacaagggtaacacgcagctccaaaaactttaaggaatttatagtctggctttttggagtgaacaatctcgaaagggcacttgttctctaatactggtgttgggagacgatttataaggtacacagctgtttggaatgagtcccaccagtattttaaaggcataaggcttgggcaagtagtagacccatttcaacaatgtgtctatgttttcgctccgctcgaccattttgagcggatgtatgtgggcaagaatgttggaagtttattccat

SEQ ID NO: 395505 - DNA, 970 bp, Cannabis indica
gatttatgaacttgtttgatttttaaatgttaaatgattagactttttaatggattctattatttattttccttggttatatgttatagtttaatttatgtatgacttattgtaatttttttttgagacaattgattgctttttttttttggtaatttggttcttaatacttttgttgttagggcaactgtttagcaactgttatgtaattttaaaataaccattccagtatgtgaaatcttctttatcttaacaccaaatgtgttatgaacttataatgaaccttttaagtatatttaatttcacatacaacattaaaaaaactattatctaactcttaaaaaactaatttagtagaaatcttattagcaatgtatttttaacatggctcacaactgtctagcaattgttatgcaatcttaaaaaaaaccaatttcagtattggaaagtaataacaatctatcaaagtaatttttttatagctgtaagagttcacatagaaatttaaacaatttaaataaatgtcatgtctctatttaattgcttagtgtggcatggctttcagttgtgaccttgttggccacaattattgcacctattctatttttttgtttcccattcacctataaatcttctttttcttggtcttcaagatctcattttttggtttggtggcagaacaatgatatctttgatgttttgaggtacatcccatattgtgtgattatgtacaggatatattgacccgctatatgtttcaaaccttattttggttgtgtaatactgtgaacagtaattgtagacatttaagttcatctctttcatcatagcaagagtatgagcacatgggagtttgtctagtggaaatctattgcaattgcattttttttcctttaaattgactatctatgaccttgtttgttgtaccacttcaaacatgttgttgtttattggtttcacatgtagatta

SEQ ID NO: 395506 - DNA, 643 bp, Cannabis indica
gacacttgcattcaaaggcaaacagacgtatatttacaatatattggcttaaatgtatatttccattaactaaaactaatatattatgtctggcataaatatcattaactaaaagattaaaaatgtgtattgactttctaataaataagtttagcttctaccaaactaactaattaaataagaacatatgtataaaaagactactaaaaaattataagtaggaaagaatgatcaatatcaaattattattatgtaagcataagatttcagtacaacttagatcaatatcaaaagctgaagataatacaacttgaactaataaggtaatttgaactttttataatgtgagattaactttttatattatagttttgtataactactatttttatactttaagcatacattaataaaattgaatggtatagtgtgacagtccgtagtcccgtgatccgtaaggagaaatactgggtaggctgtacaatcccacatcgcctgagaaggtctagtgtgatgattctaaggctgtataggtatgatactacacagttgaagagagcataaatggattgattggtactacctatattaacaaggtgcatcttgtttttcagtagcccatcacgaaagaactccacagtta

SEQ ID NO: 395507 - DNA, 567 bp, Cannabis indica
tattaaatcaaaactaaaaaaaaatactattttagtattaatattcacaacaccgagtcaatacccttataaattcatatttacagaacatagagacattaacaactccaaataaccaaatctattttagtacctagaatagaactcaactattactcaaatattacatattaaccccacccggataacaaatttttactaagttatcctccattaacccataatcaacccatgaacacgatatgaaaaaacctcttttctaaaatctaatttgtcctgtattaaaagttacattaaaatctatatttttgaaagtgtcatacaaataactttaaacttgaatatatatattagaaaaaacttttctaaaacaaaatgttaacacattgtttgtaattacttagcaaaataaataatcacaataaatatgtgtgttataaatattaatagttatgtggatgtctaaatcttttatttattgccattaattgtaatcaacattcatctttttctcagtttccttttttctttgtttcttaatatttcactcttgtatttgtataaata

SEQ ID NO: 395508 - DNA, 574 bp, Cannabis indica
ggtagcgacagaatttgttcatgaccctcttctctaactctttgaagggaagaggtttgtggtacagaactgatgactatgtacccttatagatctcctctcttggggccaagagggtggagtaggtggtgaagcgaggatcatactctcataagggtctgcccccagtcttgggcttttttccgttgtgggagttgcttggcttaccaccatcgttggctctcttccctccatttgatcctcctttcttcacatttccattcgcctcagtagcaggggctttaaagtctggtgacttcttcttgccaccctttgagccccatgcaagggtgacaacttcttctagttttataaagccatatgctctatctaagaagttattcatggtgtatgctaccttaagacgaaggtcagaccatagagaactcatctccttatgttcaactgtaagtgccattacccctgtgtcctcactaagacttttagtcttagcgactgcctccaggaatcgttggatgtagtccttgagaggctcatcttttggttgcttgatatccaccaaatcattgggttt

SEQ ID NO: 395509 - DNA, 597 bp, Cannabis indica
gaaggccaaaaatagaagaataaggaacctagtcccatgagctatcctttagaaaggcctggcccggaggtaaaggtccacagggccgggtagatttcccaaattctgtcaacctgggcgttggatcctagtttaggccctccaaaaactctggctggaccccaaaaatagtcgattctcaatattttctataaacaaagaagatgctcagaagtattctctaaaaactccaactaaaatggccgaggttgagaaaatttcaaccttggcactatttttctcacctagaaattgttgttttttctctgaaaggacctattttcccattttagatgaagagaaaaattcaaatctccaatcggatacttggagggtgccaagattgtcagattatcaacctgagtgttgggtgctcggggccctaggtgctcaaaaatgaacttactctgattctgatgcctcaaatatgtcagtggtatgtgtagttgatgtaacaatgcaagttttgaacattttgacttaaggcagtcccaaaaaccaaaactctattgaggatgtcaacctaggcgccgagtgaaaactgttgggttttgtgcc

SEQ ID NO: 395510 - DNA, 535 bp, Cannabis indica
aacatgtgccaatagatacaaggctttgccctacttgtgagtgtgaacttgagtcacataatcatttaatttttgactgcccttactcttggagaatcatgtaacagattaaggaatggcttggtagtcaactttggcctatgaattttgaggatcttcagatttggctcaagaaaaagagaccgatcgagaagactcattgggacgttttctttgttgtcttagcaggtacaatatattgtatatggctgaatcagaatacttgtatatatgagaataaatgcttgagtccaagatgtgttaatgatagaattaaagaaagtctgattaatcttgttaaagaaaggagtttatctagcatagatagagttgatctcaataagataaaagggttgcaaagcattgttttgagaggatttcccttaaatttgtacatgtttgattaatagaaaatattttcttagaataaaaaaaataaaaataaaataatttgtcatcaaactcctcaattaataatataaataaagttaataaa

SEQ ID NO: 395511 - DNA, 970 bp, Cannabis indica
ctcaaatatatcatggcatcatagttttcccattggtgttttgttcgtgatgttgatcagtattgattttcttcgagttttcatattcggagtacaattttgaattttcatcgattttgtatttagaagatttttggaatttattttatttatacaatagctattaatagaagtgatttccttcaagcgattagtgtgagattagatgaaaataattattcatattggaattctttaataaaaagtttctgaaaggaaaaaagatgtgggggttacgtttttagaacaaataaaaacttacaaatttgttaaaaaattaagaagtagacaattcgaaaattctcacttaagtaatagtggtacccaattagcaatttactctatagttgggcaacaattctttgccttttattctttcttcgatgccgcttgctgatttttttactaagtcgcatacgatttcttatttttattttctttacacaaactctcgatacttcttccagcaacatcctaagtttgagtaaaggagaccctgttaaataatttagtgtcaacactggagatgatttaagtacaattcttcatgatcttctatttctattgatttattttgtgtgactcaaatttaaatttgaataacactaattttctttttcttgcaaatttactatacatatctattttcttttggtgatatcactatttatttttattttattttattcattgtaagagtttgatgattaggtgaatttttcatttatgaacgttggtggatgtttcctttctataaagagcattgttatgaggtaccaagatgcctaaaatctttataacctggcattttataattggttagcagtttgttctaattttctatcaaattaaaatagagcattttacataaatgtatacattttcttaattaattacaaaaaatatgcaaaaaaaaattaattgttacaat

SEQ ID NO: 395512 - DNA, 661 bp, Cannabis indica
tttctgcatcaatcagaatccaaactcattcatttcactgctattaaatcttatattattaatctttgaagagagagagagagagagagggagagagagtgaaagctttgttattgtagaggaggagacgcaaggagaagagtgagtgaatacaaagcaagtggtgacgaagaagagccggcgcatgttagcgtatgataggctttcgtggctttcatgcgcgggatgtgttgcgtggcgtggattagttttgtggctacaaaattacgtgtagactctctcacccacaaagcaacaaaaagaaaatcagagaataataaaacaaataacaaaaaaaaaatgttcaaaatttctttcaatgttattacagtaacaggagaagtgtatagtacacgccggaatgttttgattgatgaatgtgaaatgtgttctcggaaaaagcagctgtagtagaattatggaaaaaaattgagttgagtgttagtaaattataatttttaaagtcctgtgagttgttaaaattctattataataatgataatattttaatctagtttattataatcacatatatatataataaatatgttatataaaatttttattttttatatctttttaattatttttttataaatataaatttatatacatttgataa

SEQ ID NO: 395513 - DNA, 595 bp, Cannabis indica
aacataaaaaaaatttcatatcaaatcttagtacaaatcaagcatgtttgaacagcaacaaaagattgtctttataactattttgaaaatacacttttccttcacactcaaacaaaaattactgagatagactaagcacattagacattaacttttttttctttttctttagaagaacctaaacgaaatacttcaccaacttcaacaattccatactaaaataaaaaaacagagagcaactgaatagttacaaaaagagcccacaacaattccataaactaaattacaataacacaagaaaagaaaagaaaaaaagatttcgaacccttcctatataacaaatccatttcttcatagttgatacccctcaaaatgattttccatttaaaaaatttaattggaaaattttaatacgtgtttagtgttctaatcagttataaattttctagacacaccaatgcacccttaatttaacatgagtataatctagtacaataatacaaccccttaaaagggatacaccaatacatctctatctgttttagtatctgaaataattttttagtcaaattttttctcatggtcatgtaaatta

SEQ ID NO: 395514 - DNA, 514 bp, Cannabis indica
gtccataaatatataatatatacatttatactatattcgaacactaaattaatattacaaatttcggaagctattgctatgttgtttatattaaaaaatttatgtatataaatatatatagatctactgcagctaattaaatggatgatcctcacatctaaatattagtactgttcctaaataaagtagacaaacattaaacaaattagctaaactacataagaatattattatataaaatatatatatttatatacattgtagtactagtactatatatatattgttggttcttctcttttgcatagcatttgtctattttcaataatagttttggtttgtcttaggggacaatggtgaaaacgtattaactgtattcaggtcattctctcagcaagtttggcttctctacgtttggctgcaacgtttcttccaaaacaacaaaataaaacgatgatatatatatatatgggtgactattcaatggttacatttttattgtaatcatatggtt

SEQ ID NO: 395515 - DNA, 686 bp, Cannabis indica
cataagcctacagtagtagaattattatttgcatacaaaatttagatcctctaaagattttaagatggtagaattttctcttttatttgactctcaagttccaatagttgcattgtattgcagaagaataaaaaacaactaaatatgtaattatgtgaattccaaacccatattcaaatgtttgaatttcaaatttctattggagattttatcaaaaaaaaaaagactttctattggagattgtgcctttccaattagataagaaactgcctttccttagttactgttatcagtgtccatattaagaaacaagagttcaaccagatcattctcatcaatttcaatctcatcatgtagaacaatctaggtataggaaaaagaaacataaccattagaggttacaatatttataacaaaccaaatcttccaattaattatagagaaaaatctagtattataaatcttacacacacatgggcaacaatttcaacaatactcagaattataaaaaaaaattgataacacaaaattataaaagttattagttttatagtaactttttttttatgattataggtgttttagtgtaaaaatttacccatagcagctctcgtgatgttctaagaattcaacttgaaaaaccgtgtttttgcaaatgtcagttgtatataagaaaatctaaaaac

SEQ ID NO: 395516 - DNA, 659 bp, Cannabis indica
atacaattaatacccaaataaattataaaaattgtttatatatacaattttcagttattataaaaggctttatataatgaaatcatgttgaaaatgtatattttactatattaaagtttaaattttattataataatgaattaataaaaaatgatgcttcttaattatgtaaaaaattatatcattataagtcgttttatttttattgtattatgatttatttgtgttttaattatagggagacattttttttatacatatatattatatataattcttcatattatttataaaaaatattagaagtgattattttttaattaaagaaaatatttttcaaaatttttactttgtttataatatacacatcaaaatattatattacaaattatattactcaattaaattattcaaaatatatcaaaagaatacaaaaattaggtggaacccttcccgcggcttagttatctagtttattataaaatagaataaaaaccaaaaaattgtttctataagatatattgatgcacccctatctgttctagcatccgaaataattttttagttaatttttttctcattgtcatgtacgttatagttatttaagaaatcatgcaaaaaactatgttcaaatagtatgttgcacgcgtgactatttt

SEQ ID NO: 395517 - DNA, 1344 bp, Cannabis indica
  modified_base (53)..(53): a, c, t, g, unknown or other
gattacttatagaaagaaatatatcagcaggctttaagtatttcactgataanatacacacatacacattatgcttaaattctaaagatacactacaagtgttttaatataaaatatatatattaataattaattgaaggcatatgtcagaaaataatgtccacactttccattttaaacatactcaaagggaaactatagaatatcacaatgactttcatcaaacaggtggtgtgcaagagaattataaatatgtttacttcagttcaatcaacgccatgattagctcaaaccacatttaattaagaaacgagtgaaagctccatattcattaataccatcaaatgcagaacacttatatatatattccaacaaagataccgtcaaaattagctattacacatgtcactaaggttatgataattaagagtagcttttagagactcaaaaagaaataaattaactttccaaggaatttaacatgctcattaagataagaaattactctaacttacctgtaaatggttgatttcgtagccatgtcttaagcatactggtgtttgggatcaatatctgcatgctatcaatttcatgggctcaataaggcaaaagtatattatatataatatcaccataaacacgaaacggttgtttgctcgaccaattttgaatttgacgataaacctgacgaagaagcacgatgaactggcgagctctgagaaagattgcctggagtcatttttctatgtagtgaaatactgaatttcgaaccggctcttcatattttcaaaaaaaaaaaaaaattaaatggaagtttccatctaaccggatccattacacgaagatattgagcttccacggtccttttttgtagtaaaattggactggactaactgcgtttggttgagagaaaatataggaataggaatggaaattggaatagaaatggaataaaatttagaaatcatagaatgattgataacaaaaattattaattttttttaaattttgtattagaatgattttttctttcattttaaaaaggaatagtcattccactaaaatgatggaaagatcattccattaaaatggtattctaataattttaaatgcaactaaataaaaaaatggaataaaaatggtttcttttcgattctattttatttcattacgtccaactaaacgccaccacctaagtgaagagaattgaatagggttagattagatagaattatgttgtatacaatgctgtgtttggtagagtatactgaataaataatactgagtttggtatatagtttgattggactaaatatttttaaatattaattaaattattaaaaa

SEQ ID NO: 395518 - DNA, 1326 bp, Cannabis indica
tttcttttttttttttaattgtccttttcattttcattttatcagaacaaactatattaaataagtactatctaatagtccttaattattgtaggactcatttggtaattccttatttttttattattttgttgtatagtattggatggtattagtattagtattagtattaatataatattatatttattattgatttgtattaataagttgagtaaaattatattaccttaatcctgattctaatatgaaattttatccaaatattgtgttttttgttatttatgtattattgcatttatttgtaattttaagcgtaatttttaatatattttttttttgtaaatatattcataacatttaaaaaaaaaataataataatttataagatatgctaaataactaggatacaccccttttctaaaaaaaaaaagaaaaataataataagtctatcatatatactatcaatttagactttcggtttcaaataattacaaagtgatattttttcttgtaaaaaaagtattttgataacatattttttaataagaccttaatattcctaatttagttcaatattttaatgagaaaataaaaggtttaaatgaaaatcaaaaatataaaaaactatttaaaagaattttaatttgttcaataaataattttgaaacattaaataataaataaaattattttatattatttaatttatataagtactgctgcttcgatcttatcattcgaaaccgaatgtaataacacaaaaagttgtcttcttttttttcatgatgtttattcaaaaataaataaatatataattgtcattaaatttgttttttttttcttaaattttagtttttatcaaataaaaaatgttgatgttccccgaaatagggcgggtggtgattaagacggcaaaggcaaaggaagaagttgagaaatgaaggaagggtagtttcgtaaatgaacaaagagaaggttttgcaatcgtaaatttatcccaaaaatttggacatttgtattaataccataagtttttgtttttggttgactttgaccagctctccttggactgggttggattaggtgtatttcagggcttcctcgcattttccttcttcagataaacctcatgacgtaaatgtccctacataatcgagattccattcccattggatgaaaatggggtaggttgatcgagtttcgagttcgtgggttttggatccaaaaaaatttgcaaccgaatccaacccatgaaatgattttgggttagtaggttcagtttggtcggattaacttggttaaggcttttatttttatttgag

SEQ ID NO: 395519 - DNA, 965 bp, Cannabis indica
tgcaccactgatttagcctatactcccttttgggttcaagtttaccgtctgcccttcctaagtaagtcgaaagcgcttgctaaagcacttggaaacataattggtgaatttctagatgtccatgaagactcacttgctgaaggttgggggcctttcttaagaattcgtgtgaagcttcaggttacaaagcctctccctcgaggacaaatgatcagtctaccaaggattaaggatgaattctgggttgattttcgttatgagcgattacctgagttttgttttgagtgtggacgacttggtcacccttttgaaaaatgtattgcttttatggaacgaatggaccgtggaaacgatgatgattttgattatggaccgtggatgaaaggatcaaaacttcctacttctggatatgacaaatacagacaagacttttcaaaaggcaatgcattgcctttcttgacacgtctcactcgtaacactatttcttccacttttgccacaactgaataaatttgccacatcctactccaaatgcattgactgctggtgaatcgtccacaattatttcgaccaatcctgggctacaatcccccacggcctgccttcgccaaccactacagctgctccttctgttaatcacaatgtccctctgctttctacaccagatcacaatgtccatacctttccctctccttcaatactcccaccatcaatcactccttgtaaccatgccactataagtaatgccacgactgtgccctctgtccctacacataccatttcaaaattaaaacaacctatgtcatccaatgctgtacatttatcacacatctacacccctgacattggcccttcccctccaaatcatatccatgttgctacttaccctcctttaacacaccctataccaccttcatatgctggtaataccttagccccacttcaccatggcctttacacgtctg

SEQ ID NO: 395520 - DNA, 923 bp, Cannabis indica
aaaatagaaaatactaatttgatataaatacaagtagtaaaataattcatttatttatatcctacaagtagtcatatcatcaagattttttaaaataaattaaaaagaataataaaaataagaaaaaaataataattatagaagaagtttataaagatggttcaccacctctctatattttacaattacataaattcatagactataaatatataaatagatttatgtttcacaattatatacatattaatattatataatgttaaatatatttaaataataattacaataaatttatatgaattacttgacaaaaattaaaaaaataacaaaaatatattttacattcatttagaaaaattacaatttatttggttaagttcatcaaccacactcatataataaataaattatactaactgggacaaattaaaatgaaacaatagtaatctatatataacctagaatgtatattaccacaatagtttctaaatcgtatgagattttttttttaaaataactcttatattgtaaaagttataagcttggaggactcggaatgattcttataatctttgtaaatgtggaaatcttgtatagaatacttgaggtttgaatttttggagtaatgaaaagactagctgattcatcacatatatataataataaataaaagaaaaaagataaaatacgataatttataggatgtcatttcaattttatctggactctcctttatatacatattgattgatattataaaaaatatatattcatatatgttaattataaaatagtaataaactgtgattagttttgtaagattttaataaggctaattagtaatttttttccccgaccttttacatgtactaaatcgtgccccctgaacttttttggccgttaaaaattcccctcgaact

SEQ ID NO: 395521 - DNA, 939 bp, Cannabis indica
taaagtgattattttagtaattgggaataaattgaaaaatacatcttttttgtatctattaataaaaaataccttcatattatttttttttattaaaatataaccactttttttgagtggattgcctattataccctcactctctatttaagtctagcatataatttacataacctaagaggtctaatggggacatcatccataaaagtgagaaaatctaaaagaatatgaaaatggaggtaaaaattaaaacaagtaatgtaaagtaggtatacaatgtaatttcctccagtaattgtgggtcattgtgtcttaagtgtcataggctaaatgcgtagatacctcaaggaatatttctaatttattgagggacaaattagaaatacataatattaactgaactatgaggttaaatattagtagcggttcccaagaaataagagctaatctaatctcttcttccccatcaagtaagaaaattagaaaatcctaataagtcttacaaccttagaagatcattatccaaaattactataaagatgatctctataaggtggattaaagtcatcactatttatgaatagatacacttccactattcatgttattcttctttttgaatcataagcaagaattttctttagatataaaaaatctttttttttttttttgtagggtaaccgatacaggttaaaataacaaaggtaacaaagttacacaaccagaggagaattttcttccatctataatagtttattgtctatcataagagcatgcagagataccctaggagagctagacaataaaaccataatatcagaaaagaaaacctcaaaactgagagttgtcacttccgaaccactagtaaaacacctgcaaaataaagagaaattaattaatacataataaatatttaataaaaaaatgaaatttccctta

SEQ ID NO: 395522 - DNA, 662 bp, Cannabis indica
tcactgcagcttttaaatcgaaaaaggatttaaatcccatatatacctatatacgtgtacactgtacagttgatgatattttttgactaataaaccttttggaaccttttattattatctcaaaaattgatttttaaagatttttttatcgttattatttcttatattttatattttacttgtttaattgacaagataggtacatttttaatattatactcaaaaggaaaatatatttctgacaactttgcagaaacgtgtagatataagtatttaattgtagataagcaagtaaaatggcacccccgtcgggtactctgacactactccgcatgaaaacttaaaattatactaagttaaactatatagctatatatagcgatatatagctatataggtaataattagcaagtcgtttgaaattcgaatttgtagtcattaaattctccgaaaaatatgctgctttagagtataaatgtttttaaacacttaacgatacaaaaagtaaaaatatatttgttctgtacatgtaatattgttttataactcgacttcgaatttttaaaaaaaaatattttcaaaaacgctaatactttttgagatacagattgtttaaaaattacccaggacatattatagtgattggtttgaatacaaattat

SEQ ID NO: 395523 - DNA, 722 bp, Cannabis indica
attctattccttatagatatcttatgtagtatatatatatgacttacaaaaaaaaaaaattacataactacttttttggcaaattatatatacatttacatttattttttttaaaattttttggtgctctataaaaataacacaaaaataataaaaaattacacaagaaaataatatccaaacaacatcaaaatatcaacaaaaaaataatatataaataacaaaaaaattaactgcaaattaacaagagtacatcataaaaatatatcaaaagatcgtattttccgtaaataaaattataaaaatatttataatttcgtacaaccgtatttttgtaattttgtttttgtatttttttttaaaaaaaacttatcccctctaaaaaaaaagatttatatatggtgttaaatatatatttatgaaatttggtttggcttgaatagttaatgaaatgagacccatagggacagaagaggcccaatgaatgtttaggcccacaaggctccagcccaaggttattctctatacctacagaatgcagctcatatcattttgtagggtagaaccacctacgtgtagtcacttaacccactctctgggtagtcacttaacatactccaggagtagtacttaactcaccccgggagtagtcactcaacataccccatggggtagtcacttaacccactctcaaggggtagtcactcaacccacttgggata

SEQ ID NO: 395524 - DNA, 1358 bp, Cannabis indica
gactttaggagttgaaggctaaaccctgagcatcccaatttccctccatctactggtgatacacctcttacagagagtgagggcagggaggaagctattgttgatataacgggcttccaaaaccttctctaagtccattcttcttttttgtttttagcatttacctttagtgtgttagttgatcattttcgggcagcctttcaatgtggataagccttagtgaaatattattaaaattttgttttagttaattagaaattatttctaacttaataaaacttttattccaatacttattttttttattttactttatccgttaccacttgaccatttaacattttcacagtacaccatgtcttaagaaaatttattactgggagtaatgtcattgcttcttaaagttatctttaccatgagagtacttacacagatgtcaaaaaaaatttgaatgctcgtgtaacatataactcttgtataccataacataacctatgtgcccccaagttatcaaggaagtgccttcattggtcacttgccgtacaaaatcccactgggccttcttgatcatgactcttgagtggtcttaacctgggcgctgggtcctatttatggcacccaggaagtggtgtttcttcttcgaaagggcctacttccccatttttatgaagatgaagaatatgaaaaagttgattctccaatctgatacttggaaggttgatacctcaaatatgtttgtggtatgtctagttgatgtcccaatacaagtttggcccttttccactaagacgttcttgaaaactgaactctagttaaacatgtcaacctgggcgccgggtgaaaccctaggtgccaaagtttgcaaatgggctgcaggtttgtgtaattttagctctcgaggctttaattaggttgctcaatgtcttcatggtaaagaatactgaatgaaagtgagttggatataagttattggagtccgaacttccatcccgaagatcctcaagtcaacttaggcgcagggcgagggtctcatcccaagtcgactgctatgactcgggtctatactaaaccctttgatatcatccttcatgcctcgtgtcaaacgttgatgtccacgtcacttggaaaaagtttccgggttaaaaaatcccataatagcattttagtaattggataaaaactatgtttggtgtgattaaaatctatatataaatgtatacatatatatagtttttgtcttatatttttattttctctctctcttgcacttataaaaatcttattaaccctaaatttgtgatcgtgaaatacaaacagaaaatggagatatgtatctgtaatttgaaaagaaaaaaaaa

SEQ ID NO: 395525 - DNA, 662 bp, Cannabis indica
aagtataaaaatgaaaaaatcccttattaaaattatgtattttgtataaaaaattattatgaaaaagataattatttttgttaaatattctttactttctagtaatgtttcttatagaactaattaaatattatattttctaactcataatagtattttcaacatgacagcttaatatttcaattaatttcttgccaccggccaatatatctgaaattaataattgtgttataaataaatttgagtattgaagaatctaagttatgcaagcttttagtgataagactaattaatttcagatattcaaaatcaaaatcaatcacttatatgttagtgtaaccactaacaaaagaagatattacaaaactttctcttaatacatacataaaataattgaagaatatataataataatcatcctcattaataaatacatctataatcaaacttgtaataataataatatatagtcaaatatttaaaatacatctaatcaaactttgtagtaataataagtaatacataatctaaatgatataacccttaacaaccaactccaaggcaatcacaaccattggtaatttttgtacctctaaatataataatttttataggagtatttttattaaacactagtagtatttaatatttttttataagta

SEQ ID NO: 395526 - DNA, 1086 bp, Cannabis indica
taagtgtaaagagtttagaagtttagggtttaagggttagggttagggtttaagggtccgcttccaattctgtttccaatttggcgtcacggggttcgattaatggttcaagtgtgggtctgggtttaggttcctgtttgggtttaggtcccagtcttggtctgaaatccaaacaccaaccacatgtcgagtctagtttgagtttttgtacgggttcgggttctggtccgagtctgggaccacgttcaggtccaatgccctaatttagacaccgacaatgggttgggtccaaggctcgggtcttggggtccttggtcccgggtccaaatccagatcctagtctagttctagctcatgtcttgatcctggttcaagtctcaggtccaggttttggtctaggtttggctcttggggtcctgagtcatggatccgggtgcccgatttagctcaaggtcctaggtcccaatctgggtaagggtcccagttcgtgtgcaggttccggtccgtgttcggtactagtccttgtctcaagtcttggcgtggtctgggtctgggtcacggtttggttcttaggtcccaggtccgagtatcgagtcccgagtatcaggtcccgagtcccgagctcagtcctgggtcccagtctcagtgccagttctggttttagtcccagtctaggttcgggtctcggtcctagtctcggtctaggtccaagtcctgatctcgattcgagtccgagttttggtacgagtctgagtttgggtctggcactgggtttgggtttcagtccttgcctgggcttgggtctatgtttgggtcttggtttggatctaggtccaggtcctggtacaggtcggggttctggtctagctctaggtcccaaatcaagggtcctgggttccaggttctcggtcgcaggtcctggcgcaattctgggttcgggttcgggtctagctccgggtatcgatctcggtctgggttcgggtttgggtctgtgtttagtcccgtgtctagatctgattttgggtccaggtccaattcctgttctagggtcctgactccggttcttgttccgattttgagtctcgg

SEQ ID NO: 395527 - DNA, 729 bp, Cannabis indica
tctttgttctcctttagtgttgattgtaatctcctcttgttttaaaactctattgactaagttgttgagttcttctttgaatatcttggctcgcgacctcatcaccaggccaactggaccttgacttgtatctttagccttattgttctcatcaagtctgagtcatgttcctaggtttgggtttggttcctggtttaggttcgggtccaggtttgatcccagtctgggtttgggtttgggcccatgttctagtccttgtcccgttccttagtcctggtctggttttagttcaggttctagttttgggtcctaggtcctggtttgggtccggtcttggtctgggtactagtctaagtctgggtccgggttcgggtcttagttcgagtcccagatccagacaccaactatgggtcctgtccatccctcacgtcccagatcccgggtccaaatccttatcccagtttggatcctgactctaagctgcgtcctaggtccgggtccggtttcagtcttgggtctcgagttccaatcctagttctcaggcttagtattcaatcccagttttggggctcagttcccgagtctgggtgcaccatccaagttaaggtcctatgtcctagtctaggtctagtttgggtttgggttcacgttttgggtcctagtttgcatctaggtctgggttcgggttagggttcaagtcttggtttgggtctgggtctgggttcaggt

SEQ ID NO: 395528 - DNA, 939 bp, Cannabis indica
cattttttttatctttggtactaaatgagaggacatactcatatacttatactcacttacttggtttatattaaaaaattggctgctcttgattaatccagaaaaaatagcaagagaagataattacaaaataaaaaattaggtatattatacacatatattttgaaatgccatgtatatatttatttatattttttgttctctaaatcaataaattctatatatgtatatatagctgttgatggatcacatatagtcaaagacaaaatgtttaatcaattgctactatacaatatatactctttatgatgatgataaggggaaaaagcgtggtcctcgaatcaaagaatgattggagaccaagaagagagagacagctttaaatggcatcttatatatataaatatatatgtgtgtaacacataaagattatagagaatttcttttgtacgtgatctccccttcgttttttctctatctcttttctcattaattttctgtttgggattcgagtattctttctgttttttcttgctcgatcaaattaattctcaagacaagaggagagaaagagagaaaatatgtaagggaaagtatatatatcaaaaataaaaattattttaaaaacctaagaaaaattggtgaatgtaatatcattattttctttttcaatatacatatatataaaataagatattcttataatttatttccttttttttttcaaaagtagtttttaggagaggatgttaaatgattttgacaattctctactgtacaaaaattgctcaaaataaaactattttataataatgacataagttctgttctatatataccaaattacgacatattttcgtcagggtcttacaacctttgatatctatatatatatatatatataaatatatatatatatatatatatatttgaactact

SEQ ID NO: 395529 - DNA, 757 bp, Cannabis indica
cttttgaggtcgaatgtctagtgatctctttccactagaacagagaaaaagatacaaaatcgatcactctcagcgaataaacttgaattttactatttgcttagtctaaaaaaaacaatcatccaatagtgaaatccattagctcggaagtcggaatgaaaattccaccgaaatgaatagcattcgtattaaagagggaaaaaaaaacaaaaaacaattagctggccggtcccaactcccaactcccaactcttcttctggactagttgcctagtttgcactgctgcagtggaatctttattattgccttaattcctttgagcccaactgcccactttctggggaaaagtggtacgctttaaggaactgggcagataataacgagacagtattgacagcaaacatgaaaagaagaaagagttgctaggctggatcactatggtcttgccttcctataaataatcaattacctttcattacagcttcatttcatctaataaaacaaactcccacaactctcactccctttttgtccaatcaaaactccttaaaaagaaataagactactaaaagctactgcagaagtcacatggctctctctcacacattggctcaaaacccatgataaataaaatacctactatcacaacagggccgaccctgagggtaggcgggctaggcgtgcgcctcgggcccccgaacgctcagggccccgaaatcgcaaaaaaaaaaattaatatatagataaagtgttaaa

SEQ ID NO: 395530 - DNA, 539 bp, Cannabis indica
aaaaaataattaatgtttggtgggtaacctgcctaaaccgagcaaactgttggtcggttaaagtttttcacaatttcttttttatttgggtggattgcatttaaatttttggtactcgttttttacattgggttagaaaatatgtagtataaactgatcgatgtatagccctaaatatatgcccatataattctcacatcaagcaaatatatgcccatataattttcacatatttataaaaaaaatgattcacttacattcatagagaaaaaaaataacttatacataaaagtaaagtgagtagctaatgatcatcttatttgattcgttttgtgtagtgacgactacaagtgagttatggtgataatagtagttttgaatgttgtggcaattacaagcgaaatacaaatcatataatgagtttctatagatttatcaattatctttttcttttctttttgaatctctatgtcagcctcttttattttttgtttttaattgtatttttattaatattttgagtaaaatatttaaataat

SEQ ID NO: 395531 - DNA, 625 bp, Cannabis indica
cgtcttctccaacagttctctttgttcttcttcattttggagaaccaaaaggtaatcaataaatgaggaatggatgccaccaatataaatatgtgttatacatataaataataaaatatttattattttaaataaatctaaataattttgtgacatagtttgagtactacaacaattacgggttttagaggcagtttttaatccctttctgcgttagttttgacaaaatttactaccgacactaattcaagcaacgttgtaaggtcaaacagaactgatgccatagagggaccatatggcatcaattattattaaataaccaacgccagtgtacactatagaatcagttatttaataataattgacgccatatgtaataagaacttatgtcatagctaaataaatcaatgccatagtgtgtaaaaatcaatttatttttttagttttaaaacctattataaattcacaaattaaatgaatttatctaaaaattaaatatttattaatttaaaataattattgtttaaattaattaaatatttattaatttaaattatatttaggacaagctaatatacttaaaataattttatggaagcaaattaaaaaaataacaattatatta

SEQ ID NO: 395532 - DNA, 1196 bp, Cannabis indica
gttggacaccattactgttctgattagtgctctcatctctttattcagatatttttttttctttcatggaatgaagtttttttttttttttttttttagtttggggggccaatttttgattttggtgctctatgtttctatgtatgaaaatgaatcattgtatttgtacctcatttttttttttttttaatcttattctaagatgttctttccttttttgggaagaaatattttcattattattattatttattatttattattattattattattattattcacatttatgtccctgcagaaagaaaataaaaaaattattggacactttatgattttgtatatggaattttaagagttgttttggttggcaatgtgttttaatttgttttattttttagtaagttagataaataattaattgtgtatgtatggtatatggtatggtttggtatggtatggtgagtagtgttttttaatgttttttgtaatttaatatttaggaaaattgaaattttattaaatagttaaatagatgtttgatagtctaaaatactaaaaaaaaatcttatgttgaaaataagatgaccaaaaatagctaatcaaattgtaaacaaaattaaaacattgtagttaggtttaagctaacatctttcatgggttaagtattcgaatacatatttgaaagaaattaattatgcttagtcttttggaatataaatttattttggtggtttattagggacacttaaaatattcaaatagaagtatcgatgatcaaactaataatggatgaaatacgagtttcctagagcaaagcatatggttcttgctcgcgggaattgtctaagaccaaaagagtaagaaaatacaccacatgatctctccttttcacttagtgaaaaattcatgtataaatcatacattatgatttgtaattaatctttaagtgtacaactaaataataatttaggtacacttaaattgcacacactaattataatccaaattacataattaaaagtgttgtagtcctcaatccttattttaaaatagaaatgattaatatttaatacagtataataagtatgtacaatttaaggtgccgtttggtaacatttttgttttctaattttttaatcacaaaatagaagtaaaatttttgtttttaaaaattttgcttttgaaaaacaaaa

SEQ ID NO: 395533 - DNA, 733 bp, Cannabis indica
cgacaccttgacttctctaagcctctaactatctgagtaacaacaacctcattttttgcgcgactatgtgccttgtgcacacttctgtctctcgaacaactcccgtcgagtcatgctcgcaagaatgcatgagtgcattcatgcatcgaggctctctagctaagatactcgtacggtccataaatttccagtaggataagcaaaatcccaacactgtcgctcacctactcactcatgaccaaggttgcatgtgtggcatgatgccaacaccaagctgacgtgccaacgcgtctaatcatgccccattcgagtccaaacagtcctcttcatcgcctaaggactctcatacatccatggtccaatcctcaaagcaccatgcctccacgcatgttggcaggccctcgagataagccaccaaactagtagcatacgttagacctctgtctctttctagcatggtgaatccattttatgcacgatgtaaacttttcccatgaatgactactcgtgtcatctcgtgttgagactcgtggccaaggcacaccaccacaccacaacatctcttggaggtttaggcaacctctcgtgcaagcgacatactggcaaactaatgaaaacatacttgctaacctctggcagcattcttagatgcactaccaggccggcccaatagtgtccatgagtactccaactcatggtgacatatgagtcccctcgtggtctagtagtccca

SEQ ID NO: 395534 - DNA, 894 bp, Cannabis indica
tgtgttaattctattagcaagttatgaatttaccactgaatgtgtacaaaggtctgctcgaatccaaagaattgaacagacaaaaaccatacttgtgaaatgcaagtgactatgagtcaaaagtctgctcggtcacttgggggcaactagactcgtacaaagcattggtacaagtaaataacaagctcaaaaaaaaaaaaaaacaaaaaaaaaaataagttgcacaaataattatcataacaaggaatgatagtcattagaaaaagattacaaagcacgataaatccggaataaaaggctacctgatcgccagttgtcttaaaaatgaaaacatattccaagtttaaaatctgcttggtcggtcattttgtctcaaaagaaggcctatgggccgaacagacatatacataaaaaagagaaaaatatttagacagcaagagtcctagactcttggtacggatcgtttttgtctaaaggggctggaggatcattagtctgagcggcagggagttcagtgttctggttgactagaattgtggaggtagttgcctcaaggttttctttggccacctaagctgcgcataaatcaagatacatgctcttggaatcaccagggtaatcaaagtttccttcaggataggccttcaaaaaatcatagaaaacctcaagagcagctgtctctaggacgtccacctccctctcgagctcctcctcccacgactacttatgtaataccccagaattaagaaatggattagcaaaaccctaactagataattatgtatcattgaggaattatattattatatagttcaatatatgtgaaattatatgaattttattatgttaagaccccgttggtgagccaggggcattttggtaattatgacccga

SEQ ID NO: 395535 - DNA, 602 bp, Cannabis indica
gtgaataattgaagtaatatgtactagaatgaaagaaatctcacgtgatttaaggaaaacgtcatcaatattatatataaacgttaaatcacaagctattatttctaattgagaaaatcaacgttaaatttgtaaattacatgtgaattaatgtgaattaaggtgccacatgtaaatttcccttttatataatttaagaactaatttatccaaaaaaaataaaatgagaactaacttacaaaaacatttatagttttcaaaaaaatccttcaattatgtagtattaatttttgatcacatcaatcaagcaggtgctatcataggtgttggaactctcatccgtgaccactaaggctctatcattactgatttttctaagcctatccgtggatgtttttctcccaaagaaatggaggctgctgctatgttctatagtgtgaaatgggcaactgagcaccagctacaaataaattccattgagacagattcccttttcgttgcaatcactattaatcacatgtcttctattagatttataatacattttcataatttagtagatgatattacttatggatataaacgctttttctcaaaaaaaa

SEQ ID NO: 395536 - DNA, 1073 bp, Cannabis indica
gaactaattgatgtaatgaacttataagaaattagttatgtgttaatttttgtttttagaatcatattgtaataactgtttatgaatctatgataccaaaattaattttatataaactttgcatggtctaataattactatactaaaaggctgaacctaatgctaatggatgaaataactgagtttcacattacaatgtttttatggtggcaatggttaacctataaattcatggcaaccatataatattgaaaagtatataaaattggtttacaaaactagtgattactcaaaaggtaaataacgagaatgaaaaaaattaaatttaatttacaatcagtgacttacatgattactttaaacttgtaagcaaactagaaagaaaaaaataaataatcatgccatcattaattttgtatgggacctttactatattggacatattattttaagagtcacaatagtatgttatctaaagtaaaatgcattacaacataagagcttaaataaaagcaagattagctaaaataactagatgacagtgtgagggaaaaaaaaaacaaaacaaaagtatagaaagacaacaaagttattagttttaaattctattgatatagacaactataaatttatatttgatttaatctaccatcaaacatacttatcataaaaaaaactacttcatttaattaactcagaataacttttgaagtaaataagaaattggtttattattatctcaatgtctttgttaggcaggatgggaaattaatatttcttaatgcacattttgtatcaatcttggtctgaattatttctcataatctctttattaggagcatctagaacatcacaatgcatactattaatgaaagtaataactgccacataaaaaatctacaactaaatgaaactatgaatcacatctccactcttgacaaatattttagtttgagaagaatatattttttaacttgcttatgtttgaggaacacatctaaatgtattgccattaatatagttgttacaagggtatctacacatttagtaccttgtgttttatctaaatacaa

SEQ ID NO: 395537 - DNA, 785 bp, Cannabis indica
aagagttatgcacgttttagagctgaaaaaataagattttgccactgcccttttttcggtctatcattttctaaacggcataccatttttcacagaaacagcagcccgtctggataacgacagattgtttttcccaaaaactttttgaaaaacgtgctaacggctataaatggctagtttttgtttgaacactatataaactcgatttttactcaaaaattcaagttggctaagcatttatttcatacacctaacatattcaagtgagtttaatgtgctcccaagtctaaaattcaacaaatacttttcacactttgagccaaattttgtgtttaattctttaaagtatgcttgctaatcactctaagttttctattgtttcatcatctttctagagtgagtttgtttgtaatttcaaacacatttttatattgtgattgagctgaggctagcatcggtattataaacaacccggttagagtgagattatcactacaataattcgagaaaaagattgatagtccttggtggtgtaaaactattataagaggtttagaaactacacttagagtatcagaatcagttagggaatttgcatttgaattctgttcacgtggcacttattgaatggaataatgtttaagatgggctagtagatctttattagctttgcttaagtatgttatcatattcggacctcgggcccggtattcactgagaatctgattgacaactagctgtgaattactgtagatcttgagtgattcatctttgattgctagtgc

SEQ ID NO: 395538 - DNA, 1063 bp, Cannabis indica
agaagtagttttagttaaatgatgtcaaagaaagtaaatagaattcggtgatgtagttaagatatacatatagttcagttgaagtttttatttgaaagtaattaaaattttcatagaatagtggaaaatatttttttaataggttcatttacttagtggcagctgaaggttatgataggagaaataagaatttattattgagatgttttagatcaatttgttattatatatatatggcacaagattagaaagagtatctcaaagcatttgaattctgtctcttttagatctaaactctttctctcattcttcataatatggacttaagctgtcacatcccaccataagcatagtaccgaggcttggattcatgttaggacccgactaagttgtcttcaaggaagaccaagaaacaatattctcttagcggtaccacttcacactttgataagtccatagtacctagtcacgctcatagtcgatcaacaccatcccatgtctcttagtttgagaatcttgaattatttgaggtataaaacaatttctttgtctaataatattaaaatttggttaaggattcgtagctattcatgattctcgttttcaaaataatgtctctcaattaaattatactatctctctccatacttattcgttttcagtaatcttggtatcgtttaaaagctgattcactgacctataaatttcaagaagaaacctcttacaaatttaaaatttttctatgtcgaaattagtatttgtatacagttttgtcgtgaattatttttctcatatttcctgaaaatattgtctcagtaaaattagaatatctttttcaattctagtctatttttaataatttatatatcattttaaagcttagcaaattatctacattttctatgcagagagtcttctctaattcggaactttcctcagtcgaaacattatcattttgttgctgtacgtagtctaaagtttgtttgctccaagaattctaaaaactatttcgataaaactataataactctcttagttttaatccatttttaatgatctttat

SEQ ID NO: 395539 - DNA, 1039 bp, Cannabis indica
ctctcactctctcttgtcatgtctgcctgctagcccctttgttggttgaactagccccatagagtgggtcgaaattaactacaatgtgacggtggataatgagtgcatgatggtggctagaaaccacttgaagggaatcttttggatccaaactcaagggctccctttccataattcattacttgacacaccagtttgtcattgttgaaagagattttaagattgttattgatgagctaaggggttcgcatcccatatgaaagctccataattatgtactagcttgtggaataattttgtctaagtcttttttgagttgtactttcgttaaaatcaatagagattttaacattgtagctcatcaagtggctaaataagcactagcacaaaactattctggttttgtggaaaaatcttttattctaaattatttattagggtaattcatccaatctaataaatacattattttgctcataatgcatccgatctgcactaatgtgatgtttggttaaaaagaatgaaaaacataagaataggagtgagaatgtgaataagaataggaataaaatttaaaatgaataaaaaattgataaaaaaattattaaattttttctcatcatgcattgaaatgatgtttccctccatttcaaaatggaatagttattccaccaaaatagtaaaaaggtcattccattggaatgacattctaatactttaatatgcaactaaacaaaggatttgaatgaagattattttctttccatttcattctattttattacctccaaccaaacgtcacctaagtggaaattttcatattttggatccattcaatccaatcaacaaaaataaggattggatcaatcattttggattgtttactttttaatattgagttagttaatatttattaaaaatatttttttcccacataactaacaacaaaataaaataatttattgttgttttatttctctaacaacaaattaaaataaataaaataaaaaataagattataaggaaaaagaaaatttgt

SEQ ID NO: 395540 - DNA, 842 bp, Cannabis indica
attattattattattatatagatgagggtttacatatcatgaagaagtagtaataaaataattaaattaaaattaacttttttgagtaaatgatgatgagaaattattattattactcaaaagtatatgcatatatttttaattttgtataaaaacttggaacgaatacaaaataaattatatattatatatgtttaaattatgtttttaattagtacacttaactttttatattcttttttttagagaacactttttctaaattatttccaacatgtgttgtgtgcatgaaattgtttaattatgacacttatttactaattcactacaccaaaatatgtctttactttttggccattaattatgcattttataaaggtgttagttgggcgtctgttgaaaaaatattgacgctaatattagttactgatatgttgagtataaagtgaaacgatgtgtgtaaatatataatgtgtcagttttgaaatcgataatgtcaataattgacgcttagactcgatagtgtcgattatataattaataaagtatttttagtgtcagttttgaattggaactaaccctaatgattacagaattttgtaaaactaaccctaaagcttgttttaatttgttaaagtgactaggttattataatcatatttctagctaatatattaagtacccttaaattctttttacatgtttattaagccacaaattccatatatgttagctatataaatatatatacagtggcggaactagcacttactagaagggggggccgatttacatattagttttaacaaaaaaaaatacactattttttgtcaaaaataaat

SEQ ID NO: 395541 - DNA, 899 bp, Cannabis indica
tcctggctttttcacagtaagcccaagtttccgcttcctcctcctccaagaagcttgtgtccatgttgggatttgccatcacggctcgataaacggtacgaaggccgaccttattacatcgctctgtggttccagcctctttccctttgatttcagcctccttccctttgagttcgacctctttctccacgagcaccttcttaagttcattgcattcatcagacttggtctttgcggctttctcggcttcttcaaggcttttcttcgacctctcggcttcctgtttgagacgagtgatttcctgctgagtgttgttccattgtttaatcacaacctcacgttgggcaagtgacttttggacttcgccctctaggtatttgagccgctccaggaatcgctgatgggaggaaaaagaaaggaaagaagtctggagaaatatgagcaaatgaacataagaaatagggggaaagaagaaaggaaaaataatatgaatttatacaacgactttaccatgaaggcatactgcaagttcctcgagagcgtctcttccagattccccagattgattagatctcaatcgtgacggaggagagccttgagtttgcgccagtaggcaatcccaaacacctaggcgaattccgagccagccttacctactgcagcagacaatgtttcaatggcctggctcgaggagggagaggcatgagttgtctcagaggaggtgctttggcgttaggatcaaccagaggaggagtcagctcatgggtctcggttgctcgaggtcaataggctcagaaactttcttctttttatgggtaatggttttcttttgccttttggaatgctccacctcagcatcggtaggaacccctgggttggttctgttgggttttatgccc

SEQ ID NO: 395542 - DNA, 1098 bp, Cannabis indica
cttcattttcttcatttttcatcagcaccaaaccacaaaacccttgtcgtccaccaccaaacaacccccatttcatcgtttttctaccatttcactcattttttaaaatttttcattttgcatacttaaaaatatatcatcgatgtttgatcattctttttttagtttttcagtataaatcgagcttagagggggtggttgtagctccgaccactagatttggtgtagaaattgttgaatctcaacgtccattaaggtataaatctaatctctaataattttataggatttttagcttgttaagattttattcttggagttgtgtggtagtggccgaattttggttggtattggtggtcaaatttcagtaataaggtaaatctaagctttaaattgttttgttataattttttttggattggaataattttttattagtgtttgtgttacatattgttttgttacaaattatttttttaatttaatattaatactttaaatattaagatgaaaagaaaaattgagaatgagataggagagtattaatataacagtttagaaattaggttctaaaaaatttatttatgagatataatttattatatatgtatatgtaatcttttttttcaaaaataaatgtaaacataagatgagaaaaaaaaaattgaatcttttatttatttttttattttaactttttttattagctagtaactaatagttagttacacctactaactagttactaatttttattcctattggtgtatttttattactatatggttactaattttacttagtaactaattagtaataaattactaacttaactaattagtaataaattaattatttagtgactagttactcataaatgatataattagtaagtagttaaataattaacattttaattttatagtattttttaaattgtaggttgtgaggttaatttttaaggattcaaattatttggagttgatccatttttagctactaaaggtatagatttattaacttttgttattaattaattatcagtacttataataatttgaatatcttaaatatttatccgtagtaaagtaggttctg

SEQ ID NO: 395543 - DNA, 606 bp, Cannabis indica
catacacaccacaaaaaataaactgaaagattgatgcttaaagagatagggatgcatagtaaaattttcaaaatagatatactcttatagatgggaacaaaagtggaggacaccaatttttcaaaaggtaatttgcagtcaaattttttagacttttaagttttgtacgttctaactattatactgaaaaaattatggcgatactctccaacctccattatcgtgttgctctgtactcattctatccgtttggtctattaagtgccaaagtagactaccaatatgtacacaagtatacacgtggaaaaatttcattggtctcataattttaataattgaaaattgaaaaaaaaattaaaatcagaattatttttaaaaaaaataattaaaatataaatattttttctttttcttcttcttcttcctcctggaaccaatatggttccttctcttctttccttctacatcttcttccattatcaccaccataatcgttgacctccgaagcctgaatacctaaaccaaaaccccaaataaccaccttatagaagactcgtcccctccctctgtaacacgctaactagcataagcgtattacgtgatttt

SEQ ID NO: 395544 - DNA, 1214 bp, Cannabis indica
aaaacaaaaaaaaaaaaagtaaggtttcttccacacatcccaaatcagtttttttttttaaaagaaaaattcgtgattatgtggccgattctaaactctaccatggacaggcttttaatatatatatattgaaggctccaatttttttaaaataccacgtgatatatataacaatttgcatttttacgttggttccctacaaagtcagggccgggtctgcgttgaacttcgccaacgtcacaatgaaaacggtatctaaacacttcaacaccctctttcgagagcccactcgttttgatcccataagtttttttttttattttttgaaagatgatcacattttacttatcgatttgtatattgattcaatgatttttggctttcggatttccattcacggtggaatatagaggagaatgacaaaatgaagatggaggatacagaggacgatcctctttagagcatctccaatatggtaaaatgttaaaaggtttttcggtgaggtgtacatttgcaaaatattgagatgcttaaagagaaaaatatctaaaaatttacatggatgtaatgttatattattggtgctattatttttttaaaaattaaagttaaaaaattattacaaatatatattaaataataatgagtgaaatcattatagtgtttttaaagaattctatatattaaaatatttttaaaagtaaatagataaaataaaatattatatttttaaataatatttaaatttttagcattttattttaaataatgcattggagatagtttttatatatctctattaaagttgtaaacgttgttcattgcaaaaaaagaaagttccacgtttttcaacaatgaaacgcttcactacacgtggaagtaaaagaaaaaggatataatgcctgtaaatggtatgagaggtagggctgaacatcgggcgggtttaccgggtttcgggttggctggtttcgggttcacgggtttcgggttcaaaaaattgaaaccgaacccggacccgaatagggcatgggttggcgggttggcgggttggcgggtcacgggttggcgggtttcggttggtcgggtttagcgggttggcgggttgacccggtcaactcagtcaactcggtcaactctttaaaaaaattaattttttattcaaataattatttttttttatttctttatttattaaattaagcatatataatata

SEQ ID NO: 395545 - DNA, 605 bp, Cannabis indica
aaatatggatagccgtaaccaaaacgatggctaggatggttgaaacaaagcttgtcgagtttgttgatggcctcacaacaatcttgaccaatttcaatttttttgtggaaaaaacctgaaatagcttctggcctacaaattgtttttgcttgaattattgatgaaatacaagtaatcttcttatcatctcttttcgaagaaggtggtgacggtacttggtggtgatgatggtgatggtgatggtgatgtttgggagatgggtttggagtttttgatgatggtggtgagggaggcaccgttggtggggatgataactttggtgatgacccaagcaccggtggtggtgatgatggtgttgttggatgaggcgcagatactgatggtgatgatggtactggagacactattggttttgttggaggtgatggtgctgtaggggaaggcatagctactgatggtgttggaggcacaagtactgttggttctgttggaggcgatggcgatgcagcatggaataatgggggaggtacagacactgatggtggtggtgatgtagtatctgacgatgggggaggcatagatactgatggtgatgatgttggaga

SEQ ID NO: 395546 - DNA, 775 bp, Cannabis indica
ataagaacttttaaaattctatagtaatatttttagagaaaagaaagaataatataaagtatttaatattatgtgaaggggaagaaaagaaaattgatacacatattcagttttaattaattaatagataatattcccaatttagaaaagtttaaaaggtttttgtgctacactgtacatgaccattttcagtataatttgttcataatctttatattacatataattccctatttaagttactacctaataaagataccaaaagccgttattaacaaaaagtgaaaattctataaattttcttttagaaaaattattctttttaaaatttttaaaagagacaactcaaggcacagttctcttgccaccaccaaaaaaaataaaagaaaagcacctctaaattagaggcatatgtcactttgcatagtgtacattagaaactcttaaattaaaatagcatctccaatttatgactttttcttttctttatttaaattaattagtaaacaattcgatctgttataatttcttaaccaaacttttttgacgaaagagaggtcgaattgttatagcattttgatcaaactttttttacgaagaagggatcaaacaactataatttttgattacaaacctatctgacgggaaaggaaaattaaaagttataactcgcatataaaattgaatactaacggtttacgtgagctaggaaagtgctaaacgagacgtcacaaagtcttgataaaagtacttgaacctagaaaatggatagata

SEQ ID NO: 395547 - DNA, 565 bp, Cannabis indica
gtatactttttttcaattagattctatatttttagaaacaataataattgcacgttatttggtgacactagaaagtatttagaccaaaattgattttagagtgttaacttaagatttggccaactgacaagtcgaatgtaatatcgatgtttgccacgtgttacacaattagattaataaagtgaatgaatactggatttatagaggttcgaccctcttagttagcgggcaataatctactctcgttttagttgtatttgttatttatttcagcccttaataaaaccaaataactaaaaggaatgatgatatggcaagtgagaacttgacacatcaacatgtgttagtttagttagtttttcagttactctttgtaaaggcctaaccgaatgtggtgtttcctatctaaactcttgtcttttctatttagattagaacagttaagatagataggcagagagaatcacgtatagtgaggaagaatacttgttttagagagggaaacttatgaagcaatgaagaactaaagggttagaaaccaagggaagcaagatcgggcttcaag

SEQ ID NO: 395548 - DNA, 973 bp, Cannabis indica
cgaacaaacctcttttctttcatgaaatcatcaaattgcataaaatagaatttaacgaaaatcaaatgcaactgagttttaaaaaaactcatatcacctatatacatgttaagaattaggattgttgtacccccagaatgttgttgagaaaagtacatacctgcattccatcatctaaaatggcaacaccaatttcttcggatccaaaatgacttggtccttttgcaccaacccaaagtctttcagagactgtactgggatcaacataaccatatttttcaaagaaagaagaagcagtggctgccctatttgcaccaactccaatacgcacaggtcttcctaaaagatgtctttggagcattttagtttcatccccaccagcataaccctgaataataaatatttatagacaattagcccattagacttgagttaacctaattttaggcctttaaataatctaagtgactctactttttgtcagactttcagaaatatcctagattaggcattcctaaactatgtgatagacctccgttgacttatatgctaggaagaataggaagtgtacgggtggtggggatgcagcagagaataattctgctgtgtagtaattctgttatgggggttttgtttgggtaaagctgaggtgcacagcaggcctcttgaggtttagctatagataaggattgtttttctttgtaagcttttgtctagcattttatgagagttgtaactctttgacaggagggaccaggctctcgaatacctggggttataataaatacagattgcattttcatctactattgctccttttatttctcttgctgctgaaattaattttgacaggaaaattcctatcaaattggtatcagagcactcacttttgatgggacccaagaaggattcagcgatagaagttttggaagatgtagagaatggtgaatagaattatatgttgtattccata

SEQ ID NO: 395549 - DNA, 737 bp, Cannabis indica
aagaaagaaaaaaactttatagatagtatgtaaaaggtgcagaatcaatcacatacacaatttacatgaactcaacaaatattagataaagaaatattaaattacattaaatcataatagagtttcaagagagttaattagaaaacctaaataagaatttagtttattcttatgcctaaatcacacataaacataacattaaacataaatcaaaaagaaaagacaaaagatgaaagaaaagaactttaggttttatctcaactagtctccaccttcgcaatctgatgaaaagtgtcttgcttattcatataaaaatgattaaaatctttcctaattttggaacaaaaatttccccaattatgaacgattcatcgcattgtagtgttactttggagtgttagtgcaccttctgaaagctaagaatagtggttttgtaaagagcgttagggtctattttttagtactcaggtatgcagcataagtattttaatgtgatcatcatattgatcccaaggattctcatataacacacattaaatcagaaagcaatagtaatagaaaagatagctctcgatgcctatcaaatatccttgcttttttttttttcgtatcgatcctcctatccaacaggaaaaaaaaggtaaatactattttggaccctctgctttacaaaagttatcaattggaccttgtgttttgttaaataacaaaatggaccttgtattttttaaaatagt

SEQ ID NO: 395550 - DNA, 610 bp, Cannabis indica
aaatatgtatttttaaacattttaaggtaaccaccaactagcttattacaaattcttagcaattcaaacaaaaaaaatgtcaagaaaatttgcacgaaaagttacttaaaattaggctttgttttacgattttttttttacgttttattagattctgtttttcacttttttttttcaagaaaaaaatattagttctcgtagtagcaacatgaaaacaatgaaaaaacaacctttcgtatttttgtaaaaaaaactataaatccgtaaaatgtaaattttgtcattatttagtatttataaaataattctaaaatataaccaagataaaatatcaaatcaaactatattaaataaatatatatttaattttttttttgtacatacttttttgagttgatgtacaagtgatttgtagttgcttttaagtttgttctaatttgataagattatttgtttgtgtgtgtgtgtgttttatattaacccaatttgttgatttataataatttttcatattaaatcagggttgttatctcattgttatttagttgttcaaccaagaaaaaattagtatatatttaattttctataggtatgtatatttttgagttgg

SEQ ID NO: 395551 - DNA, 890 bp, Cannabis indica
tcaaaatatcatacacactaacatgacaaatcaatccataacaaaaactctacaaatattacaatccattaacaaaatacgtacccaaaaactatacacatctatatatcaggcaattttggacataagtgggctaggtttatgcctaaggcacacttagcctagggaccaaaaaaaagtttgaccccttttaaaataatatatttttttttttactaattttaaaaaatactacatttttctctgataaggcttgttttttatttctgttacttagaaaatattgtatgaataatgtatgattgttctgtgaaatgatttgattaggttttggtggggtttgagaagttgaaactcgaggtttcccgttcttgtgaaaaatggtagaccatttttggagcagaaaaaaatagctgtcgtttttggttttttgaaaggatcaaattttgtattttgaccataacttttcactttggtatctattttagacgttctatgtacccttttaaatcttgcggcaaactctacaatatggtatatattttagacctaaggtataagttttactttaggatgtttatactacgaagtttggtagaaaaacatatattgttttatgcaagtgtaggcagtgtttagaatagatacgtattggtttaccattgttgcaacatagggataagattatcaagaattttctctacagccgatatgcatgaatctggattaaaggtaagaaaaatatatatgtaccacatggcatgccagatacgattaagatcgtttgtgagttagttgattatgaaagcagcgagacagtcattacccttatgagaacaaggtgatggtcattacatttatgagaacaaggtgacggtcattactgttat

SEQ ID NO: 395552 - DNA, 538 bp, Cannabis indica
gccttgacctctatcatggtcaatgattcttttccatatagaatagtatctacaaaatattcataggactttggcaatgagttgagtaataagataccttgatcttcatcttctattttcactcttatgttactgagatacaagatggttcaattgaactcatcaagatattttatgagttctcttgaatcttccatcttgagtgtgtacaacttcattttcaagtacagtttgtttgcaagggatttcttcagataaattcaggctaatttctcccatagacccaatgctatttcttcatttgacgattctctcagcacttcatctcccaaactcagcaagatagaactatgtgcttttgtttcaatttcattgatcttcttcttgtcattttccaattcttttaattctttcttgtaaatggcttgatagactccctagtgaaccagaaatactttcatgtaattgttagcccaagatatgtttccaagaggggggtgaattggaaatttaaactaatttcggaaaattaaaactt

SEQ ID NO: 395553 - DNA, 740 bp, Cannabis indica
agagagagagagagattaggtgagaaaccaaacctggtgtgagcgacgagggttgtggtcatctcggggtagaggtcgtgatatgctaccaactcaccgtcgaatatcgtggttgaggcggttgtaatgagggtacgtgcgcaagagagaagcgagatatatagagagaaatagttaattgaatgaaggggggctactgcgtgagagttaggtttattaggtttttaagtgtattgggctgaagcccataattggttttttttttttcataaatgcattttttacgttggttgtgcactgacgcaagttagcgtcggtacaaaaccgacgcaatttagtgccaaaactgacgcaaacacagcgtctattctcaatcgatgcaaatttcgcccattaattttttttatgtcggttttgtaattttaatgacgttaaaaccgaccaaaaattggttttttgtattagtgaagctttcctcttcttcaagagaaacaacgagtgcataattagggtttcttgcataaatactgtaaaaacatcaaatacgtctttaatgactaatacactaactcatggactaaggctcattaacgtctggaccacgtaaaaatctccatctcatttattactatatttaattatttcttaggcacttattactgtatattagtttctgaaaattttagtaaataattactattttaacttatttataattgataaattcatatcttattatt

SEQ ID NO: 395554 - DNA, 1243 bp, Cannabis indica
atgggacaggtgatttttttccacaatgaacaactttcataatgtcaaacatgacattcgaaagaatcccacaataaagttaaattggaaaatttgtaagtgtacgcgtcaagaaatttacgaatttttcaaaacaggtcaaagacttacactagaaattggcacacattgactgaatgtccctaatgaagtcaaaggcagagacgaaagcttttaattgctttgataccatgttagaatttaaaagtgtgtagttaagatgtataaaatttcatctcaaaacaaattgacaatgaaaaaagtaattcatagatctttaaaacctttatatccgactctctaaaaattaattggaaatgataatcacaatattgtggaaagagtggcaaagaaaaaataactacgtccatatataatatctaggagctggagacatggccaggactgttcattggcctctagattatttggacatgtatcaaaaggcaatgggaagccttagagatcttcggtatcgaaggttggccctaattcaaatatcttcttcggtaggcgtgttcgcattcctagctcactttgttaaaattcaggaagatgtagcgctttaaaattcaaataatttcaaattaagaatgggtgttgttatttacaacaatatagcacggtgtatatagcctcagaaactcttgatcccattgtggtagaagcaaaggcttttaaatatggactgctgctaattttacggttgggtacaaggagactactttgttttcaaactgttatgatggtgtgatctactactactagattgttgttcttattaattagacagtgcagtcaaagagattatgcatttgaagagctcgttcagcgcaatctacttcagccattattgcagcaggaggtctaaatttaagagctcattccattgcaaagtacgctttgtccagtaatttagctataatttgattttttgggaattccaattttcaagtctttttaaacattgttttgttggttgtcccattaacagcaactaactaactgttatattatttatagtaatataatatatagattaaatatgtgtaataaactaataatatgtaacatatgacaatgtatattaattgtcatctttttgtaacatttgggagttacttgttactatgagtaacctccaccatcatcaccaacattaagagtgtaaaaagatgttacacatcttaatttgaaattctta

SEQ ID NO: 395555 - DNA, 540 bp, Cannabis indica
gaaagaatttaaaggattttatttgggtttcactcagttattaagctctgaaattagctttgtgaagcttgtgtttgacttgattttataagtgttggaagtagaattttatgaaattaagctcaagttggagctttgatttttttcatgttgtgtaatctggaatttttagggtatttggtggattttgatgcatgttatatgtattttaatgccctttattaattttggtaatttgttggctataactttgacttatatgttaatttggggtgaaatggttgtgtttggctgctgaaattcgaagtaagcttgctggtttcgtgggtttggaacccaggtgccgcggcatggctttcgcatgtcgtggttcgcccctttggatgagacctgggagttggtcccaggtgccgcagcatggcttttgcatgccgtagcctgccctcgagtttctgggctatttcaagtgttgactttaaaaatgcattactttgtgatccgaactccgttttggaagttctatataccgttggaaagctc

SEQ ID NO: 395556 - DNA, 1189 bp, Cannabis indica
tccataagaacctgagacactcagaattaaaacttacatacatacatttctaaacttatgcagttgggcctacgaaggctggcctgagtagaaaggagacaccaaagtaaagatggagcccatagagagtcgatctagaggttcctgggggccggtgaacccggtggtggaattcgattacgtcgtcggcgaggagaggcagttccgttccatcggcgtgggtgtgagagagagaaatagatggaaattgtttgttttaggttttctctaacttgtcttctcaaatcatgcgctgtctgacgggtgggtacgtgggcgggtccaacccgtacccactaacaaaaaaaagttattaatttattattattattttagtaaaaatcttattagattttatattttgtaagagctattaattagattatttattttgttaattgacaaatgtaatttttttattttttaaaatagtatcttgaactaattttttttgtaaaataaaacttagttatatcaataaaaatttataaaataaaagtgttatgaaaaaatttgttacgtttttttacatttattcatgctacaaattatcttcaagttagttatatcaataaaaaattattgaaattgagctcaaaatcctatttgtactatttaaaaaaaaatataaatccatattgttatttaacaaaacaaatagttcaatcagtaatttttgcaaaactcaaaatctaaaataatattaatccttattattgattattttttatataaaaaaaattacactaaatataatttttatccaattaatagcaactaaataatttttatttatttattgttttcaaaaaaaaaatatttatttgtttattttatgtatagaattgtgatttttagtgacagttttatttttaaatttttttaatcacaaaaataaaaatactattttattttgaaaattaactttttttttaattttaacaaaggccaccaatactttggtagtgttgaattttgggaaaattacacataccactgacttttttcttttttttacttttatactgttaggcggtataatttatatttatattgtatagtttataacttttatacgttgggcttcagatgtattttcttgtcactttaaaatgtgttttttttttaattataaaagttgatgggaaaa

SEQ ID NO: 395557 - DNA, 617 bp, Cannabis indica
ggctccggccatctttctcatcccttcttcggtttcgcgttcaagtaagtctcgtgttgaagacttcaatctacagttttttggatatatgtttcaaagctctaaattatcatcaaaactttttctttttctaatacttcacaaacaatagttcatttagttcagatttagatatgatcacgacggagcttgtgttgtgatactggtttttctaatttgtgttacattacctcaactgggtatgttcttactgctcatgtatgcatatccaatttctttttttgttctgttctgttctttatgaaaggtcatgttatatcattggtttctttctgttttgaatccatttgaataatttggttaatgtagttagaaggaaaccaatagtacataaattgacttggaattcctggtttggggttgaaatgctaatattagctcttgacattgcattctcttttagttggttaaacatttaaaataattacctgtttgcttggtagctgatattgttacttgtttttctctaactggtgaggaggaaggattcaagctgtttttcttcaaataaaatgctttactgcactgattcgtggttatattttgatttatttgta

SEQ ID NO: 395558 - DNA, 696 bp, Cannabis indica
ttatttgccgatgtgggacatttttcagtgaagtctattcgaataagcacttgttttataacttacccagctattattttagcctatgctggacaatctgcttttcttcgcaagcatcctgatcttgtttcagatattttttacaagtcaattccaggtcaaaagaacagcagatcgacttaagcaattttctttcttctgaattctaatagtgaataattaattaaaaattgtgtttgtatatttttgtttaggtcctatgtactggccaatgtttgtggtggctatattggcagcaatcatagctagtcaatcattgatttctggaacattttcaatagtccaacaatctctttctatgggatgttttccacgtgtgaagattattcacacttcggctactcataaaggacaagtttatattccagaaatcaattatcttctcatgttggcttgtgttgctgttactttaggattcaaaactggtgtacaactcggcaatgcctacggtactacatataaatgctctattattactaaagatatacatgtactatctactatgtatagagctaaataatactcacagaactttgtatggtataggtatcctttggcttagttttctgtaaactatttttagggttttagtataaaaaataaaaaaaaataataattaattaaaagacttaaaaa

SEQ ID NO: 395559 - DNA, 704 bp, Cannabis indica
aagtttcatccgatgtgcaaaagactaaagttgattagtctttgttttgcggatgatcttattctcttcagcaaggggaatcctgaggcagtccaccatctcaaagttgctttggaaagtttctcggaggtcacaggattgatcccgaataaggaaaaatctttagtttattttgggggagtttcttctggtgataaagctgagatgttggaagatttacaattcagagagggatcctttcctctcaagtatctaggagtgcctcttagaccaactaaatggaagagagaaaattgtgacactatcctgaagaagattaaattgcggctgaacacctaggcaacgagacatctctcctatgctggctgaattcaactaattcattcggtgcttttggggcttcacaattattggatgagcatttttatactggctcaaagtgtgatcacagaaatagaaaggctctatcggggtttcctttggagatccaaggatgggaaaagcaagatccacttggcttcttgggaaaaggtatgtcttcctaaaccttttggtggtcttggctgtaaaaatggagctaattggaatagatatattatggggaaagtttgtttgggctctcatgaataagatggacattctttgggttaaatggctaaatatatatatatatatatatgaaggtgctgattttgggagtatga

SEQ ID NO: 395560 - DNA, 1105 bp, Cannabis indica
gtagtagagagagagagagagagagagagagagagagagagagagagagagagagagagagagagagaacattgtgatatcaattcataataaaattctcaatttggtaattttatactctggttgttgcatagtctaatggtgttctaatgatcaaactagaaacaaaaaagacaaaacaaatattataagtatttgtttgtgtttattctatgaatgggattatgggagtctttacaatgttgagcgatgtataaattgacatattggttggaatataattaaagaaggtagttgagctaattaaattaagagggtagagagagatttaaagatagataagaaagggaatattatgatgagtgattgataattgatatcatatctaagagaaaaaaaatcaatttgaagatttaggtctttattttctaattgaatattgacactttaacataaaaaaaaattgaaaaaaaaaacctaattatagaaaagggttttctcatttgtactttccaaataaaacaaatatcgtaagactagaaaaaaaaaattaaaaagagggtatatgggtgattccccttataaaaatcattcaaattaataaatatatataaaaaaaatacaaataattgcaagattattatatataagaaaattatttgatagtaactacttttaatcactatataattatttttaatttttcaccatgtgaatttgtaatttttgcatatggttgtgtataatatacactcttccacgtgtaacctcttcatctctaaccatcctctctatatttaattaaattttagttaaaatagttaaaatgttaaaataaagaaccattgctacaatctgttgcccctgattttgcccaatatacgtggaccaactagacagggacacgtggatcagagcgtcttaatgctataattatttgctaagtctttgtgatataaggcagcatccggaacgtgcctcccggagaaggcaagctgagccccatacgctcccggatgcccagctaatattaaggcatctccgcgaggtgtcaagcttcccctgagtagtcaattcgcatttaatgctgcatgggaggaagcgt

SEQ ID NO: 395561 - DNA, 553 bp, Cannabis indica
cacacacacacacacacatgcgtgtgcttttgtgcatcgccaaattaatgattatagattattattttttacatgagcaattttacttttatttacttatttaactatttattttcttttttcttacaggtgatttacagaacaccattctttcaatgagggatagtgcttatgggaccagtgtggcactagcagcatatgggcgtgttttgaagactcatactgctttgacttctgaatgtggttctatgcttgaagaggtctgtttcataccttatcactgttttcatggagtgtttgatttctatatgtattttaacagttacacatctcatgttctgtatttttttattttaaattatgttgattaaatgcttattaaatttaatttattggctttcgctaggaagtcgtcttccatattttgtctgtattgtgtgtgactgtttagttgcataggaagtgggttatcatcagtctcctcctcttgtttagggtttatgataaaatcttagcagagtatgttaccagaaagttatttgaagtccactta

SEQ ID NO: 395562 - DNA, 1156 bp, Cannabis indica
agagagagagagagagagtctcatggatggttgggggttgacggtcggagagcaaagctagggcgtcttatcaaaagagagaagagagaagatagataagagataagaggaagagagagaaatttgaatgggtgactggttggttgtaagagttttaggtttaggttatacttttttatgtatagtagggtttttgagtgtgaatgggccttgttttgtttcttttatctgttacatcagcttagaactggcgcgaaagatgaaaaagaaaaatatgttagtttaaaccaacgcaaagtggtatcaatcctaaactgatgaaattttttgatgtgatctttttgcgtcaattttgggcattgaccaatgtgtggaccgatgtaaaaagacaataattttgtagtagtatgtagacttagttatcttttgaaatgtttttgtaagcttctatttcttagaaaatgcattgtaactatctgatgaaatcccaaactctaggtggtcttcacatactcgaacattggaacattaaggattgtcagtgtttgcatatatcattcttcaccaagggtcttatgatgctttgatggaatcttggaacttggtctaagtttgagagactttaggcttccaaattatccaaaaatcgttaccctagttaatgtacatgagcaagggcataggatttggtgctcataacttgggattttgtttccttccttttgtattcatgagacatgggtaaagggtattcctttggtcattgctcgtgtaacttagtccttgatccaaactcaaatgaactaagggacatttggtgcctttgctcgcataaatttggcatttaatcccatcctacacgagaaatgttatcttggggatagtactcgtgtgctcgtgcaccttggtgtttgttaggggtatgcactcgagcaaggtcaaaccaagtgaccttgttcgagttacttcttatttttccaaaaaagggcgtgagcaatgccattcattgttgtgacagttagtagacctgtgatctgtaaggggaaataccgggtaagttgtacaatcccacatcgcctggggaaggtcatgtgtgatgattttgagactgtgtagacatgggactacacaattgaagagggcttaaatggattga

SEQ ID NO: 395563 - DNA, 670 bp, Cannabis indica
taaaccaagaatttcagttatataggcacactttatatagaatagatatatatatatatagaagtgacaaaattagcttatctattattagggttgtttcttctatatttttgagcatgaataataataataataattattataattattattattattatttaagacactaaaaattgttaaccaacaaaaacttgttttaaagccaagttgattgagatttagattgtaaacaaaaaaaaaaaactaaaaaagtaagaaaaattcaaatgaaaataaaaaattcaaatcgatcaaatttaaaaattgagatttttttgaaatttgtaaacctgcaaaagactcatattcttctttatcaaacgttcaattcaacattttgtccatatgattttctgtttataagagaaaacaaacaagaacaattactgataattttagtattttttttgggttcatcttcagctgtttcgaaaaaaattatcttcctttatgtttatggagtccgattctttattttaatattcaatatgaatgtctaatgacaatccataagagctgaggttgacattataatgacttgttccttggttatatttaatgattgctaatattgaattatttttttgaataagacaattcttggctggctgcatttaatgattgctaa

SEQ ID NO: 395564 - DNA, 1004 bp, Cannabis indica
gagagagagagagagaggaaagcaggaaggaaaacaaagaaaaagaagttcaagacaaaaaatatttttgcatcaaatttacgctcttaatagaagtactccctgaatttcaccttgtttggaaattcagtccttaagaattacaccttcttgtttatttttctcaaaattcttagtttttgaaagaaattattttaatttttcctatacaatgcgatgtgtataatgtttcgaaaaatatcaaattatccaaggagaaaaaaaaacttccaatttaccttaaaaatgaactaaaatgacttaattgcactgttttgaaattgaagaacttaattgtcaacaaaatatctcaactgactgaattttcaaacaacaaaaacttcagtggatggctgtgctataaaccctacaaagaaatatacctcttcatttagatgactgccaatgaggagaagattaccatctatgttaatgcttgtaattacaacctgaaaaaattatcacaattcagtcatcaaatactagattttgtttttcttaaaaaataagagataaaggtaacaccagaaataaaagaagtggatacataaattttcttgaaaaaattaaaatattattgtttgtgaaatatggtaaaggaattgtacaatttattcaaaggaatagtgtgtatttatatagagactaaataagaaactacctaaatacaattaaccctaatttttttacaaaccaatatacagctaattcaagctggaacatagatgttaatcatgcctagtttgttacaaagataatcaacctgcctccttttcaaagcctagcctttgtaaaaaaatatctcctaatttattgttctccagtctttacatattaggccgagattaaaccttctcatgaacaaaatgacaatcaatttcaatatgcttagttcgctcttggaacacagaaattgaggcaacatgaataacagcttgattatcacaccataattttgtatggaa

SEQ ID NO: 395565 - DNA, 1356 bp, Cannabis indica
tgccttgttagacgggctattgttgtagtgatatttaattttgttggaaaagttaatgcaaaaaactgctcataattgtgcaagtagattatcagtctcgttgtctccaggataaaataatacaatcgaagcactgtatcgaatctctattatacgataaaaaaccatcaaaatacaacacccaaaaatactgttgtttagattacatatcgtaatataaaattgtttattagatttttttctgtgagaaaaaaaaatatctttctcctgttagttttaatgcattatatagagaatacatagaaaaatatatcaggaagaaaatcattattttttctgatcttgggagattgaaatggatcatggctaaaaaatctaagcattttctccaaacaataaggtgtacatcacactaaccagttcggatcgatcagtggcgacgcgcgtctgtggtgttcaagtaaccctttgtgtgacttagtgatgggaatttgacttgcaggacaggtatccatgggtacccaacccgaatggggcgaagattacccgccttaattggtaatggagcgggggtggagtgcaattttatatacccgaagcggattcaggacggtatcgagagtgatactacctaccccatattcgacctagatatatagtttctaaacttatcatatagttttctaattattatgtattaaaattattgactatacttacaaagttaaccaataggtttccatacccaatatggattctcctaccctaaacccatcagggattaagcggggtgggagcgaggatggcggcataaatgagaattgaagaccggattaggaggtgcactagccccttattacccattcaatttccatcattttccacaaaagtgagtacctcttggtgccaacccaattactcacatctgcattatatatacacttataaaaaagtgttccaaagcaatgtgtgaatactcctgtacgaacatcaaataacaccttttcattttgtttaataattcatgaacaatgttccaacaatctaatctaagggacgagtctcttattgagagcgaccacttggtgagataatactccgtctgatttacatagatgacctctttaatgttgggacccttgtttgggggtttcctttgtactattattggtcattgagtcttagagcactcttaaatatttctatcacaaaaattttaatttatctattttatctcaaatttttataatacactatatagcaacttttctatttttttctatattatttaaatataatattttaatatatttattcattttatgaaaataaaacatataatattacacatatata

SEQ ID NO: 395566 - DNA, 1252 bp, Cannabis indica
gtaccgaccaaaatgtatgatatatgttagaataaaatgtgcatggcttttgaattaatttatttttaatattataattcggtacattttataatcactgataatggtacaaacaacatacaagtaatgtaaattacaaatcaagatagcatatattacaacaattgaaaagtagtaattactttaaatatatttggttgtattttgagtatttaatttttagttttcagaattgtgttttcaaccgtgagaacaaaaaataattttatttattattttaaaaatttaatagtatttgacttagattttttaaaactatttttagatttctttttactctacaccataccatgatatgaacctatctaatcccgaatcaaaccatcgaccaagacccgaacccagaactcggcttgaacctagacccagtcccgaaactgaacctaaactcgaactcaaacccagatctagacccagacccaaaacatgaactcagacctggacctaaaccccaaactccagaccccaggctcggaccccagacacgagctaggtccttggccagggtctaggtctggtttcggggttcaaggttcgcgtcctggtttgggtcaatttggggtccaggtgcgggtccagtttcgagtttcggattcgggttcaggtccgaggtcaggctccatatccaatttcggggttcgggtcagggtccgagtccaagtctgtgttctggggtgtgagtccgagtttagattcgggtctaggctctaggtctggggtccgaggacgggtccgggtccgggtaggagtccggtcagggtcagggcctgggttcgggtcaggtccgggtctggggtagaggtcaaggttagggtccatttccgagtttgtgtccggggtctaggtctagtccagttcattgtccgagttcggggtctgggtccatgttccggagtctgggtctaggtccagggaccagtgtttgggttcgggtccaaatctagggttcgatgtcagggtcgagattcggggtttgagattcgatgtccaggtctaaggccggagcgagggccgggtctgggtcgaagtctgagtctggggtccggggtctgggatccggggtccaagatctggggtctgtgttccatggtccgaatctagggtccgagcatgtgagcgaaaacataaaatataatatgttagaccaaaaaaaattgtttttgtataattgaaaactacattttgatgtttt

SEQ ID NO: 395567 - DNA, 925 bp, Cannabis indica
ggatcctgctagcaagatggtgtgtacgtcttggtcgttgtagactagaagtatgagagcaagctgttggtggattgggttggccaaggcaagaccatgtggccatccacattagagcatttcttggccatttgaaggaggctatggttggccaacttatggaagcagcggccagacagattgatgattttatggccaccctacctgctaaagtcatggttgcgtagccttctagaggcctggtcgatgctgctgttttatatcttttgcccttagttggccttgcccctagcgtaattgccttagagcctttgtgcacttctgtcaatagctatttagctccattcttggtaacacttcttagaggtggtgttgggataccgtgtttgtgtgttatgctgtgcacgattggacaccctacaaccatcccctaatccttgctttttggtaaggtttttgtttagaggtgtgctgctgtaggtgtatccatgttgattgtctagcatgcctattccttttgaaacaaagtacatagttctctaaagaactaggcaggtaccaagtttaccttggctgttaaggcataggtggctagttgagtgagtgtgtcggctgttgtgctttatttggggccttgccttctagtatagcctttgagctatcttaacttctctagcaggccatcatcttcttatattgagctgtatattcacctaaaacataacctacgagtagctgagagtcctggtgcatgtctaggtggttagcccatgcctcgtgtgctagcttggggccagcattcagagttcatgtttagcctcattgttagaagctttgtaactgaccttgttgcctcgtgcctcagttgcccccaggtgccttgggggccatgcttgcattggacaggtggtcaatgtgtacctct

SEQ ID NO: 395568 - DNA, 1085 bp, Cannabis indica
ctattcaatcttactaaaaacaacataaaaaaaatagacagactccaaaggctataaagcattaaaaaaattgaatcaatgacacacagtaagacaagaaactggctggacaaaaaacctaagattggaattcctatcaactaacatattagctgaatataaataaagctcgtaattttccatgtatatcagtgagaccttgttgtagagcaatatgtaattttcttttcttgaaacaaggcaaaggtcatgtcatgtacatgtgtgatcttctcttaaatatattgagagccctcgcttatggcggaggaagactggttacaaaacccgagtgtcgctaaacaaacaagttataccgcttggaaaattccagaaataaaactaaaattgcaataacacatatcaatctccaagtaaagcagaaaagtggatatctttaaaatcctttacattacgaagccaaagggctacgcaagatctgatcttatccaaaagattgtccgactgcatttacagcttctgtactaacttttaagcatactaatctacagcttaatgaaagcaaggaaaagcaaacaagaagctcatgaagcatagattgtactattttatctgggctacaaattttcattatagaacaacaaaaaaaaaacatctatgattccatcttattaaaaatagctcaggtagttaccgagaaatacaactatatatagtatacaataattagagggaagaaagattacctggaaaaatcttttgaaggtagaaaagaattgatattccatcttcattttccttttgcaactcagaagaactatatagtacagtctcactgtagtacggggtgaagacactattctcaagcacacacacaaaaaaaaaaaaagaattataatttcatgctgagaaaacgaaatacggcttataacaagaacaactaaactcatatgtaccagaaagggaccgatttcactaactaggcttggctgaaggcatgtccactaaatatgaattgtgaaaaactctaatcttcttcttgcttcaaggttctggtaagtattaagtctgtcagagtctttcgt

SEQ ID NO: 395569 - DNA, 566 bp, Cannabis indica
ttttttttacatttttatggattctattaatttacaggttttcacttgtatttttttttccaaaaaataacattgatttcaagttaattttctgtagcagcaatgtgaaaacaacgaaaatataaccctttgtaattttgtaaaaaaattatagatttgtgttttcataaatcttttgtcatttttaagtatttatgaaaatgagtttttaagcgactaaatcctcttaactgtcgtttcacttacatttaactttccaagctcaaattttgacgataaaaccctccaaactagtttggatggtaccttaaatttgctaacagttcataaatttggagggttttactatcaaaatttaaacttagagaattaagtgcaaggaggataatagttgagagaatttaactgcaaaaaactcaaatatccctagaaacacattgaatttttcttctttggctataaacaaaattgtattggttggtatctcaaatgatcaggcatgtagtttagtctcgaaattcttataactcatatattattaattagatcaattttttttttttttt

SEQ ID NO: 395570 - DNA, 1458 bp, Cannabis indica
tttttcttctgatatgtagatgagatgtaggatagcgcaagttgttgatcaagctggaagttagttacaaaatagttgtaactagcttctggttttggtcttgtggaggcaaagccacctacgtttaatcttgttttctgttatttatgttgtatgctgatgtggataaaatgtataaggattggttataagtggaatttactcaacaatttccacctgaattcctcttataaccaattttgatgtagtgttaatttatctctgagattcctagcttgataggtcctactcttagtctccagcgtcgattcttaataagttcatacaatgtttgaacttattaagagtcacaattatagtacccatgtctgctgggttgtcttcagtaggcaccttttccacttttacttcaccttaagtcactttatctcgtataaagtggtatttgatctttatgtgttttattctatcgtgaaacataggatttttgcatagaaatatgcagctttgactgtatgaatatactataggtacccctttaagtagcttaagttcagtcattagcccttttagccaagtagattccttgatagcttctgttgtggcaacatattcagcttctgttgttgagagtgccacaagaggttgtagctggactttacagctaacacaattccctccaagtaagaaaaaataggttaatctagatcttctgctgtctctgtctccaacatagtctgagtcactgcaaccttctattatagtacctacattctgtctcttatagaccagaactactttagttgtcccaagtaagtatctgaaaacccatgtcatggcctaccagtgaacttttcttggattttccatgtatttacagagcacactcatagcataacctagatcaggtcttgtgcttaccataagatacatgacgcaccctattacatttgaatagggtacatctttcatagcttcaacttctttttctgttttagggaattgttctttggataaagtatattggcttgttataggttgcttaacagtcttggcatccttcatagaaacttgtctaggattttctcaatgcaatcctcctatctaagtatcaactttcccttatctctgtctcttaagatagatattccaaggatcttggtagcattaccaagatctttaatttcaaattatatttttagtagatttttgaccatgtcaaccttagatctttcctggcttataataagcatgtcatctacataaaaaagtaggtagatgacatctattataaaacttcctttgtagtatagacaagtctcatgatagctccttttgaatccatgctttatcacaaaagcatcaaactttctattccattgtttgggggcctgtttgagtccatatagggacttaatcagcttaaagaccatttttctttgcctttaacttcaaacc

SEQ ID NO: 395571 - DNA, 1513 bp, Cannabis indica
gagagaaagaagaacaaaaaaaaatatgacaatatttttaataattttaaaacttaatttttttttttaaattttacaataaattttaaaatgattttttataactttgaagaattatattatgtatactaatataaaaatgacatgtgtataaagaaattcacgtaagaaatacatgttggtatttaactgagataaattgatgacaccttaaatttatgggtaaataccattttggaccctgtgttttgcaaaagttacagattggaccctgtgttttgttaaatgacaaaatggaccctgtattttctaaaatagtaaaaataggaccctgagcttaatttttgacaactttttttttaatacaaccaacttgaagacaatgcttaatacgaacagatacaaaaaatgtaaacagttttatcatagcacttttagatcggattataattaaactttattttgacaaaaaatcaattcagggtcctatttgtactattttagaaaatacagggtccattttatcatttaacaaaacacagggtccaattggtaacttttgtaaaacagagggtctaaaatggtatttaccctaaatttattaatgttttagtagtttgaaggattttaccaccaaaatttgagattaaaagattaaatgcaaatgaaataacagttgagagaatttaaccgtaaattactctaaaaaaattgaaaaaaataagttttgttttgttccctatctttttttcaatgaaattttctgttactacaattttcttccatcactcacaagtgaggcttattattaaattatagtgagtctaagacaaatcacccatattttttcttttttaaaaaagaataaataaaaaatcactcaaaaacatactaatcaaagaaagtaataatatatggtaagtttatcggaaagaaatgtgcatgtatgtgatgagcttaaaaagatttagttatgattatacatctcatctcaaccttaaatttgcttgttcaaacttcttagaaatgtggcataaatatgagtgtcaaatgacccaacatacattaatatgtatgtatactcaaatcccacattggcaaaatactttcttcctagtataacccttctctttttaagagcacaatacatatgcaattcattttatagaattcaaaattcaaaaagtcttgtggttttgcaaagaatggattatgataaaataataataatttattttatttttattattttttaaaaaaataatgattttgttggattctttttattttcctaaaatttcaattattgacattactttttagtcagacgaatcaaggaaacaaaacttaaactatatttggtataaaaagtaattttttattttacatcaatttttattattgtactttaatgtataattataaattttgatgaattatgttaattaatactcacttaataatttggctaattagtaattttttttccaaaattttgacatatactaaatca

SEQ ID NO: 395572 - DNA, 649 bp, Cannabis indica
aaaaaaaaaaaaaaaaaccagagccaagataggcttaccttggagggatatcctagagagatagatcaaaaaccccaataggtcaaaattttaaggaaaaaaaagtttaagaaaaagagggctgtatcgaaatctaaaaattatatatatgtatatataggaaaagggtacagatcatgaatgctaaaataaaattaaaaaaaaaaactcatagattcaagagtatgagaggcatgcatatctattttagagaaaaactttgttatagaaaacataacagaataaaaatgaaatagatgcttgaaacttacgtgtttggagaattaaggagccatcaatggtggaagaaactaagcgatgattctctaatggttctattaccctccatgacttctctttgttacaaaattagtgagaaagaaaatcgtaatatgtagatggtataagcgagagtgaaaggaaacaaaccccaaatgtaatttagttcttaaacagagaagaaaaccctaaaatgaagaagagtataagcgagatagtgaaaaaagaaaagttaaaaaacaatggcgcccaaaacttttagtagaccccgctctttttgttttgtttttgtttctttgtttttgtttttttttttatttttttgttaata

SEQ ID NO: 395573 - DNA, 527 bp, Cannabis indica
gaatattattcgaatcaaaagttataaggagaatcaattaagcatagctcatcaaataaatatggaaaacaataaataaaaataggcataattaaagttaagttagcatagtaatgcaacgacaacaaacgaaaaatcaaattacagtttttcttttttctttttgaaactacagtttagttacgtaaccattatatatatatatcatccatcatttaataataatgacctcataattcaattacattacattattccagtaagccgtggaatcacgcgcctgctcaagcgtgtgacaaacaagaattaacgaaagtgatcatatatgtatgagtggtatggtgggccggtgcgtggtgtattataataatttagattgtgttatgtgacaaacaacattttgactataataatttgctaagtattctataacattggaaaatttagtgcatgtttggcgtcataacttaaaaattattttttgtttttaaaaatagaaaattgttttttgaaaacaatttggcatg

SEQ ID NO: 395574 - DNA, 604 bp, Cannabis indica
aaaaaaaaaaaaaagcaaaaatgattgccgaacatgccgttaataacatatttatggcatgttatttaatgatatcactgtatttaaaatataaaatttaattagtaattgaccgtaaatgaaatgagaatcatttatttacataattaaaaaagataattaaaatattttaatttaactaaattgttaacttaataatatataattattttttatttataaatttttatgagcaaaattgtcttctcatttttaattaagaaaagaaatgacattctttataaaaataagggagaacctttccttcataataatattttattctgttcgtggtgcattgtggtggagatttctttcagactatcaaatgaatgatttgagtggtggagttcttcttaggactttactattggatgtttttcttagtcctcaagttgatactttgttgcctcctcggtgggttttgcctcaattggagatggtaaaaatcaatattgatgttgctcttgatgttaaaaaggattattgtggctttggtatgatggttcttgatgatagtagagcactataaaaatttttacttttagtcacaacaaaattcgtg

SEQ ID NO: 395575 - DNA, 1060 bp, Cannabis indica
tttgtgaaattcctcacggtccctcaatctttaacagtatcctagttgcttctcaatgaaaattaggtacattagtcattcataaccaaaattatgtaagaaaccattaataataagtgacaataaattaatatactcttgtcatatgtagaactttctcttaatttttgtagcttgaaaaatctttctttttcaactttggtagaaaaactaccaaaataggtttgatcaatattgcttaatattaaagcattggattgacattctcctaagtgaattatattttttaatctaaaaaagccttaaattactaaactaacttttttgcgtgttaattatcatatgtgtttctttgtcttctatgttgtgttttatgtctaaattctaagaatactttttgttttgtttattttaaagtattaaaattcattcaaatgaaatgactttcacatcattttaaaatacttgaatgtgtaacatgtaataagcattaaaaataaatatatgagttttgcatgctatggagaaaagagatctcaccattgctttatgcttgtgtatgtggtgctctaacatgaaaagagaggcatctctcttaatttgtgtattgtgtgctcttgttggaacttattttactaggatttaaatttattacatgtatgttgattatagaacaataatttaacatcctaaatatgaatttcttaaaacaatgaaataaacacatataaagttataaataaccttacattggtggcaagagaatataatgtctcctttcatttaaatctctaaccattgatccatcctgtcacagagtatgatcaagatctaaaccagaatctttttttgtcgttggaatcttcacaatcttccacaaaggcatgagtattggcttgaattatgtggcaattcctcatttcacttaagagtcaaaaatttcatgagaaaaggaagaggggtttcgaattctaagaggctctgtctttattttttaagtcgtataacaaagtagtttgataaaaggatgtagaaaataagagcatcttattctatttat

SEQ ID NO: 395576 - DNA, 1259 bp, Cannabis indica
attaaaaaaattaatcaaaaattgttctcttaataagcacaaaactagtacaataactcgaataaactaaatgtaaagaccgcttagttttaatttagaaattagcagatacttaaggtttaattgtggaaattggttattaactttgaattatttatttatgataatttatttgaatttaaaatgcattttatatgtcatatatagcatttcataattttgcatgttttgtacccggtaacattggaacatagtgtttggctattagaatcacatcctagtatttgtagtatagcggggcaatatagttagacattgggaatgtagggaatagttgagatattaaagttgacaaaaatacccctaagtgaccttttatgacttttagagtggtaagggcaaaatggtcgttttgccaatttatgatttgttttacatgggtttaattaggtttattaaatctgattttaagttttattgttggctgatatattaaataaaacaaaaaccttttattcatttatttttttacaaaaataagaaaattcaaggagagggttctctctctctctccttgtgcctctctttcgaaaccccatagaagcagctagggctactgtattttctcttccattcaagcttgttgcaacatagattgagtgttcttgagttctaggtaacctctttgcaactctatctttgatttcttgaattgtaagaaaaaaggattatgcatgcttttaagattttgattgttgtttttgctgaagttgtttgatattattttcagatgtttaattatgtttagatatgttgatttaagcttattttagtagatttacccaagttttgagttttagaactcaaacttggagctttaattgtgaaattcgattatgagcttgggtgctagttttattgcttggtttatgtctattggggtatattatgcaggtctggaaggtttggtaagatttggagtcgatttggttagggtttgaaattgtttggttttttgggggaaaactggctaaccggttttacatacctgtaaaattgggtaaccagtttttgcagcaggatttctcgaaaaattcaagttgttgactcgtgctagtttcaggtttctagttggttaattccctactagtttatggtatttccatattaagttgcagtagatagggttttggttttaaacctaagtctcgattgtgatttagtgtgtcacttatccatgttgttatcaatgtgattta

SEQ ID NO: 395577 - DNA, 678 bp, Cannabis indica
attattattattattattaacacataaataaaaacaaaaatatttttaaagctcataaattttaattaataaagtttgaacatacattttaaaaattaatggattttgagcttggtactatttgaaatattattacatttataagcataaaattaattgatgctcattttatttaatattttaatttgttatataatcaattggaattttctgctttcgaagtattttctggtacaattaatgattgtttggactttgaagatataattttcataaatagcaagcccaaattttcttttagtcaaatgagaaaacaaaaattgttatatctcaaaagtaaaaagttactttaatgtttggtttacctaaatttcaactttgtaacacaagtcaatactagataactttacaaacactacaagaaatgtcacttttaccagcacagttcgctactgcactagtaaaagtaacttttaccagcgcatttcgtaaactgtgctggcaaagaagtcaaaattttaccagcgtatatttgcagtggcaaaaatctaacttttaccagcgcatttacgtactgggaaaagtcatctttgccagcgctttttattttatgttggcaaaaattctaatagcaacattgatttgtcaacccccttttgccaacgcatcacaagtaaa

SEQ ID NO: 395578 - DNA, 932 bp, Cannabis indica
tcctatgcttattaaattcatgttctcatcaggtcaggtatgggctcgagtttggggtcgggttctatcctggattggtttgggatttgggtttggtcttgggtcagatctgggtccaggtcccgggtactgttatgtcccgttcaggacttgggtcccatctaggtttggggtttgggtctgagtgcgggtgcgggtttgagtttggtcttggttcgggtgtgagtgtggggtccgagtcttgggtcaggtctgggttcgggtccgtgttcggtccaggtcctgggtccgagtttggggtccaggtccaggtctcgggtaaggtcctagatcccgggtccaagtccgggtcttgagactgggttcgggtctcgagttgggtattggtctcgagtcggggccggagtccgggttgggttcgagtttggatccaggtcttgagtccagtcccagtcttggatctgggtttgggtttgggttgagtcccagatctgggttcggatcgagtttgggtctcaagtcgggtctcgagtccaagtcgggttcaggtttggatccggatctcgggtctgggttcaggttcaaatctgggtccaggtccgtgtttgggtcgagtcccagatctgggttcgggtcgagttccagatccgcgttcgggtcagggttctagtttaggtccaggtctcaggatatgggttgaagattggggttgaacctggactttttgtaaatattataatacaagttaatacagactatttgttatgttaaataatacaacttacattgtattaaaatttttggtcgtaaaaattaatacattatattattttatccaaacataatattatttaatatttaatataatacaaccctaaagatgtcggtgaagtatctttggccaatgacatgcgtgttgggttttatgccct

SEQ ID NO: 395579 - DNA, 679 bp, Cannabis indica
ttgtaatcaatgcatgtagaactcaattctaattacaacataagtctataacctgatacatatcatagaaagtattgttggttatattgtacaactccttaaatttgattatgatcttgcaatgttgtcacttcatgtttggtacaaccttagaaagggaaaatggtcgaacctcttcacaatttgggagggaggatgtattttcggaaacttctataatacacctcattaaaggtatattctcattgacctttgtctgtttcgacatatagaaaatattttagtcgatttttttgtaaaaacttagaattacctgtaaatttttaaaaaattttgaatagtttacaatactaaaaacaaggtttaaattgttacttactactcgtataagaaaaataattacaactgcaataatacatttaaactttattttcagcattgtaaagtatttataatttttttaaaatttacaaacggtcttaaataactataaaatacacaattattaataaaatttggaccaaaagtctagtctatagatgtcaaaacaaataagtggtctaacaaaataaccctttaaggagtgtactatagatatacctagaattatttaggagattaaaaatagtcaatttacaggtgattttaaatagttataacacacacgagatactaaaaa

SEQ ID NO: 395580 - DNA, 946 bp, Cannabis indica
tttttaaaaaaaattagtgttttatagatagaaaaactaaaagttagattttatggttattacaattgataaagtctaatataaaagagagatgaatcatgtgggtaatattattagtagatttccatttaattatattataagttgtaaaattacaaactcgaagaataaacgaaaaattacagtttaacataaaagtagaaaaatgtttacaataatccacatagttattaattctctaactagaataggatccttttagagtcttgatatttgtctcggagtcactcccaatcatcacaaaagggtgttgaaacgaaatggccgccttcatggctactagacaggctgcagcttctccaatgaggggatcagagaagttaagcctgtttgtagccaccataaaatcgactccgtgtgatccctagccaaagccacaacgcacatggattagcacctacctctcaaatcacagttgatcttaacccaatcatcaggcggaggggaccaaacaagagactcgacagcttttaatgaagcaaataaacaagacatattttctgcgtaacagatagagatagagtcaatacaattttaaatgtaactcagtaaattattgtgtaccttatcgttgcgagccctccaaatggtatctacaacaatcgaggcatagagaaataacttgtcaacatcaacccccttagattttagatgccacaagaatttaatccaaactcaaatccgaacgccataatccaaaattagcatcactccccaaggaactccccaagaagatgatcgccaaaagtgaaaagcaaagttgcagtcgaggaaaagatgatccatcgtttcctcattctccccacaaagagaacaagatgttggattaaaatcctattgtgggcacatatgtataatgtatatgctattataaagtgtgatacaa

SEQ ID NO: 395581 - DNA, 626 bp, Cannabis indica
aaaaaactaattttaataattatatattattttatttcttagcagaaaaaaaaaattatattacataagttacaatattcattaactaataaatttgattatatatgcacacaatttatgtaaaattatatttttataagataataatttttttatctaaaaaaataatttaattaacatggattttgatatattttgtaggagagcatagtaagcatggctgtggctggtgccataataggagctgccattggaggatggcttaatgaccgttacgggaggagaactgctcttctcgtagcggatttcctctttttcgttggagcagtggtgatggcctctgctccaaacccgacccttcttattgtgggtcgggttttcgtaggtcttggggtaggtatggcatccatgacagctcccttgtacatttcagaggcctctcctgctaagattagaggtgcccttgttagtaccaatgcatttctcataactggtggccagttcttgtcttacctcatcaatttgggattcacaaatgtaagattaattattaatataattattttttttaaggagaattaaatttatatcattttttaacttttttttctttaaatttacagttt

SEQ ID NO: 395582 - DNA, 1421 bp, Cannabis indica
gcaaaaacatggttcatgtattgcttttgtttttttttttctatgttatattatttatataaaatatatatatatatatatatatatatatttcaagttgtttgtttctgctacatttcatttcatgctgatatattattgcatgatttttttttatgctgcatttccatcagtgaggcatgactcatgcatgtgaaggagttgttcagcttctcttctcaatgtaaacggcgagtggtgatgaactctgctgattctctttcaactcaagaaagaaatgaaccaaaataatataagcttatcttgtttgttgtattcaaaatcttgacttgtgatttcccagacttgtttttttgtttaaaattttagagtgaaaacaattgtctctacatgtactaattatcatataaaaatataatcataattattgttaaaatcccaagaactttgattatgcgttggaaatattctgatgatgggttttttgaattttaagatgaaaatgttgtggttttattagttttgctaatactactattgggaatctcaagaacttaggtaactttaattagcattagttggctctaaaactgtgcgtggcattcatgtgtaaccagccattaatacggcctagtgttcttatttacttgggttaataaacacaccttgttattttgtgcagctttctcgagtaattcttgtgaataaaaagtcaaccttcttaattatttactaggacaaaactaataaaatcactccagtaacttttgcatgccttgaaacaaaatatacaaatgttggaatcgtaggtcttgtttgaaccatttgattgataaaataataaaaaaaaaggaaaaaaaaaaaaacagttattggaaaagaattaagaatatattgggaaagaaggaacaagttttttttttttttcaaaaaaataatattaactaaaattgtaatatacgatagaattaaattttggggtttttttaataatatactaaaaattgattttatttatgaaaatacctttaaggaaattatttgcacaaataccgatgtgccacatcagcatctataccagaattcaaaacaaataccgaaaatggaaaaaattgaaaaaatctcgttttcaagtattttcacgttttgagagttttgaaaaaagaaaccatttagttgcttttaatggaaataagatttaattggttactttttcattaaaaaatttattttaaaattttacacatatataaataataaaataattattttaatatgtgagaaaatatatttttttgtctccaaaaaataacgattaatattaaaagtaactttaatgtttcttttttattttttgttaataaaaataataaaactttaaacttaataatattcaacatatcaaataatatcataaatta

SEQ ID NO: 395583 - DNA, 787 bp, Cannabis indica
cccctttgtgctcaatgttcaactcttttaggatagacaaaagtcaaataatttcacaagttgtattgtccattgcttaatattcaacctctgcagaggacctagaaacagtgtgatgtttcttacatttccatgagatgattgaatctctaattaagatgcaaaaccctgttgttgatctccttgtatttggataggcagcccaatccgacttagtataagcctaaattttgacttcaaatgtagctggaaggaaaatgccttagccaggagtttgtttaatatatttcagaaccctttgtactgcatgaagatgactagctcttagtgtggccagaaattgactcagtttattgactgagtatgaaatgtctggccttgttattttccccacaatccttctatttaaggttggatctgccaacttttccttctcatcttggccaagtctaagattagcttccataggtgtgctcattagttcacaaccaaggtcctccaatagttgtagtgcatatggtctttgggagacaaaaattctcttatctcatcgagcaacttcctgtcttaggaagtatttcaactgtcccaaatcttttagcttgaatttatcattcaaccttagttatagagcttcaagctcttgagcattatgttgggttttatgccctatataaaacccatttcaatgtaatcagatttacttattaataaagatcaaaaatgaaattttatgttgcatggttcacatgatttatttcatgattatatatataatgtatgaatt

SEQ ID NO: 395584 - DNA, 373 bp, Cannabis indica
atcatttttcttaccattattgttataattatatctttttatgtttttttgacatctaaacttgaatccatctctatggttacgacaaaaaatgcaatactaacactttatgattgattaacgatatttttgttacaccaataaaaatatgacatcagaagtagtaggcgtcaataatatttttttaataattctaaagtctgtaatattattttgacaattttctttagggacaagatattattattaaagccggtaagggcaaatccaacactagctaccttctagctacgttaatagactctatttttattttttaattataatactcttaacccatcagaaaaaaaaaaaaaaaaaaaacaaaaagtag

SEQ ID NO: 395585 - DNA, 1068 bp, Cannabis indica
tacacaataagaactgaaaagtaaatgatacacaaaattttatagaggttcgacccacttagttagcgagtaatgacctactccccttttggttgtattaatgccagagataatatcacttagatcacaagtgttgtggaatctgaagtggctctcttaagattaattaaaatgtgagaatcaagttggcaaatctcaagtaagagagagagtatgcctatggcgtgtgagagagaagagagagagagagagagagttgagttttaaacctagaacttgagaactttagtcatcttagagacttaggttcttagagaactagggttagactaatactttttatatatgaagataataacctaatatccctaagaaataggagctatataatattatttacatagtaaaataatagaagtaagtaggttaattatccctcaagaataggggaatagatgatatttctcccctatttttgtgggttgttgaagcccgaatcgcagcttggcttgttgtcccagatgaagattgcgcaccaagtgcctaccaaaagcaggctggggtaatttggtaggccatgtgcttgccagggtctagtcatccatgcttctgtcagggtttagccggccatatgtttctgccaaggtctggtaggtcatattactgccagggtctggtcggcaatgttcctgccagggtctggcaggtcaagtgactaacaactttggcaagtgttggccagccttagtaggtgttggccacccttagcatgtgttggccaacctttgtacaactttccctgcgaaggacaggcttccttggtcaaacaggcctcttctgggtctgacagtcacctttagctggccaacttgtgctcaaaccgtgtccggcaatacaaactcctcctggccagcctatgtacaccctctggtcagctagacatggttgtccaacttcttgatggctcgcttaacccctcacgcttgttgcttgcgggtttgccataacttgttaggagactttgtccagctattgataaggttgcattcaacgtgtcctcagtcttgg

SEQ ID NO: 395586 - DNA, 2589 bp, Cannabis indica
gaggtgactgtgtcatcatctgcatcattactagtgggatatttggcggcggtgactgtgacatcatctgcatgaatgtctgaaacatctgaaattattgaaattgttgagccatttgttcaggaagtttttgaggctgctgtaacggctgctgcaatggttattgtaacaactgttgaaatgaaagtggagccccctgcgactgttgatgcttaaatcccattggctgagaagatgaaccaaatccatctccaggcatataaaagcgagacagttgtggacgcgttggttgcgttggttgcgttggttgcgttagagaaacgtcactcatctctttctccacatgtgcatgttgttcagatgtcaatacttgtgtcatcgcctgaatatgtctttgcagatgaaataccgtttggcttaagtcaggttgttcatgcagcaaattgtgagcatcgtttttctgattgtcctttcaatttgtgacccactcctcgctcatggccacgcctctctccaagagtctcacgaagtatctcaatctcaacatcttgtccacactcagaatgagtagattgattgtcatatcttgtcttcatccgtacctattttaagaataagttaaaaactaaacaaacttacaattatttaaatatattcaaaagtaattagtttacatagtcttacatatttttctttggcatgctagctaacaaactcgtctgtgcccttctttgtgtgacaagctttccaattctcaatgcgacccaagttttgctaataaataaaaattataagaaaattgtaatgaaattaaacttcataaaataaatagtatatatattaacttacattttcatgaaggttctcagccatagttatggacccttctgttgatgggaataacttcttctgtcgattgagagcattttgctttcaacgagccataaactcttcatatgtgaagaactggcatattaggcgacattgttcttcattgagttcattgtggggttcttgactgcaattttaaagtctcctgtatttttgtaaaattctttaaaatgtacaaatctaatattctttctcgtcttatacttttcgaccatttcagctaacgaaatagctaataattttggatgtctgtcaatttcgtaataatactgcatttgacaaaaaatattatgataacatactaataattttgtttatttagatataaattccaaataatttacccgaattttgtttagaatgaggtgttcatactgctttgggacacttgccgaattaggataatatctaggaacatgcaatataacctctctccctacaaaacgagaaaatgctttactctccaaccctacaattctgttagagatgttgtcaaattctaaaggcaacgacgccccagcttttttccttctatcttccaagttaaccaaaacattcctcccgcaaccttttctagattctccagaggtctcgcaagaggcaagaatactattaggatctaacgaatcatccccatcgccatctccaccttgataactagcaacatctgccgacattttatactaaagggaataacgaaatcatatgagcccttactttaagagaatcaaaacaactaatcaacttaaattaaacgataatagtacaattagtcatttttcgaaacaaaataatattagaaaaactagttatcaatacaaaaaatatcaaatacattaatcataatcatcatcactaatcaaatttgaattttatggggacacatcttcaatttcatcttcaaggcgatcaacaagcaagtaatcatccacatattttactatttcatcttcatcatctctaatgtcatcaacatttagaaccatctcggaactttgcaaaacattgacaatgattggcggttgattaggttgttgcacagtcaattcccccaaatccacaaacaatgtaaaattttatgagttatcgtcatgtacaacatcaacatcattggtctcataagaaccttctatcaaaatattttcctaaatttggcgatgatgtacattatgaacaactttccaatttcgacctctaacaagatcatccacaaagaatacttgcttagcttggttagcaagaatataggggtcatctttgtaccatacaccattgacatttatgctagtgatgtttgttatacccaaagtttggtaagcccatcagaggaggacacgtgtcgagttgggaataactcaaacacgcaaacgacaagtatgcttagcatggagcaactcgttagaaatataattcgcagggtatgtttataactcagcttgctgaatagccttctgcgagacagaaacatatgaactgctaacttacgtattgatgagaaaccatgtaggtgcaatgacgaggcctcaacctcgctgggtgaaagagaaattgacaacactaaaagtacttaacttatattatacgatataaaactgagtatagatagtatgacgagccaagataacagacagtgaggtgtttatctcgctagaagatggtatgcatgcaaggaaggtcctctcgacaccagagagtata

SEQ ID NO: 395587 - DNA, 1239 bp, Cannabis indica
gtaatcagaggatggatgaagaggatatggatgctgttattattaaggaagaggatgcagtagtattatcctatgatgcgagtgtcactactggtaatgattatgatgatcgttcgtgtattgttggtagattcttgattgagagatccataaatttcgatgcgatatagcatatgttggcttctctttggcaaccggggaagggtatgttctttaaagaattggattctaatagatacttatttcaattctatcatgaactagatattcaaagtatgatggattgtagtccttggacttttaataagttcttgctaatttttaaaagactgaaaaaggggggaagatcctagacagatagtgttgaatgaagttgatacgtgggtccaactgcatgatcttcgattgggatttaaaacgactacgattgtaaaagatatagccaattatgttgagaagtttatcgaatcgaatgaaagaaattttatgggattatggcgtgattatttacgcgtccgagtaactattgatgtcaccaagccattgaagaggctgatgaaactgcagaatacagatgggattgagttctgggttaacttcaaatatgactacctacctacgttctgtttcatttgtgggataatggggccctccgataagttttgtcctcgtcggtttgatgatccagagggaaagatagtcaagccttttggagaatggatgagagtgtggcctatgcgtaagaatcacactgtaggagcaaagtggctaaaacagttcatggtggctatggaggaggtacctgctgctcctgtaaacacgaccaccagtgaggttcgacggtctccaatagtcggcgctggtgcgggtacagttggtttttcaaaatctcctatgattgtggaagattatattggtcaacgtgatatccctattaatgtggaaactgattttatggaggctgccactgatcaagaatttattgagaatattgctatagataatgattgtttgttgggggtggacatgaagagaagaaggatggaatcgcgcttttccaataggccgaatgaattggatgaagatggaaagattaacaaggctgtaatgggtttaaaaaatatgagtttcgtgagttttggtatccaggcccaccgtcaattatgaaaatattatcatggaattgccatgggcttgggaacccatgggcttttcaattccttaaggatattgtgatcc

SEQ ID NO: 395588 - DNA, 966 bp, Cannabis indica
aaacgaacaaaccaacgaagaaaaaaaaaaaaaaaaaaaaaaaaaaaaaaaaaaaaaaaaaaaaaactaagttaaaaaaaaaaaactaaataaatctgaaaagcttttatggcatcaatgaatagccactctaatattaaaatatttccacactttggccatgaaaataggagaccacatttgtacactccaccaataacctcatgggtagaatcttttacaaatgcctcataataaaaaaaaaaaattccaaattgttataaattcagagaagaaagaaataaaaaacttaacaaactattggtacaattacattggtgattgagaaaatggtgcattgttttcgcatttggagctcaaaagaacttatcttatgctggtcgaatagtgttagtgaatgctataataaatttaccaaagaaagtgctcaataaggttgatcatatccgtagaactttcttgtggggcgattcaacagagtataagaatctggggttggtttgttagaaacatgtttgtaaaccaaagaagaaagaagatctaggctttaggattatcgaagtgtggaacaaaagtgctattaaaaagcatgggtagaaagtggctacaaagaaagacaatttttgggtaaaatagtttcattcagtttacttaaggcaaaacaactagtgggtggtattagtgtgcaattgtgaaagtaaaagacattttgaaagaattacttcactctcatacaatttgcaacttttttacttaattgtttagatttgtaagattctctctcctctatatgttggaaattggtatgttgtgaatgtttagaaacgctatagcgtctctacgtatcgttttaacacttggttagcagcttggaataggcttaaaactaaagattaaatgtgatctgaattgtctaagggaaatttgaaaaaatatgcataatataccttaaaattttttccctaa

SEQ ID NO: 395589 - DNA, 1663 bp, Cannabis indica
gagaggcatgatttggtagatatcaaagtcgtggggagcatggttagtatataaacaatcaactaaacagtaaaattgaatgaaaatattagataaaagtccttaaattaacaatctcaatagttcaggggaatttttaacggtcaaaaaagttcagggaacgtaatttggtatatgtcaaaatttaggtggaaaaattgctaattcgctaattttttttttgttgatgtggacaaaatataaagtgcgaaaatgatgtttgaaaaagtaaagttactataatatattagctattagagagaacaaggtatacacgaaacaattaattaattttgttgtgttgtgttgtctctttaagtaaagttttgatgattacttaacatcactatatatacatttcacatgtatgttgttaatgtataacattacttagtattatatatagaacataaataataatcacatactagatacataaatggatgtgcatgcatgcatatatattatattaattaatttgatgaaatatttattggaagagaagactgattaagtcaagtatcgagacagctcactcactttctaagtataattcattaatattagtaacgcgtgaagacatatagagttaaatttcgtcgattcttcaccgaaaccatctcacacaccacaatgttagcaatatatcaattaattaatatcaacaaataatatattccattccaccttccaccatattcacataggttaagtaattgactttgacgaaacaaagaaaagggaaaattaatctccacccacactacataagtacacgtgtacgctcacgatcacttgctaaattgtataaatataattagctagagaaagtagtatagtgtacaattacaatagttcaaagaaaataataagagagatggaagatttgcgtcaaacggctttggcttactatatgggtgcgacggacgacatacgacatgtcgtagatgagttttttgaggagatggacccaaacgacaatgggtacgtgaagttcaaggagttctcggcttacatggagaccatgggttgttgcaatatgagctcggaagagttctacgaagagctgaagcagagtggaaacgatgggctttttgcagacgatataataactttgttttacataatccatagtgggagacccttttgtggtggaaagtgtaagaaatttgtgaaaggcttgtatttcacttgtttgaaatgctttgatgacgaaacaagtggtagtactagttttagtgtttgctctcagtgttatgctgatcgccattttgagcatcttcatcaggagtttctggatcccattgttttgcttaatttaaagagaatggaagctctaagtaacaaggtacaatatatatatgcattaattattgattagtttattttaattagattaggtaaaaaggtagaaattgtgccccaattcaatttttacatttttaaaaatacatcctaaactattctcactattgaatttaattggcaaaaatcatccatttttttaatgactcggacagtaatgatgtccaccaatttagaaaaggctatatgcacagacccaatgaaagataagctgactttttttttctttcttttcttattttatacaaaaaaaaataaa

SEQ ID NO: 395590 - DNA, 1101 bp, Cannabis indica
aaaaaaaaaaaaaaacgttttgaagcttaaaaatgaacaaacccttaaaaaaatcgttttcttactcttattttataattgtatttatatataggataattataatgtaggactgttaatttgtatcttatggtatggagtagtttttttactaataaaattaaagtcaaataaaagttaaatgatatggtaatgtgtatgtatatatgagattattttttctggctaaaataatggttgttttatatttaaaaaaatattgttaaaaaaatagaaaagatgactcttttatatatgtcttgtgtatgtgtatatattaatgaatgttttttagaaaatttacatctaattacttatttttgtcaataacgtttttttgaggcttttactctcttttctattttaattaactattaacatatatatatatatactagtatattgttacgtgcgatgcacgtatgctatgttttatattaagtattatattatgagttcggaaggaaataaatgaataaaaaataaataatatttaatttagagagatttgaataataaatttaaattaaagttttatgtccagtaaaaacatattggaaacaataataataaggttataatatatgttgcatttgttccagttcttaaaataatagcagcaagaacatatttgacctggaaaaacaaatattacaaaattaagaataagcaaagcgtgtgtaaattagacaaagaaggaaccctcaattctcaaagtctcgattataaagtaacaaagaagtattaaaatttcatctgctcattataaagccaccttcactcaaaatagcacaacaaaagtaacaaagaagtattaaaggtgtaaattttaccaaaagcaatgagaattaacaactgatgattgcattctgtttcagtaggtgaaattgagagagagagaggcttttgttgtgtttgcctgtatgggtgatgaatgggttaatcgtaaagattgtttaattttttgggtttaattattgagtttattttttgaaatttgaatgaagcagtgtaaaaaaatttcaaaaaattgtaagtttgttagagagatatgtaagttaa

SEQ ID NO: 395591 - DNA, 949 bp, Cannabis indica
ggaaaaatggacagatgttgactgcaatggttatgtaaatatagaaaagcaaagaaatgtacttcttttggaattcaattagccatcatgctgcttaaaatggtaaaagcaagttacatgggttgtaaaaaatagaattttgtttgtattaccaaaaaagtaaagcaaaaagatttagaatggtttcaagaattgtaaatacaaagttgtatagatatttttaaggccttgtttggtgcttataggttgtaaaaatgagatttgttcaatgaacttttatcattcaatacaaaaaaaaaaaaaaatcttatgggggtatgtgaattaaagagagtttttgagacttcccaattacctccaattaagccaaataaatacgtcaaactgtgtaattatctccaatttcaattactaggtagttttcaaaatacgctctaaaagtcattatggtgtccaacatattacgatatggtatatatggtgtatagtaattaacataatttaatattaaacttgaatattacatatttttattacattatatacatcaaactctgatattacattgtatcaataattatatgttatttcttgttccttgacattgccacttgcatctaaatagagatagcaaaggaataaactagaatggtcaattatactgttgaaattaaattcccatgaaagccaacatgtcataagtttcaagtaagaaccaaatctcaacgtcttaaatcaattattaactaactaatcccttatggatctaccagtaatagaatctcaaccaactgggagctacaacaaattacagattaactaacttaggaagttaaaagacttaccaagacatctatagatagctcctcagcttctcagctcaacattgatcaagaacctagagagattgactcaaatccaaagaataaagaagagagagagagagaga

SEQ ID NO: 395592 - DNA, 947 bp, Cannabis indica
aaccaaactattaattggtttggtttagtttaatcatttcattgggttgaaaaaattataaattcggaccaaatcaatcaataaacaagaacacccctaaaattagatcattttttgtaatgttatctatctttttatcaacgccacaacataaataaaaaatattgttattagatatcaatagcatctgacattaaatttaacatgcaaaataaaaaagtatgtttgaattacttaaatatttcatttttttttcttttttaaagtaaaattactcatacatttgtcttctagagacttgtctatacattcaaagtgattatattctacgctagctatgcacattcatttagtacaactattcatataacaacagaaacaatattcttttccttttccatttgaaatgtttctaaaactatcacccaaattcttccaattttttcaatctaccatgttggcacccactccatacttcactccaaattctagtcccttgatttttcagaccagctacaaatcatcgtcttattgcctcactaactagctaatcaaacgcgagctcctactcgaatagattccaatctcctttacttttgctccaatctacacaaaaattttcattccttgatgatacggctattgtttgggtccaacataattttcatatattaatcaacattttatcaaattgttagtactactagctcttttactttcaattaatcaatatatcttatatataatttgttgggaggcttagatcttgagtataatgattttgtgaagccaaacttaattagtttgtagtcagttgggaggaggcccggtcctagactaagacgggttaggtctagggttaagttgaaaaatgtcacttctattaattaattaactaaatttacctctaatttttatttaatcgaaaaatacctctttttatatgt

SEQ ID NO: 395593 - DNA, 1142 bp, Cannabis indica
atgtaattatcccagtattaaatacgtacttacccatcaaaataacatatggtgttgtctactatataaatacgatcaaacaatgtaattatttcatttttttgggaaatttacaaaaatactggaatttgagttaactttgcaaaaatactgtcacacagaaatgttttcaaaaatattatgtttttataaaacatcagtagaacacagaacagaacaactcaaaacaacagtagaaaaactataaaacaccagtagaacagtagtgaaaacttaacacagtatactgcagtataaaatttataaaaaatacagtaaaaaagtaaaaaataacgcatggcagtatttttgtaaaaaaaatagcaaaagttagtataccatgaattttttttttttttccaactatatggtatgggcctaaaacacaatttcatgcccatgggcttctttaaaagaaacaaaaacttggaacctaagaatgagaaaaaggcccaaaatatcaaagtaagaagacgaagtgacacacttcaatatatcatactcctaattaagaattaataaatagtaaaaaaattctacatcctattcgagttcatgattttaaccgtaaaacttgtcttcctacaattaagaatattaaaggatcaaagattttcgtacaaagaatgattaaggatctcaaattttaataatgatgtgttttatttgtttttcttttagtgttgtttttatttattataatttataagcatacaaaggaatgatgcgtgcaaatgcatgataaggacctaaaaatttctatgttttaaattcttatgatggtataactgagtaactccaaccacaatatgtacaagattaattgtgattcttatcaccattcaaaaaactataaaaattgtaataatttgtaacgttaatatttaacggtgcataaaaaccatacttaattaaccaaatcaaaacaaattaatgaagtatatatgtatgtatatccaaattacaattggccggattgtaatatatgtgaaattgaaccactaattattacaatcaatataatcttattgttatgaaataatataaaataatataaagtagattagaagaaagaagaagaagagagaaagagaaagtgaatg

SEQ ID NO: 395594 - DNA, 1591 bp, Cannabis indica
ataaaaataacaatatgaaaataaaatttattatatatttcaaaatataaaaacatattatataatatatataaatttttaattaaaaatatattcatttttattatttaacagaaaataaaattataaaaaatagaagaaaaaaattgggttgtgcaatccgtgattgagtgagagtcgatcgagagagagagtctcctacttgagctgagccgtggtgactggtggtgactgcctgactgtgagcgacgacggaggaggtcgacgtcgtggatggagtggaggagtcaagcagaccgagcctggagttgtggggtgtggaggtccgaacggaccgaggctggtcgtgtcgatccctgggtcgtcgtcgaccgtgggtgaggtctggtgaggtcgggcgtgggtgggggtgggggtggatgtgttgtgtctgtgggtctggtggcgaggctgaaatgtaaagcagtaaaagtaaagggaagtttagagtttttataatggtatagcaccctcttattttgtcaactaaattatccaccttaacaagtacttttaaaaaggaatatttgctgcaaaaccatctatagtttatatttttaacacttaaccacaaaaatcaacattttggtggcaaaactactcaaattcctcatatgttagctatttaccccttccatctaaaaaactatgttatccacctcctattttgtcaactaagttatccaccttaacaagtatttttcaaaaaggatattgggcacaaaactacctgaattttatattttttaacacttaaccataaaaatcaaaattttggtggcaaaactacctaaaccccctttctattacctatttacccattccgtctaaaagactatgttaagtgccatggtgaacacgccacagtttatacatataaaaattttagtgatctacgtaattttaattattaaaaaattaaaaattataaaaaatattttcttttttcctttttcttttattttttcacttttcctttttctttcattcttcttcttaactgaaccaaaaaaagccctagttgctcatctaacggaaggccaacagacggcgtagaccctctcctctcttctctctcgttctcgcctgacccagccccttctgcgccgctcagtgtcccagactggcaacccagacccaaccatggtggtcatggttgggatcgtgatttcgtggtcatatccaaccacggtggtcgcgatttagttgtttccttagccgttcacctagaccgagaaaaagggaaaggttgaacgctttgttaagctcctcctccttggccaccattaaagctcgaacaacctcgacaaattcatacttcggtagatgcgtgttcggggctcgtcttcaagcttgggagaaaaaaattggacagagtgaaatcgggagagagagagaggatgaaggagatggaattgggattagggttattagttttaggttattttagaagaagaagaagaagaagaaagaaagaaagaaaataaaaggagaagaaaaaagaaaagaaaagaaaaatataataaaacattttttataatttatttatttt

SEQ ID NO: 395595 - DNA, 800 bp, Cannabis indica
aaataaggagttaagtgtatactaattaaaatttaagggaatttgaccgtaaatttctctataatatttataacttaatgtatagtgcctctttacatgtagctaataattattcatgagctaaatcttttagctataatatctcatttgatgggatgacatttttcatttgtttttttttttcttttctttaatttttttttttaatttttttaccttatagctaaataatttacctctattttagctactctaatatgagtgttataagagcactcacaacaactgctctaaaatagagaaactttaaaatatataaagaatcgtattacaaacacgctacattaaatgctttaaactctttcttcattttaaagtttttttaaaatttactatttatgctctacatttatagaatatactatttattgctctaaatatattttattaattgttttagattttaataattatttttgtatgtatgtgtatgcattaatatcatatatttgaaagaaaatatattaaactttttaaaaagtggggttttggtaatgtgtttttaaagaagctcatgtaaggtgtaatataaaagtgtgttgtaaattagagaagatagaattttggtgatgtgctttaaagaatagaatatagatagagaagctattgtgagtgctctaagagcatctccaatggtagcatcctttaaggatgctaaaaatttccacatcattcaaaaatataatattttattttatctctcttccacatcatttttagcactcttacttctaaaatta

SEQ ID NO: 395596 - DNA, 1215 bp, Cannabis indica
ctatggttctaaccgaaagatggacaatttggcttgagcaaaatagtatgtctactatgtagctcaatggattccatgctactaaaattcttccccctttatgccaagcattattcgccgtaaaacaccaattggaaaacattctaatgtataaggctccaagatttgaagccttaactctcgtctcgaggagactaacaaagccaacgttatttttagcaataaattgcttaacatctatttgcttgtgatggctgttgattccccagacgttccaacttagtattttatccattgttaagaggaggctctccccctcctctagttattacctcttcgctactcccttttgcctcccgaacctcaaactcctgtaatttatgagctaccccattctgtagcacattatactgattcgaagtggatggttcagcattaccactctgaactttaggcctccaacccttcatcaccggctggaacccctctgcatctttcccatctggttcattctcttgtttctgcttccctttcaccacccattcttgcttctttgtctccttcttcctgcattcatccgtattgtgtcccattcctttgcaatgtttgcaaagaataggcttccactcgtaattaaccaccacagaaacatcatccccatattcattctcaaaatagatcagaccaagaaactcttgctccattgaaacttcaataaggattcttggaaaaaggagtttatccctttctctagtaacctcatcaaccattattggctttcctagctgaccaacaatcttaaacaacgatttttggccctaatatttcagctctaaatcgtctagctgaatccaaataggaatggttcagatattttctttcttaaaattacaattagggtcccaagccttcataatgacaggcctcttgttaaagaagatataaccaccagctagaatttcatctctatctttaacacttgtaaatctaatgaggaatataccataagaaatcatacctatcctgtctactttatccttccagatccttcgtgcaaagccctctagaactgatagtggtggattggcaccgagaacatagcatacaattgcaaatttccagtacaccacctgtaacaccctaactatcttaggcgtattacgtgatttttaaacgtaatgtgcagctcgtcgctaatcaacgaggtttatggaa

SEQ ID NO: 395597 - DNA, 1134 bp, Cannabis indica
ttatttgtcttaatatattgcttgccattactacttgcttttacttgattaattgactaattgctatatttagtgttaaaagtttaattttccgaaattagtttaaaaattccatatttataaaaagtcccttttttattttttatttttttattttgtgcgttaacaggtactgtatcttgattctcatagttcgttagttccaaaatgaaattaaaaaaaaaaacatcactggggttttataaccaatagatagaatagaataggaaaaggcacacaataatcaccttaacattatggctctgattcattataagcttaatcacttattaaaacacaaaaatggttggtggtccattcattcctacccattactattattacccatctctctctctcaagagcaccgcaagggatctcggtctcaccatattcactctccttcactcaagcaggtttcttaacatttttaaattttacatatgattttatacacacatcttctctcctgccattgatattttctctttgattttagaaagtttatcaacttccttttttggactgaatactgtgcatttagtttagtcaatgtttaatctgagaaactgccattgtagttttggctatgagtctatggatattaaaaaaaatgattttactgtaattgactggtctgggacgtggtcccgttcacatcgacacgcacttccagtaggtccgacttgcgactccgaaagcacatgataattgtgcctttcttaccgaccaattagatcaaacacttccactatttatactaatacatcttttttctctcagcattattcattttaattgtgcataggcaccgcaccagctccaatggcggaaatcacttcaccagaaaggatcactctgttttccccttacaagatggccaactttaatctctctcacaggtaattcacccgatcaagcttggtttcagtgtttttttgtttagcttctttaacccgatcgatctggggaggagtagggagtgtttaattatgttttctgggtttagagatctgtattttgaggaatttgtctttttgagaatttctattaattatgagattctgttattgttggtagggtggtgcttgcgcc

SEQ ID NO: 395598 - DNA, 798 bp, Cannabis indica
taaaactatacttaattacattaataataatataactaaagtactagtgttctttagctattttttatttataatgtacgaaagggtacaatcaatggacggacccaatagaaagacaaggaggggctcttgcctaagctttattttttctttctttcttaatttataacaaaaaaataaaataaaaataaaaaattaactatgtagaagaaaataggttttcaaccccttctaaataaatatacatagttacatttgaacgtggtcggcctgtgggtaagcaaggcaagtgtgtgccttgagctcccgaccgcttaggccttgaaattgtaaaacaaaagctattagtatatagataaaatattagataataagattatataacaaatattatttgatgtattggtaaagaattttattttaatctaatagattaggaataattcttaatttttactttttatttttttaatatattaaatgtgtaattataaaagattgaattttaaagtttttaagagtttttgaaaaaatttctacgttacactaaaacacaagaactattatttctataatgagtaaaatatatataagattctattagaatttgggataaggtgaatgaggcttctgttagtaatgtgggactctctaacatccttcctgtacttttttcctttttgactttagctcttaaatcaattacttttggatttttggcggcttattttttttggctctacttagatcggttttttttttttttttgtagggtcaaatagtcattaaagggttttt

SEQ ID NO: 395599 - DNA, 753 bp, Cannabis indica
gtatatcgatgttactggtttgttttcctttctattatggcttcaagcagtcaccatggtggtgacttggtggatagatatgcacagttcaactagaagaggaagaggagggagtcttaattactagtgatcaaagggaggagattcaagcttttgatgatatatggtgtttggtgggaaagtttctcactggtagaacaatcgatttcgatgcaatgagacacatgatggcatcccttgttatctcggatactcagggcgccttcctatcagggcgtttgatatcagacaatgttatgatctcatttgagataatgcactaccttaagaggaagaggatgggcaaggaagggcatatggctttaaagcttgatatgagtaaagcgtacgatagggtggagcgggattttcttgagcatgtgatgttgcatatgggttttcacaggaaaatagtatcattgataatgcattgtgtttccacagttacaaacaggatcactcatggtggccatgtttttcggccaaatactcctagtagaggtattcgtcatccattgtccccctatctctttcttatctgtgttgagtagggttgtgcatgggttgggttggccgggttgaggttattttagtgggccaacccaatgagatcggcctattaaattctaacccattcatatcaagttttaattataacccaacccaaaccaacccattatttatcgggttaggttgggttacaaccctaatttt

SEQ ID NO: 395600 - DNA, 1768 bp, Cannabis indica
ttttttttttgctgaataaacctataattcattaaagtaaatttagaatcctggtgatcacaaggggattcacctcccaaaaggaaacaaaaccacatctgaaatgggacactccctaattagcaagaacatgtgctacctggttgtgaaccctccgaaaccaaacaacagagtacaaagaactatcaagagagcaaaacagatgaaaaaatagaaaagaaaaatgccagttaggaatagaaagcaagagacaagcttgcacaccatcttacaatccgacaccaaggtacataggtcaagattcagctgagctaccacttccaaaccagcaagaatggcaaggacttctccttttaaagctgagtcaaccttagctttgtcaataaaagaaaaaagcaattgatctcccaatgaagttcttgaccaccaccccagaaatagccactccgtctttataagtcgtatcgacatgaatcacaaaatcatccgagatgacagagctctcacacaatctgtcatcctcctcctgaggagagacccccatttcaaaagaagcgttatccgcatataacccctaaatctccacaaaagtaccattgatcttagagagtatccgatcgacatgaattttagacttattatgaaaagagtcattgcgatgaccccaaagatggaacagaaccaacgccccaaagattaaaaattctaactccaagtcatcagcaggataccaggattgaacaaccattccacaaaagacttaccatatttggagcttgatgaagctcgatgaatttcgatagggctacaaaggggcacgagccacaagccactatcgagaggagcattgaatagaaccaaaaaagactcccaatgtacatagagatgttatcggtctataaaattcccctaaacatgaaagcatcgagttgttatcgaagagcctcaaacacaactaaaagcctcaggcatgaagaaatcaaaccctcattaagtcaccatcgaggggcattgaatgcaactgaaaaagacctctaaacatcaacccacaatcaaggagcacccgctactacaaatatcagaattcgcgacggtcctaaaaataatttttttcgtggaccgtcgctaaaaaaattaagtaactatttaaaactgttgggaaaaatttagtattttcgacgatttaaaattgtagtaaacaaaataaacaatgtttttttttaataaaatacaaatttttaggagagtcttatacctcacggtttagaatcgtcgagtatagtaccgtcgggtataagggcccattaaaaaattgttacctaatttcttgccgcatttcccacgtgcctacctactttttctatttcccacatgctcacctatttttttctccatttcccacaccctaaaacgaaaatcttaactctctaaaaccttacccccgcctctgcaccatcgttctcctctctcgccgtcttcctccctctctcgatctccctttcttcttgtctctctcgtccatcgatctccacccatccgtcctcccgtcggtctccctctcctcttcgtcgcatacgtcggaccaccaccactcctcgtcaatgtctctctcatctctgtctagtcggaccgccatcacctcccgtccatctccttctctctcttgctctctctctctctctttctctctctttgagctcggtataaatatatttatttatttatatacttttgtattcattatatatacatatttattttgttattg

SEQ ID NO: 395601 - DNA, 785 bp, Cannabis indica
ttttttttactttcattacaaatattggtagagaaagaatattgatctcatcttgctgtaatgctatattatatttccgcaaacgtgtaaataatagtcttttttttcgaacaatctaaaaaaatggtctgtaagaaaaaaaatattcgtaaaaatatacaaaaaaaaaaaaagtatatacgtaaatttgtaaagtcttctagttgttcaagatcaattttttgggaggaattttttttttatgggttttaaggtataaatttataaaaatatagattattatcgagaaagttattttacgaaaaaaataaatgaaaaaagttaaaaaaatatgagaaaacagtataagtataaggtaactggttaccctgatcatacccaacctagttttccatgtcattgttttaacaataaaaattaaccgtttgtaattgcaacaaaatataaacattatgtattaataccgaaaaaaaatttgaatataaaagtgaaacattgaaaagatatgaaagccacattgtaattggatttgtgtgtaattagaggtaattgcacaatttgacatgtttgtctgaccatataattacactgtaactatgtaattggaagtaattgaggggttctaattacactctccaattctcatggcccccatgagaattgaatgtaattacactgtgtaattactaaaaactttctatattaaacattagttactaaaaaatattattttctcatgtaattactaactattttgccaaacaaaatattaggaattcatatgt

SEQ ID NO: 395602 - DNA, 705 bp, Cannabis indica
ctgtgacatcagttacttggtgtgaccatatgagtgcaagtgccttggcttctaatcctttttttttcatgcaaggaccaagcacatcaaaaatgacattcactatgtcaaagacaaggttctgcaaaacaacttgaagtaagatatatctcctcgcatgattaggttgcagattgtttaaccgaggcacggtcacactccagattcacattccttgctgacaaacttggagtgagaacatcagccttccatttgagaggagatattgagaaatgagcaaacttagaatggtggtgaggtgtcatccgtgaaggtgcattgcattgcaatacactgcatcaacattgaagcatagaaagatttgattccctggcaatttggttatgaaattgtactatgtgtaatcattgtaaaagttgttaggataagaatattttctagggattcatttgttggatagctgtaaaagagtactctggctcatgattgaatgctgaacattatcaaattatttctctgtattttcaaatctgcattcgtttagtagacttcttgatgcactacaattcgatacccaatcacttcacccacatccctcgtcttaccatggacaggaaaagtatgaagttggaccaaaaaggatgtaaatgaatagctcccccaactctgtattggtcactgttggaatttattttaccaggatct

SEQ ID NO: 395603 - DNA, 1057 bp, Cannabis indica
cccctagtttggattcggtgtggaatttgtgtgggttctctttcttaaaacttggagagctttaggtactaatttgatcttcttttcttgcttgaattttcttgattttgagcttgcttatgatgttataggtgctcttgaatttgttgttgcatgttgttgtaattgagaaaatttttggtgattatggtatattttgttattaggttcatgctagaatcatcttggtgtttatggaggtctttggtttagttgttgatgttaaaattctgggaaaaatactttgaatttatgggttatgctttaaagctttgagtgtcaaagcttgtggatttatgtacaatattaattttggtgtagcatgcttaatgtatattttggttttgatcttgagttatgtgttgtgctcaattcgatacaaatgttaaattaggttggtattgattaaaagtttagtttgtgcataattattgcatgtattttggtgcataaatgcttggaaacacctcaatttgatttggaagcttgttgtcaagttatggtattgtagtgttgagtttggtgtattttcgggtacctatatatgagtttttctgggtttttaaccctagaaccgtgagccggttcttgagtgtcgcaggccgatatgggttcagtaaggctgaatgttttaaaacttgttttggccataactttaagtccaaactccgttttggacattcttagtatcattggaaagcttgttttggactctatgtgttaatttatagttggaattcgaattatgtatatgggtgaatttggaattaaccttatttgtgaaatcttgagaatgtatgactaggattaccggcgcttgctcaggaacacctgatggtttggaatctccacatacttagattaccaggtaagacagtgagttaggacatagagattagtgcagtggcacccatgtatattatttagtatattatgcagaaaaccgagactatggttcttactctaggtttagttattttgtggtctagggttattactctagaatgtatgtgaatgt

SEQ ID NO: 395604 - DNA, 1354 bp, Cannabis indica
aatatatatatatatatatatatatataaatataaacagttaatttaatatggttgattatagttaagattgttttaattaagtaataatatcaatagccatatactattgaaaatcaagtctttaaagctaattgaaaaaaaaaaatgtgatattgggcggtcatcgcacgaaacgtgtgaaaacacatacatatgggagagaaaattagataaaccaattaagttggggttttagaagtcatacaagtaagacatctatacacacaaatacatatgcgcgccatatatatatatacacacatatactgtggacaatattatgagatatatacttcaatttctctctctcgctctatcttatggcttggaattatggatatgacatatgatgatctcatgagagatttttattgagtaaagaattgaattttaaagcaaataataaagatattattatagatatcgatggcggccggagatggttcagccatctctttggaacatactcccacatgggcactcgccgttgttatctttggcttcatctctacctcccttctcatcgaacactctatccatactctttctcaagtatacacaaatatatctaactatatatgaactcaatacatataaatatatagtaatatatgaatctattccattctatacaaagtaaagtaaaatagtattgcttatttgttgtgtagtggctaaaaaggcataaaaagactgctttgcagggtgcggttgagaagctccaatctatgtatataaatatatatagatatatagaactaataatataacatgtgtatgtatattgattttggtgtagagttgatgcttttgggattcatatccttacttttggcgataactcaagattacatatcaaaaatatgcataccggccagcgtagcagacactatgcttccatgcccaaaacatgatcctcttactcctacgacttcgtcacgaaaatatcaactcattactagacaattactcgcccagaagtctgatgaggtttctgctgattcttgtactgtccaggtaagtattagtttagaatttttcttgctatttttgtgaacaaatttagtgcatgtttggcataattactaaaaaactattttttgttttaaaaaaagaaaattattttttgaaaacaatttggtttgtttggccttgtttttttttaaaacagttttcagaaacaaagttacaaaaacaagaattttgaaacacaaaatatgtttctgtttaaaactaattcactttggtcaatatgttttaaaaacactaaccaacatgacttgttttaaaaacttctaaaaactatttttgtt

SEQ ID NO: 395605 - DNA, 869 bp, Cannabis indica
taggcttcattctccttagtatttttgcgcattttcaactgatcaaagcttcccatcttcatcttcatcagaatctagttatgggtaagctttctattcttgctctttcacttgattttatggattttgcaaggaatgcatgaacattattctttttttgaacatactttgattcttgcgttagattgtagtccatttattattttgatctgcttgatagccttaggatagacaatgtgtgattttagatgaaaaagaacacaatctgacctttgttgtgattcttggttctttgagtcacaaagaacatgtttgagttcttcaaaaatcccttgttttgatccatgcacatgctactcgaccaaggagggtttgttttaagcctggccagccatgggtggctggcagtcaggggggctggccatggggactgtgtccctaggctggccagcctatgcttggaactagggttcttggccagccattaggtagggtcttggggtcttgtcatccactaggacctagaaccttggccgactaaggcaaaagctccaagcaagcagctagtttttctacctcttttgacctcaactagggtctcgtgacggccttggaggcatatacaactgttgccttatgcatggtttcccttggaaactttgtataatgctagataatgagtccattatagttaattgggtaacctaggacatactgtatgtcttgttaattgtacctaaaacggtacttggtcattggtcaaccttgtaccttttttatttttcttagaaggtacccttaggtgtcgtttacttgaatatatttgtagctttgttaggtttctcacctccccttatttcttccatgca

SEQ ID NO: 395606 - DNA, 2370 bp, Cannabis indica
attatgagcagggatgaacggatgcaaagaattagtcactttaggatgctaaaaatttaagctcagggacttgaaagtgcataagaaggagcaatttaggagttttatctacaagaaacccttaaacgaatttagattaaaaaaaaaaagaaaaagaaaacccttaaactaattgctgcacggtaaatcgattaatttaatttatttaaatgtaatatgtgcagggggatataacccatgctgtttctcatatgaaagcagcagctattgacattgttagtagtacccaaccaatagcttacagtcaatctcttatcgtggaaaacaaccaagctagggaagcagatatacgagcactttctgagttgactcgtgctcttgacaaaaaggttataaacttttcgctaatttaagtataggttttttgtcattcagaatggaggttggagaccaagttcttataattctcttcttctgggatattttgtttcctcaccttggttcgatttggtttttcatattattagtctgtatatggtcacgcatggcattttgatttgccatgtaagcatattgtgtgtactgtgtcttgcttaagattgttgatggtcttaattggcttcttctcccccccttccctctctctctctctcttgagtttaggaagcattgttgatggagcttagaaaaaaaatagtgaaatactggaaaaccagaataatggagactactctttaaaagattgtgaaatgtttaagaagcattacgccacagtacttgtacagctaaatgaagccagtagccaggcacgtggctttccgtgactatatatatatatattatatttgtctatattcagttactatctctgcttttacttctagcagcatctaattctttgttctgacatgcaggtttcttcagctttgcatgatttgaggcaacgtaatactcatccgggaaatgtcttgttccctggtccgaagatccctatcaattccactacccacagtaacgttcccagttcatttgataacttttccatttctcaagactcggcatctaatctcattgaaattgttaaaggatcgacaataaaagcacaatctatggttgatgctgctattcaggtttggaagccctctgctttttagtgtgtcagcatcgtttttgattaatgcaaatgataattgtaattaatctgtatgtggcataaacattgttttataaattgtatatttatttttagtatatgcttggtcttcaactttgctgtccagaagtcatcaaaaggttatgttctgctgggtttgattctctctggtagtttagacttggttatagttttatggatagtcaccaattgctgcttcaactgtttggtttcttcttttcaatactttgtaaatattttaggaggtgaatctgatgatgtaaaattccaggcattttcattgtgtaaggaaggggaagatgcgtatctaaagattagagaagctctagactccatggataacaagttgatgacgtctgagtccagagcattaacaaataaacctcatgagcaggtcaatggaacatcagtccatcgctattcgctgataaaatcagagcctgtcatcacgggtgattcatctgcttctaatttgcgtacagattctgacaaaagtgaggcaaaagtaccttcaggcatcatcacttcatgtgttgctagtttgctcatgatacaggtacacctcataagctttagtgttaaagattcaaattatttaccggctttgtgttcagtgtgattcaaagaacttcccttgggattttaatggcttacttgtgtgtttatgtgttgcagacatgtacagaacgacaatatcctccatctgaagtggctcaaatattagatacagccgtcacaagattgtatcctttgtcttctcaaaatatacaaatatacagagaaatacaatcgtacatgggtagaatcaagactcaaatattagcccttgtaccaacttgagtttgaacagtcgtaagctgtacaatgtagacgagaaagaagaagggagaaaaaaaaggccttttactaaatcaaacaggagtgacccatcacatgttgtcctattagtacttgaattagcttcttgtaaatatggtaatggaggagctttcaacagctatctgtttgtagctatttcacccctcatttcttatgttgtataatactataatttaattatttttactttcagaaacagatgatgacggaagataaagctggtgccatatagtaattatattataatataagctgttgttgtatttccattttcttttaaattttgaaatggactttgcagctgccaatctattttt

SEQ ID NO: 395607 - DNA, 1083 bp, Cannabis indica
aacataatagtaatgttgattttttaatgaaggtgtcccgttgagttgagcttctgcgtagagtcgatgttgccttaccacactgccactgcttcagctttgatgacttcaatgctttccgtcactcctcgcagttgtggttggcttccagaaggtgtttgaactttaaactcttcacaaatttggtattaacattttatcaatataaataaattttatattcgtggttgaatatgttttagtttactagatggtttcctttagacttgtatttgttgttgcataatgattgcgtatccctagctcatatgattgtgaatttttagcccaataggttgtttagtgatatgtccctgactgttcagatgctcttatataggttgaacttaaggataatcatataagaacatagagagtgaaaaccaacgttcagatggtaattgaataacactttgggaaagaattgaatgagtgagttaatagttatttctactgaatttcggaattcaccatggaattttagtttgtgtagtaattataatccgagcgaaaggttggggtccttgtcttatggcacgaattgaatttgtttagcaccctccttgcaaatcaaatgagtatattttaactatcggcagagatttttgttataggaatccagtaattaattgatcttcttcatcatttatacttattggactggttttgtcaaggaaaagtttattttgtttcattgttaatgcaactttgcttagggcatcaatgcacctatagtactgatcttcttgaatagagatagtgtcacgtgtataacctcgttttggctaacaaagagagtaatctatagatttggtattgcgggatcatctttggtcccagctttcctcttcttagatatctaggttcctaaaatgttgcatattttcttgggtgcagtagtcttgttccttgttttcatcaaaacctagctttgcttctaaggctcttaatcaagtgttttttccccttgaattaggtatctagccaacatttgtaggaccccttgatgtcattttcttccttctcatttttctggtaagttaa

SEQ ID NO: 395608 - DNA, 726 bp, Cannabis indica
gttaaaatgaaagaaaaaaaaccttagctccattgaacatatccatgtctaactcatcctcagaatcagaatccagagcagcacatttcctaactcttttcacaacacgatcatcttcaaaaatctttcctttctcgactatcttctccttatctcgttttttctttacagcaaaacctttactctttcctaaactcgaagccttcgaaccacctgggatacacattgacaaatctttttcagttgcaccacaatcagataaaggcaacggagaaggagaactagacgatcgaaggatcaccatttcagctaaaaagatacaatgttatcaaaaggaaatgaagaccaaaccctaaccctgatattcgttcaacacatttgaaaagttttgaaaatgaaaagaaaaaggaaatgaaaaactgaacaaaaaagaaagaaagagggaaactagtaataccatcagtcctcctacgtgattgacgtgttgtagcttctcaggctcacgtcacgcgcacacgcgaatagaggagggatttttaaaaaaaaatgggccaaaaaagtaaggaaaaaagcccaatataaaaaatgttaaaaaaaaaaggaaataccaaaaaaatggcaactatatatcatgaaaactaactcacgaaaatgacattatttttgtaaataatttccaaatttaggtgccccatgaaaatttccaaaaatataatatatatatat

SEQ ID NO: 395609 - DNA, 1545 bp, Cannabis indica
agaattgagagatgctaatgagatttttatgaattgtagggacatgtaacacacgatttaagagaagtgttttagagcaggaaataaagcattgaccaataacaagaataggaagagaatatccattacctactgtcaattttcccttgcctttataatccaccttatctgtgagagcagtatcatcagagacaacatgatgagaggctccactgtctaagtaccactgtggatctgcaacagtagttgttgtggcaagcatagcctgaggtcctttagtattttgctcaggttggttcgaggtaccttctccttggtagcttaagtcgaaccgatgataacacttgagagctgtgtgatcagatcgaccacaaacttgatagataggcctatttcctcctcaattatttgagttacgacctcctcttccacgattaaaactacgaccacggttgttggtgttgttaccactttaaggaggtggtgcagacctttctggttgctgctgtatagttagcaattggattatgcagattcatggcaacaattgaacatcttacatagtgacagattctttggaggttagagtcacgattgcaggatcgtactcacttccaagacctcaaagaatgtagaatataagcttatcatcagtgatgttatggcttgctgccattaaagcatcaccaagacatctcatcttgagaatatattcatctataggagtggatcctttctctgttgattgaagcatgccacgaagttgtagaactcgagtaggagaagtgtttgaaaaaaattaaagttcaagcagaacattccaaagttctgcagatgaagcacatcttgcaacatgacccaacatgccttcaaaaattgagatgaatagctagctgatgagaaattgatccaatcgtagacaatcaaccaactctgggctgggaatggttctcgattcgttagttggatcagtgatggttgctgggggtcttgcgcgtgttacagtaaaaaatcctttcagttgatgcgctcaaactgtggagagaacctgagatctagtagaataaattattgcaatctaaacgcaaagtaagggacacaatgtgatttgggataacttgaatggcaagagctggaggagcgtggatagtggcagatgaagaaccttcaggccgaaggccagctgcaacaaaggaagacgccatggaagaaagcttcaagaagagtcgaacaaagaaaggaaaaaagagagcctagaagttctgataccaaattgagaataaaatgagaagatgaaaaaaaaaatgagcttgtattgaatagaggctcttgataatgatatatatagacatagagagtacaaagaagagtaacataaatctattacaaaaggtatagctatgaaggagtaacaactccacctaaaggcacaacaactaacaaaaaataactatcattcctaactataattaactaacttcactaataataaattcattattatttaatatatcattcattttatttataatatatatatttttt

SEQ ID NO: 395610 - DNA, 694 bp, Cannabis indica
ttccaagttaccatcttttatataacactaaaagagtttctattttttatcaagatgagaagtggcaaggaaataattaagatgctcccaataacaagagagtaagatatgagctgcataatatttccagttcttttcctgataccctatgacactaatcaagtaatgaaacctactaatttatggaatattcaaacatgtcaaaaataaaaagcaaaaatcgcatcctcatctaaaagtcagatttcaacatacaaatgaatgactccaagagaatacaaacaaatactattttctttgttaccaaaataagatttcatctcatgatatgattatttgtcagttaaattcaaaacctaaaaaattataaatttaacatataagtcaatgactgcaaaataagatattgatgaacaaatattcttttctttgttaccaaaatttgatttcatctctttgtcaaaaaaaaaaaagatttcatctcaacctcatgatgattctatgtcagtcaagttcaaaacctaaaattataaattattgatcaacttataggggatgacagaggagagggaagaagaaacatagagtaggttgaatcaaggtcttattctatacaatgaatatctctatattcttatggtcttagaaatagaatatccaaaaacaacatcaaaccataaaaaaaaaaaaaaaa

SEQ ID NO: 395611 - DNA, 855 bp, Cannabis indica
agatctattatgaaagattgaatccagtcgaagaaaaagtgtagcctccggcagagcaaagcaccgacataaccgacacctacacccaaagaagaaactgccatagaaaagaaaataagaatctattaagaggaagaagcaaggtgcataagtcagatatggtgggaaaataaattaggccctgactagggccacgcccaaggccatggatgactaatgagccctggttgaaatgaagagaatgagcaacaacgacaataaggattacggtaaccctaacagagcataaagcggtagcaatgacctaaattacatcgattggtataattgagtaatgataatctaatatatagcatctccacccatattatctaaagacacttcttaattaaaatagataataagtcttcttgtaaaattgttataataatcaattttttttcgaaagagtataataattaattttaaaaagcataattgaagtaagattataaaaataactctctattataataatggaaaattgtatggtccactactctaaaatgtatatacaaatgcattcttaatttattttgacaattagaaaaatattttaatctaaattttttacgctctagtaatttaaaatatcttacaaaattttaaaaaattaaaatattattttaaatttcttaaaattttataatatatcttaaataactgtaatatttgcaccaccatttaaaaaaaaatagatattggcggctaaaccacccgaactttacagtttgtaacacttaaccacaaaaactaaatttttggcggctaaacttcctaaactctggttccgttttgctctgcacacctccgtcc

SEQ ID NO: 395612 - DNA, 1173 bp, Cannabis indica
tgaaaggtttacatccaaactcggcttgtccacaaaacccatcagcaactactacagaagttcagatatgggtgatgcagtcgagttttcgatcgatttcaatacaacagtcgaaaagatagcacagactcaaagaaaaattcaagaagtgggtttttacttactaatattaataatgtcttttcaatgtcaatattttgtaactctatttacacattttggtttgtttttttttgtgtgtttttaggtacatagaaaagacaccattacattggcatcctactcatagtgtggtggtgattgagattgagaatgtgaacaagttgaaaatggctctttatgttaatcacaccataacttttcaagaattcggggagaagaatcgaaggcgaaccgagctggttatggaggttaaaagggttttggaagagctgaatataaaatattatcttctacctcaaacaattcatgtcaaccccattgaattggactcaagtttggttcaaaaatgatttgttattatcaaatttcaaattttttttttgagagaaatggatatcatagggattgtattatcaacactgaaattattattattattattattattattattattatagactcttttggtgcatggtctaaatttttttagactctagatttaattcaatatataaaaatctaattggatgtgaattcttatttttgtgtttggtaaatgagttaataattatacagtttaataatattaattaatattatgtaattgcagtgtaattatattcattttcaggagagagaataaacatactaaattttgtaattagtccaaattacactcaatttacataatgagtttccaaaagtgtcctaatgttcaaacataaataataaatcttggatacttaagttttgaagcccaacccaatctttttctatttggaataataatattacaatgtattaaaatatataataaaataagggattattttaaaaacacacaaaaataattaaaaaaaatataaaaatacaattgtatagaattttaaatattttttttacagttttaaagattttatttatataaaatacggacttttttaatgtatttttatgctgtattattattattattttgatgttggttttttgttatttgtatattat

SEQ ID NO: 395613 - DNA, 975 bp, Cannabis indica
gtaacttgatcctattatatcatatcaaattaacaagtacaatattaatacaacccacaattttaaatatataatacaattttgttcatttaaagcaaaaatattcaacaaaaacttggtagggaaaaaagattaaaatttaaataaaatatttaattttatttacccgataaatatagattccaatttcccatgtaggaaaagtaccagggtgagtttctcttagaatcctgtcgatcataggttgagggtcaaccaaaacaaatcctggacacactgtattgaaacatgataattcaccagcctacaaaaatattgatacatgagttacacataactacacaacgaatatgaagaaatcttaaataataacataaaattatgataacctgaaaatatatgaagatccgagttttattgtctccatatacacttggatttacctaagaaatgatagtataacaaaataacaagtgaacaaaatattctaaaaaattataatttatctaaaatatttagtttaattgtttttaacaacaaagaatatagtagaaagattattcaagagaaataaaacttactccccagccagcttgaatgatatcaagtccattttgtaattttattcgaccgaaagtgtattgtgagtcagtgacattatatagtgtgtaaaaacttgcaattgtgccacctccattgtatttcttggttgaatcagatgtgtaaacaagtgcatgctatgatattcaaattcaaattgtaattatatttcaataatggaatacgatatttactttatcaaaacaaaatgaaaatgtaaaatatgcttacatgagaagtaggaggagaattaattcttgaggtataagactttgtaaatagtttggctctgataagatcttctttagtagttcttcttatgggaacaaacccaattgggcatttttcaccctttaacccactatttatcgatac

SEQ ID NO: 395614 - DNA, 781 bp, Cannabis indica
acacatgtatcgtctggtagctcattctccaaatcaggtatgtacaaatctctcaaaaactctcaatttatcttattgttcttcctctcaggatctaatcgatcctcttcttctctcttcttctctaattctactctttctctttctgtttacacacgagagaaactctctctgtctaggtctggaattttcttcctttctctggattggatttctaggaagaagtttttaagctgtaagtctctctgattttttgttcttctatttatatatgtggtagctaagaaaaggttagttagaaataactaacgctgccttgatgtgggattgtatgcggataggttagttaggattttaactaactgttttttttttaactttaataactgttacagttaacttatatggggaattaatccaacaacacatatcttatcttcatcttctcattggtaccacataataaattatattgtattctcttcttccaaatttgtaaaaaagtaacctattagatgaaccctctttatctaataggagatgtaaaagttgagctatatttgacacaaaaattagttttaatatttttatattaacttttactattatgctccaatgcataattgtaaatcttgtaaaatttaatgtatcataatactcacttaataatttattgaaaaaaatataaaacaatactaataatgcaaagatcaatataaaatttaagggtaaatactattttggaccctctgttttacaaaagttaccaattggaccctat

SEQ ID NO: 395615 - DNA, 969 bp, Cannabis indica
agcttattcctcaaagttcaactctaaaaatccaactaaaaagcttaaattactcaaagatcaaaagttgcatagaaagggtaaaagagaaagagaggggtcggtggtgaggcttaagactagaaaatggttttctattttctaactcagccaacaaattacttaattcaatatttagtcaaattggtcaaatgaccattttgcccctaaggccaaaaatcaatgtaaatagcaattaagggaaatgcagtcaattcacatccacatatatatcccaaataatcatgtacgtatttcatgttatttccttaagcacataacttataatttttggacctcgaacttagctcgagctaaaatatccgattgtaactataacgtgtcaacttatcaaaaatcacctgcaataagacaatatgaacatactatacaatagtatagtccttttaaataaggttgctaatctatttactaatctcaagatgttacatatatattacactcttgttcccttagagcatctcatgcaaacaatgctcaaagttgttataaaattttatatcaccataaaatataatattttatttttttttatcatccacataatttttgactactttttactaaaatatactccaatgcaaacaactctaaaaatactctaaaatataatatttttgtaagtatttaacttttattatttttctaataaaaaaaggatagataccacaattgctactgccaaacatctgtagttgtccatttaaagttctccaatgcataacaacactccacccgtagcataccgtctaacaacctctgatgggccacgtgcattggagttgaccttagtttaggttttgtcccactgaataacatatcattggatgaatggtctataaatcatttcatgtcattctatattttctcttaagaaattaaatgacgcatatgattataatcccgaaa

SEQ ID NO: 395616 - DNA, 809 bp, Cannabis indica
ccacaatttaaatttttaatattctcagctcaaccaaaatttttccatgtcttcattccctcaccgtattgagtttgtcgtaaatggtgcacaatacaacaagagttattttatgagttatttttaaatttgacctattttaaatttcatgttagattgtttaattataatttttttattttaaaagtaatttttaaatatagtgcaacatttttattttgtcaagaaatttaaatttcatgttatgcttatttatattaatatatgattttttaaaaaatttagtgtgataatatttatattaaaataaataatatattaaataataatgtgtgaaatcataattataacattcttgaaatgtgctataccattggagtatttttattagaaataagagtacctaaaaatatgtgaaagaaaaataaaataaaatattatatttttagatgatgtgaagatatttaacacatttaaagaatgctaccatttgagcatctctaatgagggtagcctattaaagttgtcttgacacatacaatgtgcagggacggagggacttatgcctatatgtaggcttaagccctcactcaaatatatacatcaaatttttcacatctagatatatacatatattaattcactttactcaatttattaaagcataatctacaaaaaccctcactcaatatcttaattataattcataaacctaccctcattttaatcaagtccattttaaaagtagcccaatataaataataaaaaaaataacactttattaaaaaataaaataatactattgacaa

SEQ ID NO: 395617 - DNA, 1077 bp, Cannabis indica
tcctggagatcatagaccttgtgctccttgagtgagatacggtaacgactcttacgaggtcgatcggaaggaaggggtttggagcaaagagggttgccgcagaggttagcgagagctcgctcggtaacgacgtcgttgtagtcggagcgggagatgacggagccagctgtggaaagctggttctcattggcaacgccttggagaagggagagttggattctgtagacggcgtctttgacagaaagtggaggttggtttttcgccattgcagagggtttagagcaatagggttggttgagttgggttgttgtctcactgagatttttgaagatgattactctaattttataagaccatatcttctatttggtgcaacaatgattcatattaaataataaaccaactatttcactaaataaaatttataacataatggtttaatatttctattttgcttctatttaacttttaaaattcaaattttagccgtaaaatttctaaacctaagaatctgttagtaatttacaatttctatatgttaagtgttatattaaattatttttttttttttttgttaagggttatattaaattatttatgtgtacatctacatagacatagtgtacacaatgcataatttaattgatgtacataatacattattttaaaaatactaatttaagattaaaaaattaaatatagaatatatatattttcaaaaaaaaaaccttaaaataattaaacttaaaaataaatttagtttaaagggtataaattaaaaataataaaaatcctaatttcttttttctttcaccctcactcgacacccaccttctctctcttctttctgcatgggactaccgtgctccgatcacccacgccctgagaggaccacacatcaccgtcctcaagttcaaaaaactccaagggcacacggctcgggatcacaaaattaatgcctccaagtgatggtgaaaccattcgtagcttccactttttctatggatgactggagacactctctgatgttgggccgagcttgacgcgacaagataaaagtagttttagaacactttt

SEQ ID NO: 395618 - DNA, 968 bp, Cannabis indica
tctctctttctctctctcctcaccgttctctttctcttcttctcactcatcatcacagagtcttaacggagaagttgagctgaccgttcatcctcttaacggcgtaacggagttttcaaacccgaaacgccgttttcttaactcattcggtcacgtgccatccaaaccattaattataataatattttaatttttttataatattagtagtaataatctcatctattttttctttttaatggctttggagctcagcttacctacgaaccccgttgacaccgaggctgacggtgtcactaacggcgtcgaagcccggccttcctccactgacggcggagatgacggaagcagagcccccagactcccccgctggactcgccaagaaattctcgtcctcatacaggggaagcgggtcgccgagagcaaagtccgcagaatccgaactgccggaaccgctttcgggtcgggccaggtggagccgaagtgggcttcggtttcttcgtattgcaggatgcacggggtcaaccggggccccgttcagtgccggaaacggtggagcaatttggccggcgattataagaagattaaggagtgggaattgcagaggaaagacgcgtcggactctttctgggctatgaggaacgacttgagacgcgagaggaagttaccgggttttttcgataaggaggtttacgatattttggatgccgggtcgggtagcggaatcggtcagcaaacctctctggttgtggctccgccgccggcggaggaggtagagaaggacgccaccgctgaggagccggaggaaaacacagtcatgttcgatagtcgccgaggggttacagctgaggatggcatgttctcggatttcgagcaggaggaatccggtcggagctcggagaaggaagcagaagcgacgatggcggcggccaaggaagcccctccggcggcttctatagggattcctg

SEQ ID NO: 395619 - DNA, 972 bp, Cannabis indica
gtcatgcttatctgcaaaagtgtgatgagtctcttgtgccacccccttgtccttatgaccttctccttcgtggtaaagagaagttgtctgagaaacctttgccattccagtacccccatcgctcctgccattaccattgctgatgtggatatctctgattttcctcaaggggggcaagttgtcatccttatttcaattactctatggggttcactcctcttctcaactctcatatgtcttcggtttcttgcttaagtgctcctaggacctctgcaagtgtgatgatccctactcctgtcaaccccaaccagggtctggttggtggtttttttaatcctatgattgtcactacctcttctgctgctgccactactaatctttccatgtttagtggaggtttggtgtgttcggagggacctagctctttgttttcgatgttttctcaggggtttagttcagtttcctggcggatgctttaccctccctggctctgagccggcctatacttgctgctcctgtttttcatgcagaagctcctagacaggactctactgttaaagggaagggccttgcatgtgcttcaggggttaaaagaccttgcttccagccagctcaggcaacagtgggagattctctgcggtctattcttaagcgtgctagagcaggggaggctgaatttgtcgaaactctgtccgcgaatgatgatgaaaaggcgggtgtgctcggtgatgctgagcacacccgcccagaataatgagtttgataagttggaatgctcgggagctgtggaacccccgagcattatatcgactctccctccttgtcaagaatcataggcctactttgctttttttgatggaaaccaggttgaagcgcacttctgttgataggtttaaatgggctttagattatgttaatggttttgaagtccctaggaagtattttgggggaggacttcttcttttgtggggg

SEQ ID NO: 395620 - DNA, 798 bp, Cannabis indica
atatatgaagtctatatgtgatcctaagcctccatcatgacttatggaaggctataattgctttctagtgtatagcattttcaagtgatccatgtgatgatgcatttggccaagttaatgattttttttttgttctagaataaaattttaagataaataaattaaattatttgtaaacaaaagcacaaaaatgttttgcccttctaggaagttcccacatgtagttcttggtcaagtggacaaattttggagatttaatataaaaaagtatcttatattaaagttaaattctagtttgaatcccatgttttaaaaatttataagaaggacattctcaatattaaaatagtaaaaaaatagtccttcctaaataatattagtcaatattttttttttttaaaaaaaaaaagagaaattctattaaaatgcaccaagattaattagattcaagatacaaaagataagtgaaattaaatacctaaattcataggtaggcctcgccaccaaacacaagccccgtctaaatcaaggatccgttttgctaaagaataagcaactcagttcttagaccttttataataagtcaaagatatgctattaaaagattttcaaacatggttaatatcatcaagtacaatgccaaactcattaagacgaggatccttgctattaacaacaagaactaaccgctgacaatcagaaaaggcagtaacggacgtatatcccaactgcaggcaataagaaagcccttgaagtcaaattttagtatcacactatcactaaatttagtgtcaaaaa

SEQ ID NO: 395621 - DNA, 756 bp, Cannabis indica
tatatatttttatatttttccagattttttttaggttttaggtcattctaaaaaatatttttgtttgtatgttgtttttaccgtgcggcaggatcggccgtgataatatatggacctaaggcgaattaaaatttggggctcttagatttatatatacatacatataaaatattaaaaaaaagtgtcacgagattcaaaccaatgacattgtataatatgacatacatctcaaccaactaagctatgaatatttattatttacaaaggaaaaatggtaaaaaagtattatggtgtctagtactatttttagtgtcataccacagttgctataattaagtatcgaatcttatataacttaaaaaaatagatcctaaaaaatatcgttaaacaatcataaattgttacctataaaagatattgagcattactagtgctcaatagcaatacgttttttagtcctatcttacttagatgagtgagaacttatgtgtaaaagaaagtaaaattcttaatggagagatttcaaaccaaactgtctggaagagtttggaaactttgtctttgatatcaacgaagtgactatgttctaggcgtttggttgggaggaatgaaaatataggaataggaatgggaatgggaatgggaataggaatggaatgaaataaaatttaaaatgcataaaataattgaataaaaaataattaaatttttttcttgttacattggaatggtcattccttccttttaaaatggaat

SEQ ID NO: 395622 - DNA, 1079 bp, Cannabis indica
tgaatgagagagtgagaattggattcaatttgagagtgacagatggagcagtgaggggagggagcagaattgcgatgaaagagattaagattggtagggaggatgtggttgaacgctttccaagtgaaatgtttaatttttggagggatattggaggaccaaactgaaatccaccaacgtttaaaagtggaaagattagaagggccaggagaagagaaactggaattagccaagtgataagcagagttaacagtaaaacaaccagagggatgatgattccagatgagagtatcagtattatgaggatcaataggcaccgataggatggcagagcacatctcctcatcaaaataaaacctgagtttagtaaggtcccaatgtcgatcttcagtaaggaaaaaggaaacagtttgggaaggagggaggagacctggtttgaaaaaaaccctatcatgggaaggaagccaattggattcagaagtatttaccgaggtaccgtccccaattttccaaatgaggccttttatcagaagttcccgaccccaaagaatactacgccaacagaacgaaggcgagtgaccaatagcagcgtgcaagaaatcgtttcgcttgaaatacttggctttgaggagctgagcgactaaggagtcaggagaggtgaaaatacgccatgcttgtttggcaagcatggcttggttatggtggataatattacgaaagcccaaacccccaaaaaacttggaagagcagaggttgtcccattttttccaatgaatcttgttactgtggccgagggagccccaccagaatttaaacattagtctgctgaattgcttgcaaagggacacagggagacggaagcaggacatagcgtaagaggggatagcttgaataaccgactttaagagaatgtctttgccagctctagagaacagattttggttccagacagacagtttggagctagctttttgaagcagaaactggaaagaggaagttttttgatctagaaaaaacacgtgagggacgcccaggtattgtcaatgaaaggcttgttgtccaagttgagagtgtttctg

SEQ ID NO: 395623 - DNA, 1500 bp, Cannabis indica
acataccaaacaaaaacatgccatggttgaaccaagcttaagttttcaaactcaaacttgttcaaccacaacccctcaacccaaaagcaactagatccacaataaaactcaaaataagcttagaaaataatttccaacctaatcaaaccctaacaacccctatatctcaaagttgcatactcaaaccaaaatcaaagctttataaaccaagattaaaagttctaagggttaccttagcttgaatcctacttgaatctcttgctgaattccaagaaagatgaagaattaaggtggttctcttctggttttgtggtggctgaacaaagaaagagaagaaggaaagggttttccaattttcttgatttttctttgtttttctccaaatgaaataaagattgattaattaatctttgctgaaataaaatggctaggtgttaagttcctaagcttccacctaaccccctcatcaaaaatgaccaaaatgcccttttagcttaaacttagcctaatttaagcttaggggtaaaatggtgaaaaaccataaccccgctcaaacttggtattctactttctcctatataaatcccactaagaaataagattctagacttacccatgtgattaaaatagtcatccatcgtatttttgttgacgctgagcgaaaattgtaaaaataacataatttataataatacaaataatactcctagagtttaataaaatctccgaaattgagaaattataactctaatgcccactttatataatgggacccacaattaaataaattctttgtatctaggcgcccatacacctatttacaaggcttaacagatgagaaggaacgttctaattaagatatgaccacataccactgtgccacatgcacttagtaccaccattgtactagtgcaggtagggtatgaaatgtaccccgagtactgttaagtgttgtaccacatacatcgtgtaccttctcgtactagtgttggtaacaccatgacgtactcttcagacatcatacacattaccaatgcactttgtaccgccaccgtacaagtgttggtagtgtatgaatcacaacaagcatgcatatatatatatatatatatttcacacgtacatacattcacaaatatatcacatattatacgccgttcttacctcttttcaaaattcaagtgagttggccgacccaaacagaaagtctcgtactggacggatgccctaatcacatattaaagccaggtaaatcacacgtcaaaaccctaatccgagaaacctgaacctactacttaaggttttgccattactaataggaactacaatatcttcgaaaacatggaattgcccaaccaaggcactaaaatggacacaaattgggaaaatgaattgttcggggaatctgccaaaatcggttaaccggttttataggcaatggcaaactggttaaccgatttgcaccaggtttccccaaacaattccaaacttgctcaaaac

SEQ ID NO: 395624 - DNA, 843 bp, Cannabis indica
ggttcttggtctatgatggcaggttttgtggatctcgattttgaatgtcgataagtctgggctcctggtttatggtggccgcgtttgtaatttttttgttcagattttttttttttttttagatgtgttagatttatatttaactgatttggaattttgtgttgtataagttgaactttgttataaaatgttagtttggaggttatattttagattttttcgtattgaactttgtcgaatgtttaactccatttcaatttttttatgggtacaatttggtttctaatccttttgttaaaaaataatataataaaaagattatataatttgaatatatattttttttaatcagaatagatttaatcataatagatttggatgatttatgttggttttgttatttttttttttttaaaaaaaaaaggtaaaaatggcccaaaaaggactaaacgcttgggtggtggatgtctatgatggttttgagggttttggtatgagatgaaaaataaagaagatgaataaatgagccttcaattagggttataaaactttatcagttatttggtaataaccatcatcgtaaatgacacacaaagctagttttaggggtagggtgggtgcttgaaaaaaatattttatttattaatataacacgataattaaatatttatttacactactaaaattacaaaatttcttcatctcaatcacatttgtctcttatagagtactcggttcccttatttaagtttgactcctattagagtctttttattttagaattattacataaaaaatataaattgacaatttatttacaaaaatacctccataaggtatgaa

SEQ ID NO: 395625 - DNA, 727 bp, Cannabis indica
aatgaagtcccaataatctttgaatttgagttctatcacaaccttagtcattatatctaaaggaatagtagacatctacatggcttgttcttgcatgaaagatttattagttcttactaaataaattgcactctgaaatatcacaagtcaccttaatgagtttttgtataaagcactattcttcaagtaagctttgtagctagcttccttagcaacctttatacagggttggtcttgagctcaaatgagttatagagagattttttttaagcctttattataaagataaatagtatttttaaaaattattaaaaaaatatgtatattttctaaaaagtaatttttttatttggacccctaaaataaatggcccctaagcggccctgcctcactaactaccatatagtttacttatgcgctagattaaatacttgttgactgcaaagtagacttctaatttactggtacttttcaagagtgaaaatatagtcagtagttgatcgacacttgtctatctcatgcatagttagaaattatagaattgtgatattgaactacacaccgaccaactatctcattttgttcaaatattaattaacatatacaatatttgacatattaaacctaatacacattattgtatacgctttttggtaacacttttattttttaattttttaatcacaaaataaaagtaaaatttttgtttttaaaaaattttgttttt

SEQ ID NO: 395626 - DNA, 776 bp, Cannabis indica
ggtaaagggcctcctgctggagccaggtttagatggagtaatcggttcttgatccattcatacaaatgacctaatttgattaggttctcaatttcatcttttaggttcttgcattcattagtgttgtgcccaatgtcgttgttatattcacaccttttactgggatccctctgggagctatccctatacaggggaggaggcttccgctaatgcgtattctgcctagtggcaaagtatacacgctcatgtgtgtccgtaagctccgtgtattgagtgtattgaggggtataccccctccgttgtcgtttgtccttagttcaggtgctgcccttcgaggaccttttgctccaggagctctgacgaggtactgctaggctaatggcaggcgcagattgggacacggtttggacactcatccccgagggattgcccatgggtgacccaaagtgtgatgatgtgggagccagggcgaggctttgattatatcctggggtagtggagaatggtattccgctcatttgaggagtggccagagacggggctcccggaagctgtgcttcaggtgcatatcctgatactccggtcaggtagtatcctatataagccactatttgggctccttccaagttgatgtacttttggatcctttcgggaaatcttggagattagctactccctcttgttgtagttcattccaataaggagtccccgtgcgaatcccagcttggaggagggtcagctgttgtctgtcgtctaccttatgttggaaattattt

SEQ ID NO: 395627 - DNA, 686 bp, Cannabis indica
agcttacatcgccatttccaacttgagcaatggcaatggaggtaattgaagaagtagcctatcaaacaagtcagttggcagcttacatataactggcaccaaatcatcttctacaaattcatcacaaaacaacatcaaaaatcaaaatcacaaattttacaaattagtagcagtatattcaattagtgtactaataataccacgaagcagttcgtttttgacttcctcaagacacaagctagtcaaagatggagctttccccattctgaaaccctagaaaaacatttcccccaaatccgaaattagtccataggagttagggtttcacatgccggaaagctaagatgggtactcatcggaagcttttctcatcgtataacttaatttaattttatttttgccaaattttgctaaactatctcatttttattgattaagatgcagctttttcttatatattttactaaattttactcataagttattttttgtttcttatatttacagcaaattttgattttttgagtaaccattataggttagcaaattttaaaatctttgtatattatatgttgtgtgatagacatagtcttaaaatttgcattaagttgctatattgatttttaggtttatttttttcaacaaaaattacattttgcattagtgttttaagtagtttttttaat

SEQ ID NO: 395628 - DNA, 1108 bp, Cannabis indica
tatccggaaggtaacatcaaatgttggaggttacctctttttagattcaggcaaaatgataccgaatttaattttatcctgaataatctcacgtccaaactttagggctagaaagcgaagacgctgtctaaagcgggtcgtgccacccttataaagtctgtgggcttgacgttgcccatgtatgttatgcaaacgaccaagctctcgagccgccttgttgctaagattgatggaatggttcgtgatttctggtgagagtttgaaaaggataatcatggtctccatctaaaagcttgggataagctttgcctccccaagtctatagggggtcttggatttagaaaaactagagagatgaatcaagcgtttacggcgaaatgggggtggaacctcttgaatggtaaccaatccctttgctgcaggatcttggaagctaaataccttaaaggaaagcttttccttaacagtacttccaaagattcagattcttggttttggaaaaatatggttagaaccatctctgtcttaagaaaaggagcttacaagttggtggcggatgaaaaggatacgaaggtttgggaggacccttggatagctcatgagaaagacttttttcttcgttctaatggttcctccactagtggagtgaaaaaagttaccgagcttctattagataatggcagctggaatatccatgtttctgcaatcctgaaagggggcattccgtatggccagggcaatgatagatggatttggactttggaaaataatggtcggttcatgagaaaatcggcctatctagcccaagctttagatagggtacctccttctgaggttgctccttcgctatggaaaaagttgtgtaattgtaatatctcagaaaggttgaagactctgtggtggtgtatcttgtccaaggcaatcccagattgatttgagatctgtaaaaggtttcctattgaggatgttaattgtcctttttgtgggacagagaatgaatctattgaacatctgtttctttccagtaatgtgacttttcacttgtggcgatcctttccttggggtatttaccctatttgtggtactggtatgttggaaattattttac

SEQ ID NO: 395629 - DNA, 2005 bp, Cannabis indica
tgaagcatataataataatcatcttatattgggttgagatatactataatcatgagcaactatatgttcgggatttaataaaaattttatatcgaacttataatcatgaaagtaatcatatgaaacaagcaacaaagatgatttttgatttttttattaattagtaaataaaattatattgaaatagattttatttagggcataaaaccccaacatgtccgtgggtcttcgaggaggggcacccattacaccgttccctttgttattttctagggaggagggcccaactctaggattgttaaatttcatagcaggagggcttttttctaggaggttagcttgaacttgtagcagtgccaaggtttcttgtatctaacgcaaggcttctccctgctttgctaacctcctttaggtgtctgcaagctcctactagagtcgtattacttcaggatcttgctcgtagtattcgtcttcatactcttggttgtagtttttattatggtcatttcccaaccttcttgctcatcctcatcaatgggattgtcatcaacttgatttttgcgatgctggtcttttggttgcggacggttgcccaccttcgacattaccccatccctcgcgaaagccatttgagcgtttgtcggggagagttagttttcactgtctttaaacaacatcgtccctaacatgtcaaggagacgacttgaccattgcctttcagattgcaatcactattgtagatgacaactatgttaaatctttcctcatctctcgatgaaagcaccaaaatatttatcaaaattttcggaaatatattatgaaataagcttaaaaaagaatgaagaaaacaaccaagattttacatgatctaggcactaatgagccttagttctcgagtcaatattatcaatctaaaaaggcttcaaagtatctttacacaaatattttttactttaacaaatgaaccttaattcttaacctttttctaagaattgatttcccaaccaatccctttacatgaagggaacatgttctatttatagagtagaactgagtatgggtgaacccaaacccggtaggatttagaggtgtcaactaggtccactgataaggtaaaatacaatatgtattcactttaggccaatggggtgaggcctaattcacgagataacggtcgtccatatgagtgggtaccgactataatgccacatgtcgtgcactgttgtgttggtactgagaatgtcaaagaatatgacgatcgacaaaatggtggttgccttttggtagtgcgcgcactccatggacaaaccctgacatggtgggatcctgtgtttggaggacgctacgtatgatgatattcagagacttctagatgtctcttcaattgaccgcgcgtatactgataatccaatgagggcaaccagttagatcttgatggactcttcgccctctgaactaaacagcctttcacggacaaaagttgtccgatctgtctgccaactagacttacattcagattcggagccatagcctaagtccaaagatgggtcgacttataaattttagtgggcccagaaatgtgcctgctttagctgatgttgagctttggaaatgcacatgtcattaatctaaaaacgcggattacattttttattttttagatataataatcaattattacattatttagtattctacatgaaattagcttggtacattgtacacatagttgttttatttgtgaatgaagcttagacaatgataacaggttaacttctatttttattttggaagataataaaaaatagggtaaattgcgggataaatacctaatgtttcagattttacacacttaaatacctaatgtttatttttggaggcaaaaatacctaatgttacaattctcttacaccgttactaccacatccgttaactcataaatatagacatgcggagggttcagatgcattacatttatttttactttattttaaaacttaatatt

SEQ ID NO: 395630 - DNA, 1296 bp, Cannabis indica
ccaaaaatctgaaaacacctttcttatgccttaaaaaattcttccaaggtactttgactttttccaaccaagtttgactttccttgagttgtaagtagcttaaactattgaacctgagatgactaggatgaagagaaacaaaaggctactagataaatatgatccccatgttgctcagctcattagagctaagctgacaatgcctaagtctaagaacttggacaaagggcgtagtagaaaagtgatggcaactgagcttctcaaagctgccattgaaagtgatgattcgagagattgagcctttaatcttaagcctcttgtgcctaatacccttaccgtgcttcaagctcaaacaatttgggatgattattgccttcttgaaactgttgttcggaagccttgacatggtgctcccaagggtttccagaatacttactatagtgcttggtagagattccacatgaatgcgggtccttacttgctctttcatccatggtttatatccacaactgacttcttcagtgtctgcccttaccagataaaccccaatagttatagaattctagccaccttcttcatattttatcaccttaggaactggcctatcccaactactcatgaaataaactttttatgcgactttaaaaggattccaactcgtagagatcaaggcttttaccatttctaccaatttggcccattcatagaacacataaccaaaagcaattgtggcctttactaccaagagtatttctatcctcttgttcttttgtcaaaacacatcaccttccacaaagctagccctttcaaaagacccgctactcttattgacataaaggggagagatgatgccatgttgcttgaaattaatgtgtgtgtgagagatggttgaaccctctttggtactgaaaatctttggaaggttggtgttgacctcaaaaattagccaatcgacagtggagtcgtatttaatgttgatgcttgccatgtgttacacaataagaataataaaataaataagatacatgattttatagaggtttgaccccattagttagcgggtaatgacctgctccccttttagttgtattgatattgagagataatactattcagatcactatagtgatgggatccgaagtagctctgttaatattacaatatataaattagtaggaaaatcataatgagagagagaaagagaaagagccttagaggcatgtgagtgagagagagggagccccttgggagtttaccccaggtagagcatgcttaaccgtggagttctttcgtgat

SEQ ID NO: 395631 - DNA, 1012 bp, Cannabis indica
acatattccatttctattttattagcacaggaaataaagcttctagattccaattgatccaataccaactattatgaatccaattgatccaaaaaaaaaaaaaaatttgtagctaaggctcaaaaaattccatatagcaacaatatttcaagtaatgatgtctctgaaatccaatacacccgctgactttggagtaaaaagttttctccaagaaaccttgcctggtccaactaactctacttctcatttccataaaaaactcctgcaaatagcattaatcttttgaagaatttttttggtagaatcataatttgagatcaataagtatgaatggcaatcaacacagagttgatcaatgtggccctaccagcaaatgagaggttcctagaactccataggcgcactcgttgcaccattatctcaatcaaaatttcacaatccagttttgaaagtctctttgaacaaattgacactccgaggtatttaaaaggaaaattacctttcgaataccctggagcatctagcactctttgcgcttcattcttatccatgcaacaacaataaatcgtcaatttagtgtcattaggaaataaccctaaagttttggaaaaaatactttaaacctcgaagcaaaatatgtatcatgagtcaccatgataaaacatgagcacatcattagcaaagcataaaggattaagctcaagacttttacacctatcatgaaacttgaattccttttcccccctaattttcttcaatatttgagacaaattttttatctcaagaacaaaatataatgggaacattgggtcttcttgcctcaaacctcttttttcttcaaagtataatggaaatgggaacttgaatttccaggaggtcacccatcctgaaattgccccaagtcaagcatgcttaactgtggagttctttcgtgatgggctaccgaaaaataagatgcaccttgttgatataggtagtaccaatcaatccatttaagccctcttcaactgtg

SEQ ID NO: 395632 - DNA, 1197 bp, Cannabis indica
attattattattattattattattattattattattattattattattattattattattattattattattattataaacaaacatttttaataatcagaccaaacacaataataatatgatgaaatatatattctcatttgtattaattggacttgaatctcatcattttattaacaaaaaagtgaaaatatactgaaatccatgaaaaaggggacaaaattaaacagtgttctacataatataaatataatcacactaaatttgaaaaaatggtgtactagaaaggaggacggattgtaggtattgcaatgacaccatagtgttgcggcggacgaaatggcggctcagctccacctccaacaccctcaattggccacctagctacttcaaacggcggcggcggtgggggcatcattagtcctgcaaggaccattggttcagcattgcctggcagcagcggacgaaatggttcgggtgcagcagcctcatctggccccggaggcagtggcgggatgaaaaaatttggccctgcagcaaacgggggagggaaaaagggtggtggcgggagaaaatgtggagcaatctgtggcagcgggagaaaatgtggcgcaagtggatgaagttgaagaccaatgtgaggctgcagtgggatctgtggctgtagatggggctgcggaggcctggcccggggtcgggactggcgattgggttgtgaagtactcctctgaggtggtgtagtctggtttggagtacttagttcagccatgatggagccaattggatttggtacgaattgaaattcaggggaatttgaaataattaatgaaaatgagtaatatcaagacagtaaatcattaatttcaaactaattgaaagaagaaccaaaaactaaactaactgttaaagaactcaatgccaagaactcataaatttattatcttacatagttatttcaaactaataattgtaataatagtttattaaattaatcaagatccttatgctgttaaaatgcataagaaatggatgacgattatgatcagaacaagatgattaattcattgtcaaagaaacgaaaattacttgctcaagaactcaatccgaaattcaaatatgattaattaaaagaagaaaagaaactattgggtttatttttaaattttaatgaaaaaaaaatataatgattagctgtat

SEQ ID NO: 395633 - DNA, 549 bp, Cannabis indica
gtgatctttaagttacaatctatttttatatttgtaactcctcatatgttatgatttttatgtgtattattatactatacatgatataatataaccttaaacaaataatacatattaatctcatattaatatataataggtcacatttaaatattttgatctatatcatattataacaaataatataacactaccttttctatgaaagcatttttgctataataatagttaactactggtttaaatattttgtgtgataataaaattaaaatgtgtgagacttaatatttaattacattatatgggatttgtaaaaatatatggggtgaatggtgtggctgcttttttatataggtgtgcttctttgagattattgtgtaatatatatttatccatatatagataaatattattttggatcttgtgtttttgtaaaaattatcaatgatttttattttgttaaatgacaatttgaactttgcgtttttcaaaatggtagatttagaccttgagctttgaaattctgtattttaatattcccagtttgat

SEQ ID NO: 395634 - DNA, 1090 bp, Cannabis indica
taagtatcgaagatactacgtaagagcaatcaactataataactatacgattcgagttgttgatcccaaatttcacgaattacatgacaaaaaccattcatcttcattcaacaccaacactttgtcccttggatattttgacgcatattatcgtaatttttattcaccccaattttatttggtgtttggaagtacgagaaaagttgcgaaaaccctagtgttgattagctgtgaaagaagaatgatgaaatcttcttattattacattgatgctaatccttgcatgtcaagaaagaataatagcaacaattttacatggtcatattatttgttggatgttgatgaaatgagtccttctgagttggatttttgcttgatacaacaagtaactctcattgatcaaagttttcatggttcatcatgtcatgacattatcaagcaactagcttatggttttcacctttcatggatccaaagttttgacaaatcaaaatggactcaagagttttgttccctcaatgaatattccaacaaagttcattgtgtttctagtaaatgtgcgactaaagatacattcgaaccagatgatcaaaaactttgtgagggtatatatatacacatttccaaaaataattgataaagaatgatttaaatatataaatatttatatatctaatgattgtttgctatttttatgatgcagtcacatttctaataatgcttcgccaagctatgtattacatcaaatgtaagtgatggctaatttttttttattcataacatttaattaattgatcatttcatctctatttctatattaagtttatttatcctaattgtttattgttttcttttatttctatgcagactacttgtacgagaaaggacgttacatatacaccggtatgattatatttttcaagcaaaagaaaacttttattgaagcaagttactcactataaaaaattttacttttaatcacaacatgtgactaattataaattatcattcttatattgtgattaaaaagtctctggctaaaaatattaatcacaaaaattacaatttgttgtgactaaatatgttttta

SEQ ID NO: 395635 - DNA, 702 bp, Cannabis indica
aaaaaaataccaaaagaaaaaacacttctacttgaaaaaatgtactcatcttgttttatccatcccgctgaaagtactacaaaatacaccaataaaaaaattaaagctaaaaataatatgaaaatttcatacaggaagaaacatcttccgaaaataattgttgttagttaatacttatatgtgaagtgtcatcaggtaacaacttaaagctctaaacaacacaaagctaatatggtgttaaataatacacaagtgtgtgattaaggtacatacatgtacttctattttagaattaattgataataagatgaatggtccatacattttatatatgatatggatatgattttgtcctgtgatgtacttttacggaatgtattccgtggtacactagatgggtcttagggtacagtaaatgagtgtcagggtacgtttttactttttaaccctaattacccctcgatcaatttcagccgtcagattaaataactacatcatttgacggctgccgtacatcacagattacaatccgtgaaagtgcaataacaggacaaaatcataataatataggactctaacacaagaacaataatgagaatgaaaataaaaattggaatgtgcataaaaagattgataaaaaaatggttaattagaatttttaccccttgaactttgacatatactaaatcatgccccctaaac

SEQ ID NO: 395636 - DNA, 711 bp, Cannabis indica
gggtccatgtccaagttgaggtccaggtctaggcctgggtcccaagtctggggcccgagatctgggttggggttcggggccagtccaggttcgagtcttgatgcaactacgagcccccttaaaccttaataacttcttttttgagttaattagcctattgtttgggtcatttttacagttaattttcttcttcattgtcactttttggaatggaattacgcttgttttcttttgttttaagtttcgacacttgaaatgtataaattggttagatttcgaaaacggttatttataaaatacagaaaattttacaagaaaataaagctaaaactccatgcctaaattcaactatgttctgatcagattttggacaaagtcaaaatatagaagttttagatatcttttcatctttttagtgcatcttgaatcaatttatttggagttcgtatgtgaaagttatgcatatgttactgagagaggtcgaagtaggaacattttggtcgcgactaatattcgtggcagcggcgagcatcgacttatggccacagtgagatggctataggaagcctcgaatttgattttctatagtcgtcgtggtgaggcagcgacgcttccatacggacatgggcaactttggcttttttcaattttgggctaaaaaactccattttaatgaaaaggagtcacgaattttaggaggatattgttggg

SEQ ID NO: 395637 - DNA, 631 bp, Cannabis indica
tctctctctctctctcgatctccgcctatttccatcttctcactcaaggtatatatatttatttattaatacatataattatttatttatttattcagttatatatttatttattacaggtcgaaccctatcctcagacctgaccccgaatcctggactcagacttgaaccaaggtccaacctcgaagtttgaggatggggtttgggttcgacccaagatttgtggcccggagccaaagatgcgatctaggtctagggctgacgtcgagtttatggtaaaaatattataattttatacaacctattaatacaaattaataccaaacaaaatattttattaaataatgccaaataatacaataaaattcaatacagtacaatacaatataatatattgtacaaaatgagctttcatgtctttatgtttgacagtaaaggccaaaaattggcagcaaggccgagaaattaagtacttgaaattcatgttaaggagacttgaattaggatttgatcccaatttacactaggaggtagggctgaacattttgagcgggtttgacccgaacccgagcaacccacccgaacacgaattggtgaacccaacaaaaaaaaaatttaaaaaagtttcggg

SEQ ID NO: 395638 - DNA, 2778 bp, Cannabis indica
cccttcctcagcagttcctcgtcaaatccctcctgttcaagttcaatctcagaatgcaaatcaaggttttcactaaaattccaccaatactgaagacaagtaaactcagactctccaatcgtgatcggttgctgatgatcattccagcccgttcttcctcagcaccggcgacaacccaggtctggttcttgtgaccactgtcctcaacggaaccaactatcagctgtggaaacgaggcatcacgatggctttgacagctaagaacaagatcgcgttcatcaacggatctcttcctcgtcccgaacctggtaacacaaatctaaactcttggttaaggtgaaataatatggtaatgtcttggttgattaattctgtttcacctgggattgcacaaagtataatgtactttgatttagctactgaaatgtggagcgatcttgctgagcatttcaatgaaggcaatggccctcaaatttttcaattacaaacatagctcactccgtttcagcagggtgacagctctgtttctacatattttacaaaattgaaatccctttcggatgagttgaaagaatttcaacccattaccacttgcacttatggtgcaatgaaagttttcttggattcttacaaccaaaatcaagttcttcaattcttgactggtttaaacgaatcctatacttcggttcgtgctcaaatattgcttaacgaacccataccaaatctgtcctgagtgtttgcaatgattgttcaagaagaacgtcaaagattgttgggaacctctgaatcaattaccttggctgctgcatctagttctaccaacctccaagagccaagaaacctaaaccatcttgctcaaattgtggaaaacccggtcaccttgttgataagtgctatttcctcctggttatggggacaaaagaaagcaagaaaaaggcaaagccaaggccaatattgctactgcaaacacctagaaaaatgacactgagagcagctctggtcacattgatctctcctctcaattccagcaactaatctctctgttaagccacaacctagcagcacaacaaatgcagaactagctgcaatcccccctgctacatcgaacctgacaggtacaacattaaactcaacttcttggattgtggacagtggtgccactcaccacatgtgttgcaatttcagttgtttttcatccttttctaacataccatttcctaaatttgtgtctttaccaaatggacaaactcttcctgtccacaacattggcactgtcaagataaactcaaaaataacactgcagaatgtagtttttgtcccacaatttcagctcaatcttttttctataacagattacatgctcaatactcttaactcagtgttgtttcatcaaaattgttgtgttattcaggatcctactctgaatgtggtgattgggacaactaaaaagtgtggcaaattgttcttgcttcaccaagaaactcccactacagcagctactgctactactgtttccttttctttcaataaaaacaatgtaaaccaatggtataatcgccttggacatccatcgatgtgtatttcaagtttttttcaataaagaagataacattttacatcctaattccactttacattgtcacatttaccatttagcaaagcaaaaacgattgccatttatttctaatcaccatttttccaaaaacatatttgatttggttaacatggacatttggggtccctttcatataactactatagaaggttataaatattttctcactatagttgatggcaagtcaaggttcacttggatctatatgcttaagaacaaatcagatgttcaacatataattcccaatttcttcaatatgatcactcagacaatgcaaaagaattgaacttacaatctttctttgcctcaaagagcattattgattaccactcttgtgtggaaagaccacaacaaaattcaattgtggcaaaaacatcaacatatactcaacatagcccgagcactaggattccaatccaacttacccttggtttattggtcttacctagtccaaacggttacatacctaatgaatagaacaccctccaaactgtttaaagggttaacatcataccaagttcttcataatacaactcctaaatatgatcacttaagaagcttcgggtgcttagcttatggctccaccctctcttccaagagacacaaattcacacctaggagtagggcctctatttttattagttaccctcatggcatgaaagcctatattctattggatattgaaaccaaacaaatttatatttcacgagaagttgtcttccatgaaaccattttatctttggtttcaccaacatccacatctaaaataaatcaattatttgctgacattgttcttccaacttttaagccaatacaacaacaggcccctacaacaaaacctacaaatgaagcatccaactcattcacaccagcaaccgagttctccaacccatttggtgtcacaccagatcctactactcacaacatacaacctcaaccactccaatgtggttctgaccatctggtttccacaccagaaactcaccaagggaacatttcagactggtagcattcaggcaccagtagctaccatcaattccaccaaacaacagacagcttctactcctgaagccattcccccaaataccttctaaattgacagcacaccagcatcaacaactccagcttccatatccgaagccaccactactggtcctaacaaa

SEQ ID NO: 395639 - DNA, 541 bp, Cannabis indica
agaaagcccaaactccacctaattagctctaaaaaaaatagcaagagaagaatatcattaaaaaatcacaaatcaaccgtgattaaattttaaatacaatccgaataatcgagccactgaactttgataattgccacaaataaaacaaacttaacaagattgtaggcaataatattaactgtcttagaataatgaaaaaaactaacattattaaagaaagccaaattacaatatgtcttaaagaactaagcctaacgatgagtgcaaagatacaatataactaatcttatagccacattaagacagtcacactactataaaattgggttttaacgatggttgtaagaattttcagcgtcagttttgacgaaatttgctaaatactgttctaggcgacgcttaaaggtaaaaaacaaccgacgatataagaaccctatagtgtcagttattatacaataaccgaccgacgccataagaccgtatggagtcggttatttcataataaccgacgccataaagtcttcctatagttttttttttt

SEQ ID NO: 395640 - DNA, 646 bp, Cannabis indica
ttagaattaagcaacttcaaattcagatgcaataagagaacataaattaacatgggatcttattctatacagctaagaagaacagaacatttcacagaccaaactcaaaccaatttttcatgttaattatgagtcttggttggttggttggtatggtatggtcctgttttgaacatactataaaccaacatgaacagaacaggtgaattatagttgccattgaacttggaatatacacaataaaacatcatgaaaccatagataacttgttacaatgaaagattgggcattgaagcaatccttgacagaaatattggtgtgagatcaagttttgtaagcagcaaatttattagttttaaactacctataaagtaaatacaatctcaaaagaaccaattataggttacacattcaatagttttgaatggatgccccttttcagttactaataatatcatcaaaaaagaattaatagcagaaaatcactttagaatctttatattatacagctaaaaaatgtccaaacatttgagaaaccaatttttcatcacctttcctaatgaaaatataatattgaatttccagtcagccaagtaacaaggtattgaaaatataatataatcaaaaaaacgcttctttattcttt

SEQ ID NO: 395641 - DNA, 834 bp, Cannabis indica
aagtgaacaaccatcaaaataaaagctttcctggaaacaactcctcggtgaacatgctcctccactactagatggttgccacgttgacctactactactgaaaatggaagtcaccttccatgattgactaacacctggaaactaatgtaagattacttttacacctccacatgtccacattgatggaatggggcagcaagatgattattcacatgttgaacctcatacttgacctcctagacatctggaggagcagaacttgaacttgcaccatcagaagcagcaccaccagctttaagatgcttgggaaaagctccatcaaagtacttcgagggttgaaatatggtgccagtgaggggaggctcaagtgtctcatgagaataggccacatctttctgagaggatagtattttatagattaagttaggaaacacaagcttatgagtactccttgtacctcttcaaaatgacataatttgatccaagatataggaagctaaattgatagatgccctcgaggtgatacaaaagagaaaagaggccacatcttgagacaccgcggttttgttgaaattgggaagccaactgctaagggcaaacctcatgagtgatgcatgggcatatgtgagatgagtaatgcgaagactctacccagatttccactcaactcgtgcaccagtgagttcagtgagtatcagatggcgatccatatacattatagcatttgtcacatcttctagcagttacaaagccttggaaatgtctttttcaaaaaaggaaaaccaatgttctcgaacatacactttacaaaaaaaaaaattagaattctcatca

SEQ ID NO: 395642 - DNA, 721 bp, Cannabis indica
aaaaaaaaaaaaaaaactctggaggcgaacagagagtatcatacaagacactttttttttagggtaacggaaaatcacacttttgagatttattttttaaattaggaaaaaaaaaaggaaagatttttggaaaacgacaatgacaatgaaaaacgacattaatattaaaaaacgacaagaatttgaaaaacgacattagtgaaggaaagaggcaggtttcttttatcattatcataaaagacacgtttatttgttttattagggtaatggaaaatcacactattgggattttttatttattttttaaattaaaaaaagaaatagagaaaaaatagatttttgaaaaaattgtaatgaaaaacgacgttaatagtataaacgacaatgatttagagaaaacgacattaataataaaaaacgacaattatgtggaaaacgacatgaatgaaggaataacgacggtaatgtaagacgtacgagattaattttgaaaataacatcaatcaatttataaaaacgatcctaattggtagaaacgacacaaattcaaaaacgacaataatttagaaaaacgacgaaaattgggaaaaacaacgagagtttgcaaaccagatttttaaaccagtcacactttttttttaagggtaatcgaaaatcacactattaagatttttcatttattttaaattagattaaatggatttaaaaaaaaaaaaaaaaa

SEQ ID NO: 395643 - DNA, 1647 bp, Cannabis indica
cacttcccagctattacaccggctgtggtgtctagaggaattattcaattgactacggcccactatacaaccctacaggagcaaatacaagctttacaagtcgaggttgatggaagggtcaggacccgacgtcctcctcgagtgccaaacacacgtttagataacccataggtaacagccactaggtgatgaactaacaataattgtactcatagggaacatgagaatgaacaagatggtctcgacttgaaccggcctacacataactttgtgcaaaacagggaactagtcgcacgaaacgctgattgcattagggacgaaataccaaaggaggaaaatgccaagcgatgtaactcgcgaagccgatcccagccgcgagttgaggtaaacgatgtcgagtcccactcttcttccactaatagtcgttctccaagtgcttataccaggtctggatctgtggagacgtgacaagggggaagatatcatgtccataggggtgatctccgtgatcacctcaaaaaaatttttagggcacgatctcaaatgccaaggaacaacaataacaacgagccccgtgatccccaggtgggcgatcaaggcacgcataacatgaacaacccgactaatatcgtcaacccgcctaacgtactagctgtgacaattaaggtagtaatcacgactatcataaccgcagttgctgccatgctaacagtagcacaagctaatcctgtcctaccaggaggcatagaccaagaaagcctactgagaacgttaaggatgatcgagcagcagagaaagcccatttacaaactccatgggacctcacctttcactaaagatgtgcgacaagctcgactccctaagggatttcaggttatccgaatcgctaaaatacaaaggcactactaatcccataaattatttagacaaatttaaaacaattatagaagtagaccaggtaccacagctagcgaagtgtcgcattcttgcgctaacccacttatgttgtactgacacaactaatgaggtcaataccacttatgttcctagaaagatagtcacggtacctcatcgtagcaggagcgtttcaaggaacccagcctattatgacttggaagacacttgcgataaaaatccattgttagtttaaacaagcaatgaatagtcagaataaggaagtaagaagcaaagtcaagagaactatggttaaaaccattcatatggagcaatcaaaactattctattataaggaaaagaagggaaattttgataataaatctattcaatggacttaacaaaacttcctgatcctagtatcatagttttaagattttctaaacctatggcttgaggtatacttggtaatttacttactctagtacaagcaacttactttagtaagatggtggagcatttttctagtagctaactccaaaggaagtgtttggctcctagacatagagtttatttatctaaagagcagttttaactattccaaaaaagataaatgccaagaaaagaattcattaagtattgacaatgagaagtctcatgtatgctctggtatgcattagaccagacacttgctgttaagtgggagttatgagtaaagataactttaatttaggaaaggaacattagaagaca

SEQ ID NO: 395644 - DNA, 1547 bp, Cannabis indica
gatcacaatcacattccactgtgttgacgatactgtaattgtgaataaacatatgatctggatttaactgattttgtgtgtatgaatgtaataaacatattaaaccattagcatgtaaaattcatgcaaacatcaatcacttcaaatttcttatattgataactaatcagattgtaaagagttttatttagggcataaaacccaacatcccttgtctccctatttatttcttctttgttctgaagggctttctgctgctctttgcattcagcaaagacttggaaattttaagggtatttcaattgcccgctctactcctgtcatctctcatttactctttgcggatgacacacttttgttttctaaggctactcaactctcatataacgctcttaaggcagctctccaactctataatcaagccattggccaacatgtcaattttggcaaatcatccatccttttttcccttaacactccttctcatgtttcgtgattatttttataataacataggccttgccaataaaccctttatgtccaagtaccttggggttccacaatgctttggtagatctaagaaaagtagttttaattttattcttaatcgtgtcagttctcaccttaatgtttggaacaataaatttttctctaaagcgggtaaagaagttctcttaaaggctgtcattcaggctatcccctcctatgttatgtcctgttataaaattcctgcctctatttgtcaaaaaattgagaagctcatggctcaattctggtggggttcttttgggaaaaaatctaaaactcattggaaatcttggtccttactttgcaactctaaattctttggggaactgggttttcgttccttgatccaccacaaccaagatttgctggccaaacaagcttggagagttttcaccacgcctgactctcttgctactcgtgttcttaaagctagattttaaaaactcttcttttttggacgccaccaaaggtcattccccctccttctcttggactagtctactttgggtagggatcttcttaaggatggcttaattggaaagttggtgatggaaactccatccgtactcttgaggactcttgggttccaaatctcagatttcttaggtacgaagataatcaacttcctccttctgataaagttaatttttttcatcagtcccaatggtcactggaactagctcaactatctaattattttgatagtgatgcagttgctaacattctcaggttcctataggggggaataataaaactgactgtcttatttggaaaggagatccttctgggctccttactgtcaagtctgcttaccattttgttaatactgtttctttgcccccttcatcctctaacatgggattttataatagttggtggaagaagttttggaatttatgtattcctcctaaaattaaaaacttcggttggagaaccttttatcacattcttcctactgcttacaatctttatgcaaaaaaaaaaaaaaaatagttccctctccttcttgctcttcttgt

SEQ ID NO: 395645 - DNA, 963 bp, Cannabis indica
atttataaagctcgaagaatcaggtcaacgtgtggacatagctggaaaaaaaaaacaacaatacaccaatactaccaatacgttcgtataacaaaccaaaattcctagaatcacagtagctcgagccaaggtggtaaaaggtcaaacaatagcaactgatagcctaatggaaagaaaattaaattcagtggtaacttcgaacaacatccttgggagaatgcctcaaatttcattgcttttaccatcctaatagaggatatagaaacaattttcacaatgacccagtccatggtgccatacgaaaaacctccttcccatgaagaaagatatgagtaaaagggatactgccaagttctgtcgctttcatgcggactacaaccatgatactaacaagtacaataatttgaagtcaaaaatagagttcctcgttaggaaaaatggcccgcacttgtagaaacatgtcaagaccgaccaagaacaaaagggcggcccaaccagataacacacaaaaccagttgatgcctccactagtggatagacatcttcaagtcatcattggaagcccccacattgctggagactctggcaaagctagggaaaaatatgcccaaaccatacaatgtgaacagattgatgcaatgttggtcgtagaagaaagaaagcctaagcaaccgcacattggagaaccaataatatcctttattatgaccacattatctatccacacaacaaacctttggttgttgatgtccatattgcaaataaaatggtggctcagaccatggttgaaagtggagcctcttcaaatattttgttcaaaataacatatgaaaatatgggtcttcaccttaaagacttggtcccctgcactcagctggtatacgacttctcctgtcaaagcattgctccacttggacagatctgcctaccacttacatgttggaatttattttaccaggatct

SEQ ID NO: 395646 - DNA, 1362 bp, Cannabis indica
cactgtttctctatgtaaggtctgattgtactctgttgtagattacgatttagagagagactttagatcaaaatagtttgagtgaggatggttgttgaagattttagtatgtatttgattacttactcacattggtaagttgttttgtagatgtaagacaccattcttggtgcatagatcttcgtgatcatttatataaactgagttacttgaataaaattaggctcaagacagtttttcatgaggagtgcatccaattttctttgacttgtgattgaacctctttccttatttgtccatcttttacaatttggtttagcaatctttcacagtatttgtattaactttgaatccaacaaaacttctttacatcttaacagcactaatactcttgatctgaatgtctcgtcttctatacattgatatcaccaatataactatatcgaaagttcaaaccactctctgtcttcttgtttcaacaatttgggtaagatcattgcaatcttatttttaatgtcttgtttcatgcaatatatcgaatgtgaagtagttgtaactttctacatccaaaaaacaatgtttcggttcttcctcacctggtataccaccgtggcaatttccatataaacctgctccccgagaggggataatcaagctctagtaatccatctcaacaacctcgacctcttcaacccagtccatgttaaaattattattgtgaataatataattataggcttaatactataaacataatcattaactatgtgcccaatatttgtcaacaatcttaatgagatgattaataattatttattatgttagagaggcacatgagagcactcttataactataattggccaattaaattatagtataccattattgaactacttaagtccaattagtgtataatcccttagggttagaagggtgtgacatatatatatgtcttgagtgaaaagggtggttaatggtaataagaagaaaagaggggatagcttcacgttgtgcttctctctaatattactctaatcttgtgtttgtgttaatccttattggagattcttagaattaaaatggctcacatagatggatcatcaatcgtaggtatgtgtgaatattatattttggatgctctaaataaatacttggatcttggtttgttttctatgactattattgtagtcactaattataatgctcttagatggataatttcttaacaattaatatctagagctaaagttgttgattttagagcttaaattattataaaccgttattgtaactttgagtgcatcaccagaagcagcagcctttttgtttttcatggctttggcacgcttcttggtgtttct

SEQ ID NO: 395647 - DNA, 624 bp, Cannabis indica
ctaaaaaaaaaaaaaaaaaaaaaatcctgactgaggtataaaaggattttcttaatccctttcttctctttcactatctcagactttcaaaaactccatttttgaatttccaagccagagctctctattctctagaaaaatttctccctccccatcgcctctagtggtggatgcaagagctctttgagtggtggtccaaatctttttaaacctctgttcaacccattttctaaaaatagagtcattggacctcaattcgttccaccactagtcttacaaagacttcaacacttaggccggctacgaccgtataatcaactaggtccaacattcttgggcagacttgttgggaatgttttaccaggatttagatttactaacaagtatgttgaattaacatcctaaatatgaattctctaaaaaaaataaaataaaaatataagggtttaacaaaaccttacatttattgcagcggaatataatgactccttctgttcaagatctctagcctttgattcctttctgtaacagagccttatcaagatctgaacctggatctctttctctccttcgagtttggttaccaccgtcttactcactacgattgagtacttgacttgctat

SEQ ID NO: 395648 - DNA, 1721 bp, Cannabis indica
cgaggtggttacttctacgtatagagggtgagatggatgaatatagttattctctctatgtacacatatgtggatcaattagtttcaagctcttattcctatgtatgtgggtcaatgaactgtaagctcttagttatcttgtcttgaacacttttattatgtactctatctatctcgagatggagttattatcacgcaaatctttaactagtaataattattattcttatcttgcatctacttatgtggcagcgagtttgaatatttctattaaccgtaattattgaaacaagttatttaatttgcatttaataatgtaatttaataatgcaattattgagctaattcatatttctcctcgagtacacatgtcagcttctagttgatagccaaatttcgggtataattattaggagtgtaaatgggtcggatcggatctgatctggctatgatccgacctgatctagatcatgtaagaatctaccccgccttgtcccgctagatcagatactcggatcgaatcagattcgaccccgattcaactcgacttattcgaatcggatctgatccaacccgactcttttttttttaagaattttaatattaacttataattttatatccattttaattttgtattaatattattaaataaaatactttggtattggcatgtattaatagattgtgtaaagataatatatttttaataaattctaccccaacaccgacaacgggccgggtcagggtccaagttagggtcttgggtccgggttcgggtctgggtttggatccaagtttgtgttcaaatccgagtctgggtctgggtctggtttaaggtcctgggtccgggtctgggtctgagttcgtgttcgggcttgggtcccaggtcagggactgggtcctggggtcaaggtttgggtctgagtctcggtccctgtcctgatcccaggtctcgagtcctggtcccagacctagttcgggtcagggtccgagtcccgggtcagggtctagatcatggatctgggtcccgagtttcgggtcccggtccgtgtccaggtgtaggtttgggtctgggttcgagtctcgggtcagatttcgggtcgggtagcgagtcagggtctaggtccgagtcccgagtcaggatccgggtccaggtctaggtcccaagggatttgaatctggggtccgagtcttgaattaagctttttttaaaataaattcaaatcgggtcagatcagatctgatccagtccagaaaaaaattagacggggcagagcggatctgatccaagatccaataagtatcagaatatttcggatcagaggtgatccgtctgatcggagttcctacccgctccaactaaatagatttttttgacatgcctaataataattgctccctaaaaagtgctttttaattaaaaaggactttttaaatgtctttaagggtatgatggtatttttcccatttaaaatttgcatgcttagaatttggcggtttaaaacttcgaggtacatcatttcttatttaatgctcagattgttcttttcttgtatagttcccatctgtttgatcagatttcatttaatcaaacagttaccaccttttatgtaaaaatttaaagttgtgcatcattttgccattttcagcccacgaaccttcaagcttcaaaaaaatctcaaccaccctctcttttaaatttgcatgccctctctgtc

SEQ ID NO: 395649 - DNA, 865 bp, Cannabis indica
tctgggtgcatctgaaacaaagcttttttgacttcaccctcttcaacatgtgccaatatctctgaattctgcaatggggttattgttgtaggaatacaatcaattacctggttccaatttgtagccgaaaaggtaaagaattgcttgaaatagccaaccatgacatcttaaagaccattatcccaccaaaccattgaacctgaatcatcacgaaggttgttgatctgattattgcgttttcttgttttggcagcagcatggaaatatttggaattatgatctccttcctttagccacaactgttttgatctctgtctccagaatatctccttttgagttaacatcttagcaagtctttcattctcctcttgatatctctttgttgaatccgcatcacgcctgcctttaagaagctttattcttttttcacactttgaaattctggtcttgaagctaccagtaatctcttttccccattcagccaatacttcagagcacttttcaatctttactgctaaaggtgaatcgtggtgcagcaaccatatgtcttcaactagcttcctacacattggctctcggagccaagcattttcaaacttaaagctacgggaagttgcttgttgagtttgtacaacaggggtaagaagaattggacaatgatctgaggttgaaacctcaagattggtgagcttcgcattgggaaatttgtctagccaacttggagtgacaagggctcggtcaagcttgatctcgacccaattttcagtaccttttcctcttttctatgtgaacttgtaaccttccatctccatatcaatgagattacatctactcaatacattttgaaacccatcaatgagccaat

SEQ ID NO: 395650 - DNA, 1045 bp, Cannabis indica
taacaaacaagtatcattatcaatgataccaaatttcttcaatcttagtttttggttttagattactcctaagcatagataaaccacaaaaataaaactactgcttgggaaaaagcggctccatacaatgttactccattctatcttaattaggtgggttttcatgtagcacttgatagccgtgagacaaagaataacaaaacaacgagaaattaacttcacgacaactataaatcaactataaaataattagaaaaataatactcgtagaaaactacgaataaaatgtacaaataacaaaaaaaaattattattttactgaaaaggatattttgttaaatataaaaattcaaatcgtaaatataaattttttaaagttattatgtaattttttaaaaaacatttctcttatacatggataagcaataaacatatgtatatattccaccacttatcaacttgaaaccttgtattaataattctaaacaaaatagctaataataaggtgacacaaacaaaccaagagataatataattgcatatatatagttcaagaaattgacacttttttatgctatttatcattattatcttcaatcaattatatcttagtcctacaaaaacacaattatatatatattcaagttgatgagtgaagtctttttcaaaaaaaaaagttgatgagtgaagtgaacattattcatttacttttatacaaggaataacataaccttatagcttgtccaagagacattattttatagaattattaagcttttccacttatatatacatacatagatatattattttatgtaaataaaacatccacttgtgtgatgttacatacaaaaccaatggatcacattgctcaacctttttgttttttttttttttcaaaattttataatatagcatattctataaagatatccacttttgctatagctttaataagaatcgctcaaaaataataaaataaacttatgcaatgatatatattgctcggtgattctacaatgcacccccttaaaagggatgtatt

SEQ ID NO: 395651 - DNA, 535 bp, Cannabis indica
tataggtccaatttactccaaaagcttagtattttcgtgtataagatagtgaaatagtgacttgaaaagctcataaaaattgtggaaaatagcaaatgcttcagcaaaaatgtattggggagtggcttcagccaatggttggagatttcatgcgcagtcttgttcagaaagaaatggtgtcgagggttgggaacttatgccgcattttatattaacacgaggcattttaggaaggaattaacatatctattaaaagaggaccaacggacttataagaatgtcaaacttgaggattattgtcgttatttttcaaggttagaaacttatctacatcaaagtaaactttttagaaatttttgccgtaattttccctttgggaaataactcacgtgtgtgatgatattaagaatgaattgggccttcatgatggacttttgagttagggcttctctttgtataaaaaataatgaggaaattacactctataccttttttatattgtcctctttcatttttaccctcctttttaaagtct

SEQ ID NO: 395652 - DNA, 954 bp, Cannabis indica
gagtttagctcacattgctaatgtgtggaaaataaattgtgatatataaagataggaaaacgggctactcctcccatggccaattgggtttgagatcggaaccccatgattcttaacaaatattttaccaaaaaaaaaaaacagagaaagaataccactggtcgtggtctctgtttagccacactccaattccattggaaagaaaaatgctaaagaatatttatagagcttaatacgaggtataatatcattattggtgcaattaatatcgaatcctatttatttatttattcatttatttgacgtgtaatcctatttattttaatttaataaaaattataaaaaattgataatcaattataaggcgtcatgtcatagtagtgttaggcaccttagtgttccataataatgctaataaacttataaaataacttcttggggttgggttgctgcatctttctttttcacgtaattcaaatatgcaatagtggcattcaaaactttcttaccaaagaatattgaaatactcttgtgagacaaaattagattcaacataactaagcaagaaaatgagttgttcataattcttccacctaaacaatcctgcaatatattcctcaaatatgtagtagttactagagatgcattgcacaagaggaaaaagggtgtcattattagacattgaaatagtgtaattttatgtaattgtctcttattttctttggccaacaatgtaggagttttattattgtgttttataagttaaatttttatgatattctggaattacaaatttacggtttagattaatttagggattgctccaatagtttttatgtgagttgttatgtaaattttgattgcaatttaggttgatccattgattgctatgagagttgctatttgaattttcgtaaaaatacaaaaaaaaaaaaaaaaaaaactaaacttaaa

SEQ ID NO: 395653 - DNA, 979 bp, Cannabis indica
gtgtgggtacatacaagcatgttgtttgggcagggtactggcctccattcttgagctcctattgtgaaaactttagcaatgctagtaatagtagtttccattaaggtactcataacacaaacaactttaattatgttgttgccactaataccaacaccaagtgttgttctgatcctttcgtatggcatgtgcatgaggataggaggtagaattaaaacctgctggagaaaagggctgattagaattttgcgccccttatgtgtaccatccgtttgaaaacaaaacactccttcacagccacttgcgaacatgtatctttgaaaatattgttcatcttcttggagctctaacagatcaaaatttatcttgaatctttctcccaagctgtcattccaaatagctttgcatcctaaatattcttcacacacccaccacattccatcttctaggcccaaagacaaaatagtgtttctccacactctccaaacagcggctgcaactattctagacttaactgtcaattttgaaaatataacttccagcacatcctgagggagttcgtgtgtaacttcattcacaacttttttctgtgaagaaccagattttttttcctccgtgatctaatgtcgagtgttattattccacctaaaagaatcaactaattcagtaaaataattaattaatgcagtaaagttatttagataaaaacatcaattacctattatgaagctgatgatggggaggatactggaatttgataacttggacatctctatctgaaatatcgaataaataaataaattctcttctccataaaactatcttttttccatttgttatatttagaaagcacattaatatcacatgacaattataacttgatagttcacattatcatcaacatggaggaaaggccgactgaaaaataaggacacataggactggtttttggtcattccgatgtgcttggaaacaaatg

SEQ ID NO: 395654 - DNA, 898 bp, Cannabis indica
attcatccaggtcctctatatgcgccgaagccttcctggatttgatgagcatgtcatccacatatacctctatatttcatccgatttcgtctttaaacattttattcattagcctctggtaggtagctctagcattctttaaatcgaacagcatgactttgtaacagtacaggcccatatctattcagaaacatgtatgttcttggtctggtggatgcattctgatttgactataccccgaataggcatccatgaagcttaggaccttgtgcttgcatccacgagctaatctattcttgggagtggaaaatagttcttgaggcacgccttgttgagatcggtaaaatcaatacatacttgccattgtttattcggcttgggtaccagtacggggttagccacccaagctgggtagaaagcttcaatgatgaacttgttgtcacgtagtctctctaccactaatcgaatgcaagagatcaacactccttgccatcaagttttagaagttgcgcctattgattaatttccagtcattttattaaaagatcttatagtggcgccaataattggtagcatattgcaagcatgcttgtgagccatcgacacctgtaaaggtaggtaggggcaagagggctccaagaataccttctcgggttgagatccaaaaaatttgacctgatgaacttgttcgagtttggggttttaaaattttggggttttgggggttggagtttggaatttggggtttaaggtttgaggtttggggtttggggttttagggttttgacatttggggtttcagagtttggggaacgggcatgggaatgggctggggaatgggaattggaatgggaatgggcatgggtttgggaatgggaataggaatgggaatgagaat

SEQ ID NO: 395655 - DNA, 1374 bp, Cannabis indica
taaaaaaaaaaatcaataaaatatgcttctttgtactcgtttgcccctaattttaatattaaactaaaactgatgtttatccatatgtatatcatataaataaataaataaatgatagaactacactttaaagtagcgtatggttgggagaacgaaaacaaaaaaataaaaataagaatagaaataaaaataagaatataatgaaataaaatttaaaattgataaaaaaaattattaaatttttttatattggaatgatctttcctttatttttaaaatggaatagtcatttcaccaaaatagtagaaagagcattccattagaatgtcattctaatattttaaaatgtaactaaacaaatgaatggaaagaaaattgtttcctttccattccattccatttcattacttccaaccaaacaccacctaaacttactatattacctaaaataatttttaaaattatacttttgcctattcttataaggaatagagataaaattatggcggttaatataagggaaatacaatcccaccttcatcttcgctatctattcatgctcctattactgcatcattcgcactacctatttatgctcctattaccgccccatcctcgtttgataaccaataaattcgagataagaaaataactatcaattataggaaacccatcgagtatctattaaggtaatatgaaaaaagcatgtaattatttaaaataattgatttttttgttaaaatttaaatcaaaccaatactatcacaaatatttattatactatatatgcattaaaaataaaataaaactataaatcgagtcaacttctgaaccatgataaatcggttatgtctttctctcctaacaccacattggttgcttaaatgtttttccaccaacaactctctatgcccatcggtgaatgtcatgaaaaatatttgggtctatcttaaatgtagtggactatgtcactaaatgcttaacctgtcagcaaatcaaagctgagcatcaacgaccggcggggttacttcagccattaacacttccagaatggaagtgggaagacattgcaatggactttgtggttggcttgcctagaaccacaggaatgtacgactcagtttgggttgtggtggatcgttttacaaagtcagcacatttcttacctgttaaggtaacctatacagtggatcagtatgctgatttgtatgtgaaagaaattgtccgtcttcatggagtaccgaagtcaatcgtttcagatagggatcctaaatttacctcaaagttttgggtgagtttgcagaaggctatgggaactaatttgaaattcagcacagcctttcatcctcaaacagatgggcaatctgaacgaac

SEQ ID NO: 395656 - DNA, 702 bp, Cannabis indica
ggtatagaatctaatttcctcttttctctttttattttggattatttcatttttaacttttttatttttggggtacaatttttttaaaaaatactgcgtttttttttttaaatactgtgtactgtgttaagttttcactgttgctctatagttattttttagttgttccaatattacttttagttgttttgttttgtgttctcttattgttttataaaaacatattatttttgaaaaatatctgtatgaattaacccaaattctagtatttttgtaagttttcttttatttttacaactttcaaaaatcagtttcttaaggcatttccacaaaatatatggtaataataattaaataaatacacaaaagcatgcacttagtacttaaatcttataaagaaagaaaacaatatatagtaaacccaaaaaaaaaggcaaatccattttagatctgtgttttgcaaaaattataaattagactctctattttgttaaatgacataatagaccctatattttttaaaatggtacaaatacaactctgaatgaatttttttatcaaaataaaacttaataataatccgacctatatgtgttatgacaaaactgtgattaaattttgtaccatgttcgtgtcacgaattgttttaagctagttatattaaaaaaaaaattatcaaaaattaagctctgggtcctattt

SEQ ID NO: 395657 - DNA, 648 bp, Cannabis indica
  modified_base (35)..(35): a, c, t, g, unknown or other
gtaaaagtaaaaaaaaaaaaaaaaaaaaaaaaagngaaaaatcaattccaactatactaggacataaattgagtcggtcccaccacaaaatgaattaatttcacatacacaaagtttagtcatcaacacacttgattgaattgaataccttagattgaaaaattttcaaagtatgaaactcaaaaaatacgaacatactaaactaatcacaaaacttaattagataaaagtcaaaatacacataattttcaagaaattttcaccaaattttcctcttccaatttattgacataagctttcaacatcattatcaaatctctagccaccacacttaacgtcggcacctaaaacatgcatatatattattaggttcaaaacttggaaacaatacgtaaatctatttcaacccagattgcttgttgaactaattaataagtaacaactttgattgtgtgtaacaactaaatcaaccatgacttggtatcagagccaagtttgtgaagaaaaatggcaagtggaggaatgatccccttccaagtttcaatgctcaccaagagcaactatgacaattggagtattaagctgaaggcgctactgggagctcaagatatatggaatattgttgagaaaggtcataaggagcaagac

SEQ ID NO: 395658 - DNA, 1015 bp, Cannabis indica
tcactctaaaatatctataataactaattatttttaaaacctaattaacaaattatattttaccattcactactcttctatctttttctctcactatctcatttaaccttttcaaaatatttttgtatgggaaaagtattttttacttttatatcatttttattttcaatgcactcagttagaattaattaattttgttttttgtttacatgttacaatattaacaattgatgatgtttctatattgtattgataatgtattgatttgtatttatataactttttataatttataaaaaaaaatttactctaagcccatccatagaggtcgttttcaactaaatcaataataaaataattaagctaggacttagtaaaaaaaaaaaaaaaaaaaaaaagaagctatcattcaaagtacaagtttgcttaacttagttttaactatatttgaacaaataattatgtcatcattgaaatttacacttaaaattacttttaatgtaaagtttataaatttttatttgaaatttttattttctttccgtgttttttatatgtttattaaataaatttttaaaagagaagatttattctattctcaaatcaaaatttttatttttattactttgaataattcatttagtactcttaacaaaagccaatttatgtaaagagatagtttaattacatattacaaaacttctgatgtgatttttttaaagaaataggcggatgtaaagtgttagttcacttttcattatatttttaaacatatagatatatattaaacaattttttatataaaatatataattatcaaaacaaattgatttgataattattttaaaataaatcttttaatattatttattatgtatagatattttatatgaaaaaaccctttttttaatacaattaatttaaatattagattttttctgttgtcaaaaaagattatatttttctatcatataaaaaacaaataaattttattatttaattctctaaatctttt

SEQ ID NO: 395659 - DNA, 1363 bp, Cannabis indica
gttgtttaaaatgattaaataaaggattaattgggacaaaactctcaatacttttattttatttgcatttaacctctaatactcaaattttggcggtaaaaccccaaaaactcatgttctgttagcatttagtcatttccatctgtttttgaccgttaactgtcaatgtggctgtccacgtgtacatagagtattatccacatggacacaacgtacacatggcacactaatattggcccacataaataaaatatttaaaaaataaaaaataaattaatttaaaataaaaaaaaattaattcattttcttttcttttccctttttttcttgttttcagactctctatcttctttcccttcacaaactctctctctcttcccctctgtctactttgacgccggatcggagtcgccccacaccagaccgtcgagtgccccatcaagctctctatctgtctccctcacgaactctccgaccacacgacgatgaaacaaaatcgtcatcgaactcctcctctctcccatgcttcctttctctctctatctctcgcagtctctttctttctttctctctctatcacggtgaagcaaaggttgcgatggtggtgatttttagatctggggttttgagcacagatctaacagaggaacttgatctattccaccagaggagcgcagatctggggtttggacctcttcttctttgttttttatttttattttttgacctgctaagttgtggtggtttcatatctgggtttaattatttttttgggtatgatttagatgtgaaagataggttgaggtggaagtggtggtggttttgattgtttaggtacagtatgaagatgatggagaagatgatggagaagatgaatgaaataagaaataagaaagaaaaaaaaatgttcatcatcctggtaggaaaaaatcaggagaatagagaaaagaaaacaaacaactcacttgtttaacttctccataaaatccaaaaaatttatgaagctcgctgtttgaaacagaagaatcaaggtttgataccatcctcatacccatatttggccaatagatactttgaaaatttaacacgaattgaaaacaataattataatgataattttctaaatcaaatccaaacctctcgtttcaaccatagtttcatcaaaaaacttaaaactgaaacaaaatcaaagaacctaaaatgggtttccatcgatgagcttaaagagagctcaaacacttagagcttgtttggttgttttttcagttttcagtttttaaaattgtatttttaaaagtaagaatagaaaatagtttttcatcattttaaaatttaatggtgtttgtgttgggattttatgccc

SEQ ID NO: 395660 - DNA, 1571 bp, Cannabis indica
tattattatatttttttgttggcgatcctttttcaaaaatactacatttatactgtatgacagttactttggagattttcttcggtcgtcctcagcttatgtcttaggccatggcttccatgcctagggtttatagatgtaaagcattgtctcacaggaacgccacgtgtgtgcttttacaaattaattttattattaatcaatcaaggtaagaaaagtgtagtttaattaaaactttttatttaaactaaaataaaacttttattcaaaataccaccataatacagggatcccttgtttataaattcctttacaactagtttcaaaactgctattacaaaagtagggttacatttccaaatatagtcaaagggttgattgtgttccctgaaagtcgagacactgcggttgataagtacatcgcatggagacctctgactcatggctgattcacttttcccttccctttactagcaccacgaagcacccgtgagtcagaatgacttagcaagaaagcaagtatcacaaacagtaaataacatgagatagtaatacaaagcatgtcacacaattccatactacacaaagaaatgcttatacaacacataatcaaacattacatgacaactatttgcttaataagacaaactgttcttgatgcctcataaagcattattaccactcatcatccacgagctacatatgtcactatcgatgcccgatacaacaatcgataagtaagaaacctatttgcggtttaaagcgagtaattacccattcatgataaacaataatgatcgtatctttatccattttcaataacggtaatgatcgtatctttatctcgatcataatcgagctacgcacaatagtaatcattaccacgatcataatcgagtcacaaacgatactaatcgttcttcacttaatatgcttagcagtgtaattagctttcttacctcagtccagtaattagatgtgtgcgtcgacctgcatggatcaaagctcaacaatcccgggtcctatgtcatgacaacaaaatctgatgaataacttatccaaactccaaatcaaaccctaattctataaccggataaattctaactcccccactggttcaaacactactacaaaaatgggttttccttacatttttaaacagtcgtttaaagtattcccgtcagtttctataaccgtcgcctatacgaccgtcgtaaagcgggcagaatagacgacgatttaaaactgtcgctaatgtgagtttcccgaaggtttaaaatcgtgtcctacactataggcgacggtttaaaaccgtcacctatagtgtagggttaaaccgtcacctatagtgtagggcatggttataaaccgtcgcccatagccagttttaggcgacgattttaaaccgtcgcctatacccagttataggcaacaattttaaaccgtcggaatgtaaaaaaaaaagaagaaaaaaatacagattaattttacctaaattaaaataaaacactttgttacaataacaactaattttaaaacacattaaatttatactataacaaaataaatat

SEQ ID NO: 395661 - DNA, 778 bp, Cannabis indica
caaacattccaaaacatgcacgtaaactttgttataatatctgaatttggtaacatattataatttaacattacctacgtaattattataagttatacattacaaaactatgaatcttgattccaaaatgcaagcattgaatttaaatccattaatagtcaattaactcgagtaaagaaacatcttattttcttaccaaaaaataaactaacaataattgttaaatcttctgtccttcaaagaaaaaaaaatctttatttgacaaatatagttgatcaacgcggaagaataattgaatatacatatataatcattatattataggttacccattaaaaacctatgaatcttgataccaatgcaaccagagaattcataatatataatcaatcaactcaacttaaagaatcctacagttttattttgacagataaactaatttaactacataaagagtacattaagaccactagcagaaattaattgatctaaatcttctgtcttttctaaaattaaaattgattcaattgacatatcaaccaaaaagaacaaacttatattataatacatgattcttgaaacaaaagaattcaataatattttcatggtataaataacaagaacaaaatatcaaatgcgaatcaagatcggagattttctaaatacattagaaaaaaaaaagaatatacaaaccatctttggcgttaagaaagttggtgtagccatagcggagagagcgaccagtctgagagtccctacagactcgaacagagaccat

SEQ ID NO: 395662 - DNA, 1997 bp, Cannabis indica
cttttaactttattttatttttatttcgaaaaaatgaccaaatgattgaacaggtttattcccaatttttaattttactagtaaataactcgtgcttcgacatttatgttaaagaatttttaaattatatattttatttaagaattgtggtatagttcctaccaaataaaaaattttctataagttttttgtcttcctcgaaagttagttgtcttccgaaagggctttcttggaaagcctttgtgtccattcagaaggagtctgtaggaaagtagtcttcctccaaaaaaaggattctggatggctagttgtcctctcctggaagggagtctaggatagtcgacttcagttgtttctgttcctatctcggaagatccttcaacgtgtgcttcggttcttagtctcggaagcatactgttgacgcaatttttcgtgaacttaatctaaacaaattattaattcaagtaaagaagagacaaaaaataataaatgaataccgtatatttttacgtagttttgtagttaaatctacatactccacgagtcaatattatttatgagttttggttgtgtttacaatttagtcaagtttctgtaaatcataattgcctcttcccattttcctttgagtgaacccctatttataagaataggatggtagctaatcaacttatcttagtgaaaagttacaattgatgggtggttaatgctcacgtatcacatttaactaaacatttgaataaatataaatatctgtttatatttaatatactataagtggtctttgacttggtcaaaccatgttatttttgagcagatgtattgttgtgtgtaatacaagatgatacattattgcgtgtgtaatacgaagagatgcattgttgagcatgtattacgagaaggtgcattattgttgtgtattacgaggtgattcattactgttgtgtaataccaggtgatgcatcattgctggtgtattacaaggtgatttattactgttgtgtgattcaacactactgtgtattacgaggtgattcatcactgactgagtattatgaggtgattcattactggtgtgtattacgaggtaattcatcactgactaagtatgatgaggtgattttatcactgttgtgtattacaatgtgattcatcactgctgtgtaatacgagacaatgcattgctgagtgtgtattatgaggagatactttgctattgtgaaatacgagacaatgcattgctaattgtgtattacaaggagatggattgatgctctataatacgaggcaatgtattgctgactatgtattacgaggagatgcattgctgctatgtgatacgaggcaatgcattgttggttgtgcattatgttatggtattctcaacacgcaagtatacgtatcgtggacaagttatagactcacaaagagtgaggttgatcccacaaatattgtagttaagtactttaaaattaaacctttacttctatttggttatatcaaaattaagagaaaattaaaattagaaaacaataaagaaacaataaatataagaagcaagtaaatcaataaggaaatgctaacaaaattatatactacaattatacatagcaaaataaaaaattaatatcatttaagaataataaaaaccatacaataaaacagaaatatactttacaacaaaatccatataacaacaactaataacaatctataaaaaatgaaaaaatcgacataactttaaaataattttttttgataaaactaatgtagatatattataatttttaagtaatttgcttctattaaaaaaaaatgaaataaaattattgattttttttatatgccaaaagacaatataaataataggctaattaggatttttttcccgatctttgagatataccaaatcatgtctgctgaactttttttcccgttaaaaattctccctgaactattgagattgttagatttaaggatttttatctaattttatt

SEQ ID NO: 395663 - DNA, 762 bp, Cannabis indica
accagaatctgctccaactttctgacgaggatcatcctctcctccgtgctagtccctcttaatctagtgatggtctctccaattcatgcttcaaagattgggagataagtagcaaacacacaccttccctagaacgtgaagtgcaaaacatttttaccctggccagagcgaaggtcaaggctacagaagtttcatttggaagcttaggaaggggtggaggcaatatcttccatccaactggacgtatattgttcgaccagatacaattgatactttgcctataggccatccaaatcctgctgccacaagtacacccattgctacttttgtcgtcaccatcgccagacatagcaactagactccgtcaaggaataggatgatggcacgaaccaaatagactgtgcagaagtcttctttatctgacccacacgtagatcggctcgccacaatgccgagcgcagaataggcccggcctgcatctgaggaggaagaccttgttggggatgcagaagtctaagaggtggaagatcaaggcgaggtatgtcctgatactccatctgaagctaaggtggaagatcagggcgaggtccgtcctaatactccatcagaagctgaggtaaaaggtgcagctcagaggttgccctttagtggattcaatgaagatggacaactagtatctgaggccagtgaaattctggaggccggtgaagactttgttgttggaagttattttaccaggaacttagatctactcacaagtat

SEQ ID NO: 395664 - DNA, 893 bp, Cannabis indica
atagaatgggtttacttaacgaaagagtgtcacttaaagttatttgttttttttggtatattctgttaagtacacaacaaactgttaagtgcacagttaaatagacattttatatattaggtaagatatattcatatcaatattaaaaatcatcatttctacaagttaattttctaaaattcaaattttaataataatttaatggtattatgtaatctctttcacaaaaaagaaaatttaaggtttttttttaagaagaagatttaagttcgaaacaactttttctttttttttcttttggctggaacatatatataaataggcccggcccttttggtgtgcaaccagatctattgcacagggcccacccaaaagaagggcccaattttctctaatttatttttagtttttttcttaaagttgacttcagtgaacaacatattcttaaccaaaaaaaaaagctattaattttaaggacccacttttcaaaaatctgttttggcttttttttttaaaagctggctttggaagttagtaagcttattcccaacaaaaagaataattattaatttttaaatcttttcaaatatttttatttttttataaaccaatttttgcttagtcaattaattaccaaatttcctagtttctagtaaagtaacggtactaaattgatttttgtttttttttttaaaaaaaaaaaaaaaaccttttaatatttacctacatgactattagataccttttatatatctatatatataaatatatatatttaattttaagcttttcatcaacatcaaaaatcaaaattatttatgagaattgaaaggaaagacattagatatattttgctatcatctatatttttagttttctttttttaaaaaaaa

SEQ ID NO: 395665 - DNA, 1146 bp, Cannabis indica
aaataatatttattatgaattaaatttagcctaatattatattttgtaccaaatataacacaactttaaatatgtgtcaaatttattacactttttaaaatactattgaaatagtaatttttttacaatatgctaacatatagcaatacactactaaaaatgttgtaatagatgaattaaaataactcattctttaagaaagttaaaccttaacttttcttttttgtaaagtaagttcaacgttaactatatcacacattttttctcttaatgaatagtgattaagtttttttttttaaacatacttcattacatcaaacaacattacacaggatttggcgagtcatgctgaagagcatgacttgcacaaggaggattaaccctaatctacatgacactagctttgttaagcaaaacttcattggctaaaacataaactacttgattaacttccctataaccgaaattcaaactagcaactctttcattttctagtagaaagctaatatgctcagcaataccatcaacatctcgaaagcctccttcatttttaaaaattaacttagcagcttgaaggcaatcaatttccacctaaaaacgacaaaatttctgctgaattccagtctgaatcccagctataatggcctgaagttttgcttgaagtggagtcatctccctagctacaaaagttgcagcagcaaactgtgatcgtccctgttgatcacgcatcaccatactgatattagcttctccaagaccttctctcacccttgcatcaacattcaacatgagcatatctttatgaatacaacccgaataactttacgaaaaattcaaatcacccaatgaatatattgggcgggttgaatattattctaacccgcccaaataacccgaataaaccgatttacatattttttactaatattgtttataatataatatataaattacgtttaatagttaaactattttacatttaaagtttgtattttatagtgtttattttgaatttagaatttatagttgataattttgattgtatttgaatattgaagttgaaatttaaaattacatatgagtatatatatttttattctattttttgaaaaatattgtttagtacttttatgtttattcaattca

SEQ ID NO: 395666 - DNA, 840 bp, Cannabis indica
aacatcatgaaattcttccaatcgaatgatgatgaagggtaaaaaaaacttttatactgattctagtatacaatatgagaattgcacaacaaaaaaagcctttataaaagaagcagtaccccgtgtaaatactccatctaccatttgatgtataaattttgattggatatttaatgtattggatttttagacaccccatccactatttgatcttatccaattagatatttaaaaataatatccaatccaatccgatcataattagatatttaatatttgacgatcaattgtaattaaatcggtcgattcttattgaatttaatcgattgatgcacacccaaatgttaaaagaattaactaatatatattatgattttttttgtaaggatattattatataatactagtttttggatgtgcattgcacgtgtaatgaatataattgaagatcacatattattattataattagggtaaatatcattttgaatcgtgtgtttcgtaaacgttaccaactaaactctttgttttgttaaatgataaaatataccctgtagtttctaaaatagtacaaataggatattgaactgattttttgtcaaaacaaaacttaataataatttgatctttagatgttatgacaaaactggttacatgtttatgtatttgttcgtgttaggaaatatcttcaagtttgttatattataaaaaaattattgaaaattgaactcagagtcctatttttataattttagaaaccgcggggtcaattttatcgtttaacaaaacagagagtctattcagtaacttttgtaaaacacatggtccaaaatggtattt

SEQ ID NO: 395667 - DNA, 1155 bp, Cannabis indica
acttgacttttttaacacaaagaagaatagaataaaaaagacattaattgattaaggacttgttttggtctccaagtccaacacaacttgttataacataactggtaaatccataaattaatctttgattaattaagtctatgtcgttgctcttctttcattaattatatggtcaattatttatagacatatcacattatttcatagtagaattatatatgagatagaaagtattcatttagttatatttcgtaaatcacacggttaccatgtttgatatattcttcaaatgaatatcttttcacacaagagtttcaatatatatgtatatatatataagatatgaagagtagtatacatatatatttatatatatatatatgtagagagagagaggaaaatcacaaatattaggcagtaattaacaatgatatatatttattataattaaatataaaggagatgaaattctgttcaatccttattagttatatgttactgagctttgttcttgtatgtgtattatcatccaatatctctgtggcacgaaagcccttcgttcgtataggtgtgtgttagtaaaactagtaattagtttttcttttcacaatacttagctgaaacgcacatatatttttaatataaatatatatatatatattaatttgacttcatatgaatcatatatatatagtgctactactgctctcacttacaaattatttgcagatgatgataatgtgatttttcgaaaattgttgagagaaaatctttggtctcctccaccaccaaagaaagcaccgggtccaggtgctcgataatctatatgtaaatatagagaattgcttaaagattttattggtgcagaggtatcagcttgctattggtgtaattatgtattgagtcccatacttaagaaaataacttttaaataatattgttaaccaattttaaggcgcgagctgataacaatgctatgtaaatatagcttttattattatttacacttattaaaatggatattttgtgtaagtgaacgtacagcaacactgttggccagcacatgttgactagtactcgttgaatgaggtgtcgattattcaccaataatgtttttgaaacgttattagaaacatttgttggtaacgtaccgac

SEQ ID NO: 395668 - DNA, 656 bp, Cannabis indica
ttttttcctataagttttagtaaaactctttcaagcatgctaacaaaaaaaaaaaaaaaaaaaaaaacccctactttaaagcccatttttatcaagaaaatgaggagttttcaattatatgtctttaaactctataatttgcataaataaggggattttactttttccaaatcttaatatagacaaattaactaccaaaacattaataataataataataactaaaacaaaattttgtaaccaaaacaaaaaaatacttatcacctaaaattttagataaacccatctaatttgaaatttgaaattttctcataaaaaattcttgctctcgccacaaaattctagttatttgcaaaattgtgagaaataccgtagaagtaaagtacacttcgaaatttattatatgatcacaaaatgttccaaaaattacttaaattatatttgaactttttaaatgtgctattttttttttctttcttaaagtttgtatacatatttccatatttttgtttgtttccctgtaaatgtgcgaaaataaaacattgaatgcaattgggctgccttttcctttagtcgatcgattgagcccactacaaattaaagagagaatatgctataaattatattaggaaaatttacatacattactaattttt

SEQ ID NO: 395669 - DNA, 745 bp, Cannabis indica
gataatcacaagaatactacaacaatgtaaaggtgaccagaagtcagcctgtttctgactccaacctggtactgagcctaaaatggcaagggctccagactaaacaataccaagaaagctaagtgcatgtccaactgcctcacagtctttgtcgtttctcaggctctatgctgaggttccaaatacttcatagacataatcattacagatttaaggccaatctgtgaactgacccatattcttggaattgggacccctatggaagatatcattaattataaaagtctttgtaaaattaatatgacaaattatgacatattcaataagtggatactgtcattaaatgtctagacacagctgtgggtggtggctcacgcctgtaattccagcactttgggaggccgaggtgggtggatcacctcaggtcaggagtttgagaccagcctggccaacatagtgaaaacccgtctttactaaaaatcaaaaaaaaaaaaaattagccaggcgtggcaggtgcctgtaatcccagctactcaggaggctgaggcaggagaatcgcttgagcctgagaggcggaggttgcagtgagctgagatcacaccactgcactccagactgggcaacaaagagagactccgtctccaaaaaaataaaaaataaaaaaatggctgggcgcggtggctgacgcctgtaaccagcattttgggaggccaaggcgggtggatcacgaggtcaggagatcgag

SEQ ID NO: 395670 - DNA, 1505 bp, Cannabis indica
aaaaacaaacaaacaaacaaacataaattttagtggtgcggctatttacccaaacaatatttataaactatatttttttgtttgttaataatttaagggtaggggtccattgcaaaagacccacgtggcttccatgatggaagtgttgaggttttgaaggacagtagagattggtgtgtgccacagccacttcagcggcttctatttcgcaaatagtagtagccagctagcgctgggtcactcactcacgtacgtgaaaccacatatataattagtggactacgtacgacactacaaatttaaagccatttcatttccaacgacattaaaaaccaaaccactacacgtatgagaatctttgcaagctaatttggagagtagaaattacacaatataaacgaattcaagatctaatcaaattaatttcagtcatttaattgatcaaacatccaataaatgttaaattggatcgattctattcattggatacatttcatgtaatattagtaaagtaattatattgaatatattaaatgttacacaagactttatatagggagagaatatccaaccctaaaatatacaccaaacctatttagaaatagccttgactctatatccaaacattaaatataactatttaatacttatattacaaaaaaatgtcacttttagtaacaactttttagtcacaactttttagaaatattacgtctggttatggttaagtaaatgagactttccaatcaaacttctatacctggtagggtcagaaagtaactcccctatgtccttgcttagatgagtgttaggttccattagggtggaagcgggtttgacaccaatataacttgtatcatttaaaagttgtaagataaatggtctttgagagaccgaaataccattagtggatctcccaacctctagcctgagaaagaacctccaaagaccaagatctttgagtttaaatttggagttaagatgtcatttaaacaattcagcatcgctagagttattgctagcaattaaaatgtcatcaacataaactaaaacagcaaaaaaagtattgttagaagatttaataaaaagagagtgatctgaagaggattgtttgaacccttcacttaccaaggtggagctaagtttggcataccattgtcgggaggcctgtttgagaccatagatgctcttatatagtttacatacaacattaggagggaggtctccttgatgtttgtagtcggagggaagcgccatgtaaactttctcatttagatcgccatggaggaaaacattgttaatgtccatttgatataattttcaattattaatggaagcaggtgcaaggaggacttttagagtattaaactttactaccagagcaaaagtttctaggtaatctatcccaaattgttgggagtaccctttagctactaagcaagctttaaatctttcaatttcacctagggcattatattttattttatatacccatttacagccaa

SEQ ID NO: 395671 - DNA, 1581 bp, Cannabis indica
tgctttaagtttaatcaaacacacaagatggcgttgcaaagtcgcagaggcatggtcgatcaagtggatccactagtggcagatcctacactgcagagtctaaggaatgcaagggtcccaccagtcaccaatcttgagcaagaaaacactcaaccacctactgtgggtaaaggtgtgacatctcctctggctgggatcacaccgggtgtgcaagagactggaaacaccagttcagcagccaacctgggtactcccaatactggagtcccttcaccaacaaatgtctagaggaccataggagatgacagtgaaatcctgaacctccataatgctcttggcctcatgcaaggtcataccaataccttgcatcatgatcaggaagagctctgtgctgaagtgaaccttgcgttcgaagagcaaaggcgtcagttcgctgaatggagggatagagagttagaaacgttgaaggctgaataagcagccatggacggccaaacaagacaggccaccgtactgatacaaagagcctaccaagtttctaattagcaacctgcctccagcatcccactaggtgactcgaaagaaattcctactgggcatactacccaaactctgaatggccagtcgtccaatccccggtcacaggttccacctacgggccaagtggtaggcagctagaccttatctcacaattcattaggttgggttatacccaataactctgcccagactagcggttttggccaaaccaaccagtcactgagataacctggtgtttcagtattcaacagactgggaacaactcatgatctcagggatgatctgaatagaaaaaggggttcggacgaacaatatgttcaattgtccactcaccccggtatccgcatccaagatccagctcaaagagatcctgacgtggcactgatcggccaagaggccgaacaaggtcatccatctgtgcaaacaaaattggatgaattgaaaaatatgttccaaggcttggccggccaaaagctcaatgatctcgagttggacccagcacgtagattgccatttattcctgagatcaatgttctagagctagccctcatgtttaaaatgctgacctccaagatgtacccaggaaaacaagaccccttatcgcatctcaagtattttgaaatgcaaatggattcgcaagggggtacgaggagatgtgcaaaaaataacccgcatgtgcaaaagtatgtcaaggacgaccagaatgaaagggccgcccaagtagactataaccaagacctgttactgcctccaccagtggatgggcatttacaagtcatcatcggggccccacatatagctggagattcaggcaatgctcgggagaggtatgcccaaactttacaacatgaacaaaaagaagtggggacaatgacgtctaggcccctattttgttaatagcttggtgtacttaaagtctgggccactgttttgttaacagctccagttatattattgattttaaattattgtcactattactaacaaatattatgtttttttttaaaaaaaagtaaatgtcagctgatgtatcaacttatc

SEQ ID NO: 395672 - DNA, 667 bp, Cannabis indica
aattaaataaaaaaaaattaatcttttcgagtttgagcttttaacaaacatattatgtttagaaacaaagaaataggaggttatatacttatttctaactctgaaaaaggaatgttacatcattcctaatcctattcttaactgaaatttatataaattcaaaaataaaatattataaatatctttattttttttaatatcaaaatatttaaaaaaaaaataaaaaccattacgttttaaatatatatattttcataaatttatatttactctataatttatactctactttaggggcagagccaggacttaattattagaaggaccaagcggctaattattaattttttaaagaaaaaaatctatagtgcacctcttaaaagactatttcggttcgcttttatttattttaccatttaggatatgatcacatatgttatagtattttaagaccacttataaatttttaaagaattatgaatagtttatagtgtgaaaataaagttcaaatagttactaaccatacttaaaaaataatcacgagtgtaataaaatatttaaatcttattttcaacattataaattattctaattttttaaaaaatttacatgtgattctagaaaaatacaacgtacataatcatgaactaaaaagttcttctaaatg

SEQ ID NO: 395673 - DNA, 1002 bp, Cannabis indica
tactaaattatatgtatattttagagttttagttatacttatataacttttgaacaaaattatatagataataatataaaaaaattattaacatcattaaaatttaaatatttacttttaaatactcatatttttatatcacatcctataaataaattaatatataattttagtttttcatgttttaatagttttaattatagaattgtaatattcactattgtatttaagctttattattattttatcttatttataattgataaattcatattattattattataatatttttaaataagccgtttcgtgtttttttggatttgttgcgtgtcatatttttcgagttagtctattcgtgcttacgtgttgtgcctttcgtgtacttctcgtgttgtgtcgtgtttaaggacatatttttcatgtaatgtcgtgccaacttgtagtatcgtgtcgtgtcatgtccaaatccgtattttttcgtgcctagtcatgcttgtgccttttgggctcgtatcgatttcgtgcagtgtcaaaaagtccgaaccgtatttccaatactaattggaggtaatgaattatggaatggaaataaattaatttttattttattcatttattttgttgtattttaaaggatcccaatgtaagataagacaaatttttgttatttttttattaatttttttaatgtattttaaattttatccattacattcttattttaataaaccacctaaatggtgttagacatattataaacactacattacataattctaattttttatatgagttttttcgactaaactctctcaactattattttacttgcatttaatcctccaaactcaaattttggtagtaaaaccttcaaaactaatgaattgttagcacatttaaagtatcatctattttcacagttaactgcaaacatgaactgcttatgtgtacactcttgtacacgtggcacatttatattaaaatttataatcttttttt

SEQ ID NO: 395674 - DNA, 1091 bp, Cannabis indica
attacttggcatagtcataactgtgacatggattttgagagctgcgaactgggtatggtttagacctaaaaggcttgaaaagtgccttagaaagcaaggtcttaagggcaccccttacagatttctgtttggggacttgagagagagctttaagatgatcaaagaggcaaggtccaaatccatcaatctctcagacgatgtcgttccacggattttcccctttgtccttgacacagtcaacaattatggtatgtttaattatttaattatgattactataatataaatgcttacaatatttttcaagctagacaaatatatatatgagtaatgatatatatatatatatttaacacacttataatatggtaacaatttaataaattagtcatttttgtttaagatagatctgacatgttaaaaatgacttgccattaaatttatatgtgcacaggttaatttgatacacacagttacttaattatctttcaaagctaaacatgtttttagtgctacttggattacctgtgttatctgtgttcctgactacctctgatttatatatggtccaaattaaaaacgtattgcctgcctatatcttacttctagctataaattattaccatacattatatacaaacattacactatcacttcagctctccttcttttatatattttttcttttaaagagtttacttaattattgtgtttatcataaaggaagttattaacacgcatgcagaatctatatttatatgtgaagtaattttttctatttaggagttgtagaaaatatatatttttcttttaatatagaaagtccagttgcatgctggaattatcaagcgtgagttattacaataagcatattcttaaacattaattaattaacataaaaaacatgttatatatgtattcaaaatatatatatatccagtgatatatatgtcagtcttttgaaatagctggttcacaatggggacggactcactggcaagcttaaagccccggccccactgaaaaacgaaaattccaattgagaaagtataaaagaaatttttaaagttgatagttatacaccacaatat

SEQ ID NO: 395675 - DNA, 816 bp, Cannabis indica
ctcaaattaatattgtagttaaaattttagtgtacataatgtaatcaccagaaaatattgatcttattgttctaataagtcatcttaaagatggatcaataaactctttaaagagcacatggttcaacatacttgttgttttgaaattgtaagcaattactaaatagcatgacttattagaatttatcaattacttgtggatgattagttatgaattctcaataactattaaatttaaggttgttgtgaatcataaataatataatacttgggtggaagtttgatacaataaatgatcttttctagaaactcggttcctagatcgatcgttcccattgatcaagtaaattcttaattttacaattctgataataaaacatgtaacccttagccttatagcatttatgatgaaatactcatttatggtatttgaacccagttctttcatttgataattgtactctaactgtatacgggtatttataacatatgtatatgtcattaagtcagtttccaatcttatcacaactcaaaatttgtttgagaaataactttggttagagcacgatccgatatatgtacactcccatggaagagtatcaaccgacaaagatttaggaaaattgagagtttgctatgaaggttccactccatgtccaacaatacttagtttcttaaatctgtcacacactattatttgagtgtatcaggtatatgtattgggtaataaactcacactttttaaaaaacattacaaatggactgggagattatttatactcacatattttaatgtagtatttgttgggttttatg

SEQ ID NO: 395676 - DNA, 977 bp, Cannabis indica
catgcttgaactcaagattccaaaaaagaagatatcattttctcttcttgtttttattgaattgaagaaaaatcataagtatttgtttgtgtataggttcgggcaagtatttgcttaaattgttggtgggtaatttgtgtttgttttgtttatacttgtttttattgattggctgtgctcaaacactcatttctctagttcttgaacattgtttatgcttacactattaattggggttgtgccaactaatttgttatttttattggtatttttttaggattgtaccgactaatccataaatagataaatattattttaacttctgtgttttgcaaaagttattgattgaactctttattttattaaatgataaaataaaccttgtatttttcagaatagtacaaataggaccatgaactgatttttttattgaaataaaactcaataataaccttatctagaagtgttatgataaaactggatacattttctgtatctattcatgctagaaattgttttcaagttggtaatataaaaaaattgtcaaaaattgagatgaggtcttatttgtactattttagaaaatatagggtctattttgtcatttaacaaaatagagggtccaatcaataacttttagaaaatacaggatgcaaaataatatttacccttattttattggtatttagtaactaaaataatggtaagatgaaactgatggagaaagttttcttgtgaacctaattgatatgtaacaaggggatacactagaaaaattgaacttctaacaccctttagaggtttagtttgtgggacactaaactcttagtgtggtcctttaaggaatatttggtatgaggtttagacttgataggaatgataatatttaactaaattaaattttaataatcaagggatttgtgtttccaagtgaaatttactttttaaattaaaatagtggtaatgttaatcccctc

SEQ ID NO: 395677 - DNA, 654 bp, Cannabis indica
aattaacaaaattacaatcaaacatatatataggttttaaaaattctgctatgggcaaatatatatgggcagttgtaaataaggaagataacctatggttgaagtggattaatagtgtatatttacatgacacagactggagggcctacaaagctacaaactaatgcagttggtattggaaaagtttggtcaggctcaaagatcaattcaaggatgcattgaatggatgcacagtattgcagcaaaaatacagtgtcacacagggctacaacctgttgtgcccaactcgaacaagaactcaatggagtaagtaggtttggagcaaattaaatacaccaaagcacagttttctgttgtggcttgcagtgcaccagaagctcaaaaccaggaacatgctggttaaaatgaaaattacagatgaacaggaatgcttactctgctgttcttgttgtgataaatccaacacgcaagtatacgtatcgttttaacaagtaatactcgggtaagtgagatcgttcccacgaggactgtagctaagtaccaatcaattaaattcttgtttctatttagtagaatcaataataaggttgaataattaaataactaaaaattgaaaagcagaaaaataatgataaaaagtataattaattatgg

SEQ ID NO: 395678 - DNA, 974 bp, Cannabis indica
aatggtttatggtacttgttgtttttattatttttatggttttgaatttatatatgtcaaatgcttattgtagtgtgatttgttgtttttgttatttttttttataatttttttaggtttcatttctgattcattattgttttggttgatactcgtgatgatatttatagatttttgcaatgtactatgtattctggtttttttgacattttttagttgtttttgatgttaaagctccactaagagtagtagagattgctagtttgattggtcaggaaaacaattttatttgtgttgttgcatttcagttgttgatgtgttttagtgtagttattttaactatttgattattgttttacacaatgattgtggtgcttttgttgctgcatttattttgttgagttctttatacatgaaaaagatgttctactagattttgatatcgaagcttatcgcacgaggcttgttgtgcttttgttcgcatatggtaaaaggaaaattaatgaaaatattgatagtgaggatgagaagcctaagaagtctacgaagaatgttcaagggaagaacaagggttcggtgatttgggactgatttctatagcccattgaatgttatttttatttttattgtttgttattataatgctagatgttaagactttgttattgatgctatggttcttgttgcccctcttttatcctgaaatatgtggcagttcccaaattggcgatgtggcaagtgggtctaaagatcaagaaatactcaagataaaccttaagagcatttatctagatttaatagtcatgtctgggaggtcccttcgggagtttcaattgcatcctaacaccaaggtattttgttcatctccgggaacaaggtaggggtcaaaatcagtcattaggtcttaaggttaggggtcaaaatcagtcagttatggtcagtttttacaattttataactgaccggtcggttac

SEQ ID NO: 395679 - DNA, 672 bp, Cannabis indica
gattaatttaataatttaatgttcaaacttcaaatgacttctaccccttttaacttgttagcgtgtattgggttgtttcaattaatgaagttctaaacacaataaagacaaatacaaatggtaatgctatatttacaaatataattattacctgtccgtaattcaaaactgccgcagatggactcaattgaatgttggcgtatgaagttaggcgtcccttttcaaaatttccatcattggagcatttcatcgaatacatgtaatcagtcggcattagaccaaatccgagcttatctgactccatctcactccaatcatcatcgctgcttttaatccacaccaaaattatttaattagttgtagttatcgtaacttaatatttatatatatatatatatatatatttgtgttgtattgtatgtatacacaaaaatattaaaccgaatgtgacttttagaaagtcatcaaagaagttagcattcgtttaaatcttattttgaatgttgtgtttttgtaaaagttattgattgatcttactattttggtaaatgataaattagactctatattttttaaagtagtacaaaatacgatcttaatttgattttttatcgaaataaatttaataataatctgatctagaggttctatgacaagactgagtatattttt

SEQ ID NO: 395680 - DNA, 605 bp, Cannabis indica
acgtgtaacaaaacttaataaaaataactattttaattacaacactgaaaataatttgggaatcattgttaacgaattgaatgaatggcataataatacatataggacttatttggtacgttgtattaagtcgtattgtattgtattatattgaattagattatatatcatatttttatataatattatgttaaactttaatttatatactaaaatattatatatttaggtagtcataaaaatcaatatcacatataatattatataaaaatcttacatgaaatataatttaatataatactatacaatacaatacagtgtaatacggtgtaccaaacaaatccatatagagttaggagagcgaaaacgtatataatattatacataatttaattaaatgattctattatatgtacctggttatataaaaaacatatatttattctatgtgattattcgcagtttatttatccatggtatggttcaagaatatatatctatatatatatttactagtaaaaagttacgtgcgaggcacgtatactaaattttatgttagtttttttctatgttattaaaagtgatacaattaaaattttaaaaaa

SEQ ID NO: 395681 - DNA, 816 bp, Cannabis indica
gcggcgacactactttgagggttaaacatatttcaagtcttaccaccaccaccacctccgccatacagttgtggcgtgaatttgaagtagattctctctcgttgtttttatttatattggagataatgtgaatctttagtttggggcatggacttataatttttagttagttttttttgtgttgagtgtgtgagttgtttattttttaagtaattgttaacctattatttttgtctataattgcattgctttactttgtgaaaaggaaattacaaataaccgtattcttgatttgattgttttagagtttaattgaaaagttttgttgaaattttttaataggctgtgcaaatgtgatatcttgcattttattatatatgcttgattaggattggtggtatgatagtttaaatttaatagaacttgcattgtttggcctttgaggcaaaattcttgatgatttatgctttgaaaaataatttaggcaatttctttgaaacgtttgtgtctttcaagctaacttattttgtaattatctctagtttatccccttttgccttaaactgatttttttatacacactttttgagctaaaaaaaattaacccatttattattttcctttttcctaactataccacgagttttcaaataattaagtttgagaaaaattgtaattgggtattgtattttgagaagctaaaagcttaaaaaaatattagagatgaatttttaatatgttgcaatcttttttttcaaaataaaaaaaaaagtaaaaaaaaagtagaggattggggatagatgtgtaatgaaattg

SEQ ID NO: 395682 - DNA, 735 bp, Cannabis indica
aaaaaataaaaataaaaaataggggtttttacatgatatattgttttttatatttcgttacttttatagtgtgacacgccatttattatttttttactgtacactttttatactgtcttttttaaaatagtatgaaacttgcgtatatctctattttgacacctgtttaattttatgccatcttttataactgtttatttttaattaaaaagaattagtaaaaggttttgatatgatgttgcttgtcacatttctagcagtctctttttttaataacaattattttttaaaaaaaaaaaaaaaaaaagaagtgataaataagacttaataaatgctatttaaaagtagttgtcacatctgataatttttttttaataataatcaaaattttaaaaaagtgataaataagacctttcttgggtaacaacatagatatgtcatattctagcaaatcaatcaacaacgtgagaaggtatgtgattttgggtttaaatctgtagtatgctttatggtgcccaaattataaggttagttgatatttgtttatttttgttaatattaatggggttatgggcctgaacaaagaaaactcagttctaagcattgtattctcatataatataaatacttaaaaaatagggaaatttacatggtatactaacttttgtcatttttttacaaaaatactgccaggcagaatttttaacttttttactgtgttttttcataagtttc

SEQ ID NO: 395683 - DNA, 564 bp, Cannabis indica
ataccccatcgcaagaacacaccaacccacaacgcccacccccacagcaccattccaactgaccctcacccaccattcggactgactgattaccgcacggaatcgaccgagtatcccgaccgactaccgcacagaggagaactccaaacccgaaatttgttgtaccgaatctgattggggcgcgataagtacccaaaaaattgttttttgggtacccattgggcccggtaccacaaattataccgggtccaattggtccgaatagaaaaatacttttggccactaatagaaaaatactcattagtaaaaggtgaacctcaaaaagtggtcctttctaattaaaaacaatactttttcttttattcaattctttctaattatgttattattacctaataaaaccctttccttttcttttactattaattaattaataatcccttatgtataaataaaaaaataaggaataataatgaaacgtacaagtaacctcataaattttataagttaacatagtaagtagattaagactttgcatttattatttattattttaaattaaat

SEQ ID NO: 395684 - DNA, 976 bp, Cannabis indica
gtaaaataattccaacaaactcttccaggagctcagttttccccaactgtttatggactaactacttttagtcttgcccctacacagacccatttccctgggttcagggcggcacaaactagatgtagtgtagctcctggacaagcaaaactaaggtcccagattctaatgcaagccattcctggagaaaaagagggggtaagagccacaatcacaatgattctttaaaaaagccaaggaaggattatgatccaaagtacaccgagtatacaagcgtaatacacacccgagaaaatgtttataaagcgacctactacatggtccattacaagaaacctcctcgaatgtcacagagagggaggaatagacgtgatcaaaatgaagaatgtgagtatcatggggagaagggtaacaccactaatgagtgtgattatttgaaaatgagattgaaatgttagtccaagcaagaaatctaggacagggggtccgtattccaatcatttatcccaaacaggggttgtacatggacacatgatcattcctagacagcagaatgtcataaaccctctgtagggggtggacgttctcaagctctaagaacatcattacccgcactccctactctgctagccttggttggagtaacattgctggcaccaggaccaagaaccccatatcctcctgaactcgctctacctcaagtggacagacacgtggctacaatcttaggtggacctcatgtcactggatgtacttaaaactcacaaaagagatacctaaaagaggtagaagaaggggaagtgtgcgtgatggtacaatcccctacacatcgccctagaataatgaatttgtccattacttttaccaaggatgatgccaaaaatatgtgcttcccccataatgatcctctagtgattgacgcacagatcgccaaaaaaatgagtttctagggtctttgtggacaatgcaagctcag

SEQ ID NO: 395685 - DNA, 918 bp, Cannabis indica
ttccatgtccacctgcataaatgtaaattgtctttgttcatatttcatatgggacaaacttgtttgtagaaagaaattcaaaaagagagctaccaaatctttaataaaattatctttggagagttgagacttgagactccgcaattctgtgataagaaagtcaagaaaataataagtgtcttgtttctctaccattgcattttagactaatcgcagtgtgatttttaagatgaagcctgaagagatagtgcagggaatgaaagttcattccctaattggatatctcctcaacaaagtgcttttgttgctataggcttgtaagtgataatattttagtggcttttgaattaattcatgctttgaataacaagaagaaaggaaaaatcggtcatgcaataatgaaattagatatgtcataagtagggttgaagttatattcatgcaggttttcagggtatgggcttttcgggtcctggttcgagaaaaagtaaagagatgagggaatatgtatatcacactaatgaaactccagctttaattagaagtatattttaaactcgagatcactctgctaaagtacaattgtaaagaactgttcatgccaaaagaattgagattaaacttttaaaacaagtgatcatgttttcaattaagcagttaattaagattattaaaatatgaccaaatggtagtctcacatcaacagaactctaacaagagagatgtagcttatctcttctaatgctagagtcatagcaattggcatgagtgaaagaaaaaaaaaacaagagaaagaatagcttagtaactgaccttcatagcgttgatgaaaagtactgtcaaccattttaatcaattctcaattcactacggaaagaacacctggacaaattgttggaatttattttaccaggatct

SEQ ID NO: 395686 - DNA, 876 bp, Cannabis indica
tgtatatatactgcttcatttgtgttcaaggaaaaaatatatatacatatataatgttacgaaattgtatgaccacaaacagtaaaaaaggatgtgagagatcacgatagttgggtaattgaaaaaaaaaattgatgaagctggcaacttggattgagaagaggaagaaggttgattgccctaggtactttgggcttgggcttgttgaaaagtctactacaccaacataataataattgggctgtaattgtttttatcttttatgtttgtgcatattttagtttttttttaattttaccaccttgaggagggtggcaaagtgttacattatgaaatagtgtagggatttattagtaattttccaagagtgtgaatcactataaatatgtaattgtgagtctattgtgagatatgaaatgggtaaatagaactttagttcaattgagagattggcactgtctcgaaatataaaataaaaagcccacatttatttaaaaatagttcaattggtaaaaataaaaagaagactaaaaaacaagcaccgcaaaaacatacaaaatataaaaatatttcaagtccacatttatttatttttaaaaaaaatagcttcacacccaagcccaaacttcatagcgcaaagagagtctccaagtcattcataatgtgtcgccttctacttttcctgttaaaattattttaccaggatctaggtttactaccatgtatcttgtttaacatcctaatatgaatttctaaaacaatgtaaataaacacatataaagttcaaggaaccttacattgattgcaatgaaatatgatgactccttacgttcagatctctagcccttgattcctctctgtagcagagcattatca

SEQ ID NO: 395687 - DNA, 955 bp, Cannabis indica
ccactaatgtgtccaccagtgcaaaccccaggacatactgaggccgagaacccatggattggactagtcatccctaacttatagtaaagctcgccaaggctggcaccagcttgaatccaagaagtttcatcactataatttatgtcaatggatcgaaagttaagcatgtcgaggatgatgaaggggacggtagacaccgatgataggcactcaaagtcatgaccgcaacttcgaatcctaagctgaagattgtgttgtttggcgcataatattatgcttttaatttgggtctcgtggttgggttgtaagatggcaaggggtttaggggtttggagtgtggcgtatcttttgttgtggatgcgtgagagtagcatggatttgaatgtggagttttgaggtgtgataatgtttagcatggagttattattagagtttttttggaagcattctaggaactcgtttaaaggtgttgatgaacaaagttgtgagagaaaaatgaatgaaagaatgaaaaatataaagtctcgaagctttgtaatatgcatatttggattgaaatgtattgcttttgctaaaatgtaagtagtatttgttaaaatggttttgacactcaatatatatatgtgcacatgagggtttcactagtcatcacaactatttggtgagctgatgaaaaaggtaattaatcaaaatttgtttttattatatttcttacatttttgcaatatgttgtcctcaattaagaaattaagtaacatagatttgattccaattttagtttacaagattttgtgtggaaaatttctaacaatgggtatgattattttcttttttgtttttgtcattaagatataattgtcatcaaataaggaaataataacattagtatttttttttctctttctttcttttttttttttttttagttaaaaattttacttttttttcttttttt

SEQ ID NO: 395688 - DNA, 1093 bp, Cannabis indica
tgttatcatactcatccattgttctgccttaagtggatcaactccaccctcaaacactagtgggttcggcttcttgaactgctcatacaatggctctagacgattccctgcatctggtggcactaccagaggtgctggaggaccaggattaaggtttggaacaggctaagctcactgcaccctcagctcacctgctttcggataattttcttgcatcacagcatactaactcctcccaagtttggtggtggtggagggttctcgcctcaccagcaaccccaagcccagcaagcttgcggttacctctaccagtccgcctcaggtgcataatctatacacctacggtcacattccaagtaatgacaatactgataagtatttctaaacaactcaaactttcctaacagctagcatattcaaataaacaggcaatcaggcaatcaacagattctctaacaatttaacttactgaaccatgagttgatcgagtctttgcagccaatgtacatatcaaacaagtctttaggatctttaaatattggtcgctctgataccatgttgtaacgccatgtctaacagggacgccacgtgtgtgtatttttataaaattcttatttaaaaaattatatatttataccaaaactgtgggtaattaaaattttaccatttaaaacaaatcctttttatttttttttaaagttagatactactctttatggggaccccctcgtaacaaaatacttacatttagattcaaaatacttttacaacataaactttacgtttcaaaatacactcaaaagaaacatcctatccaccgggtcgtggcaccgcgactgatatatacattgctactctgaccacagactcatggttgatcaaccttagccttccctttacctgcaccatatagcacctgtgagtcacagagactcagcaagaaaagtgaataaaacaataatcgatgtaatactcatctattcaatctcacaataacatgcttatacatttacataataaagtaatcacacaatccttatacttcataaagtacccttaccactcgttaaacacgagctgaatatgtcactat

SEQ ID NO: 395689 - DNA, 1564 bp, Cannabis indica
acaattattcacacggaataaatgatcaatgaaaagcgataaaaggaccacaagaacataaatgagaactagattggaagtaacaggatgttcattactagatcaggagaatctggaaatacctctgaaattttgaactgtggaatagcttgatctccatcctctgcaacatatttataatattgaaatatcatcatcaatgaataaatggtcagaaattaaaagtgcaactctagtgaatgaaccagtatgatcacaagttaaatagagcacaataatccagccaaccttttccaaagggctcaaagcgaatgtgtcctggcctcaccacaatggggactacgttatcctcttcgccattacatttctcaccttgatgttctttggaatttcggccattatctttgctagatgactgctggttatttgtttggggtacttgtgcttgatgtggctgcaaacttgatgtttgctgaatattatctgctttaagtacttgtgcctgatgtagctgcaaatcgagtataatcaacttatttgcagagcagtagagagtactaatactattgtactaaagcataaagctaaccacgtttcgtctgagttgtgcatatgagcatacaaatccttccattaattttattcaatataaatataaaatgtgaaataaaggaaataataataaaatactagtcatcagaaaatcaaacgacctcattttctctggccttcgcttgttctctcaaccgttgtcttttggcctttttacgccgagtacttctactagctaggtaactgattacaaagatattatataaattagtttaacttgatttcctaacttaaataaatgaaaaggaaagacaagacaagacaagaatgctataataaggtgacctctcatatgccatacatgtagctgccatgtaccagtcataccatgtatggatttgctgagttcagttaaatggatccaagtgaaaaaagttacagttcccacaccttaaaataatgacacttggaattggatacaagtttattaaaggattttcaagaaggtaatgcattctttgttaattattgaaattactctaaaaaaacctcacaatctttaatcatgtttgactacaacatacttgtctacaagccaatcgatggcacgtgatacggttgcacctgttaatctcaaattactcattcccattcacaagtaagatgatgtgattgcatctatcaatcccacattacgcaatagtagagcaagagtattgtacttaaagaaaacatgaaaaaataaaactttcagaaactagagcactggtgctaatgtcgctctacacatgcaaatgactttaggctgagattctataaaatttaccactgcaatccaatatagactaataacaatgaaaatcaaaccactgtggtagcaattaaccacttcaagctcaaattgtcttatcttattgttttacttttagaaagtacaaagtatgttgaagaaaatccaaagaaaaaaaggcctaacattttgcctaagaaacttacaattgaaactaaattt

SEQ ID NO: 395690 - DNA, 734 bp, Cannabis indica
acttacgtgtaatttgagatgattaatgattttacattgtatataattattaaaaactttctattataaacattaattaataaaaaaaaaaatacgtataaatactagctacaaaaactattatcataattatttaattggtgccgaaattatataatattaatttagaaagtttttttgttttatagaactgttttggaaggttatatactagtaatattagtagtaaaaaaccatcgaaaaagtattcataatataaagaaaaatcatgtgataaatatagatttccatttttttacgatccatcatttatttttagtttttttctctctttttgttacatataaataatatagaattcttctgcacttggatgttacactctttatctatttggatatgcaaagaatttttagtttaatttttttttcatatatgttataattatttaaaatatcttacaaaattttaaaaaatttagaataatttacaatatagaatatggtattcaaacagtttaatttacatgcatataaaataaaatagtcacccgtacaacatactttttaaactttatttcggtgtgttaaatttttctttaaataacaaaaatttgactaaaaaattatttttgataacaaaactgatgggagtgcataagttcaatattctttattgtagaattgtttaataatatatatatcgatttaaataaactataatttaaaaaaaaa

SEQ ID NO: 395691 - DNA, 558 bp, Cannabis indica
atttatgctgacaacttttgccgacgcaattggtcaaatgcgccggcaaaagttgcttttcttgtagtgttttagttacattttgcacctgttggaaaacaaccctacaattgctctctttaccttcccactgtttggcatttcgactggtagttttactgttgttttagtaattttttgttattcttccaggattgaaattttaaatacttacgttcttactgaaaaaatagttgttttccgactattctggtgttggtctgctacgtagttcggtccgtacgtaggtgttgaagatggaagtttcgtatgtgttttggggtgtgtatagcataaaagaaaaaaaaaataagatgtggacattttttttgtaaaattttttgtgtagtagtaaaattgtaaaactgcccctaaaatctagtatttttgtaaaatctcctaataaaaagtaacagaaggggcacgtttcatttctacaactgtataatattgaggaatatttttaacatgtcgtatatcataggagatattatttagtagtgtcataaatttataggt

SEQ ID NO: 395692 - DNA, 1539 bp, Cannabis indica
atttaagttattttattagtttttatatatatgaattgttatatgtaaaattctataaaaatataaaaaaaaaattaaaatgtaaaaataaaaaaaaaattaatattttgttggaaatgtataaatatatttatatatacatatattaatttggttatgatatttgtgtgtgtatgtgcatcatcatcatcatctctattatatgttgagatgttaggtttgtcatcaaagacgtattagtaggttcagaaacgtcacaacaagcaaattcaaaacgtattaccaccatacacctgacgtatggatgatcacaatcacaactaatattcaaacaaacaaaaaaaattatacatctataaagtaattccaaatgaaatcgaatcatatcataatcgtatttatatatataagaggtcattttcatataattatagttttgatcactcatataaatttctatgtaaacatggttaacattatctctatttggacaaacaaattaatatccacttaattagttcgaaacataaaataaagataaatagataaatattagatagtcaatttaaaaaaaatgtggacggcttttgtcttgtttgaataatgatatatgggtttgattaaaatttcaaaggtgtgttgtgtgttgtcttggtctacaataatgttggactttacacgaattaaacggtcattattattatttaacttgtagcgcctcatttaagctctttatataaattatttttagatgccactaaaatataaaagatcaacgagaaatttttgtgttgagtcacgaattagattgtctttttcaaaacattcgcgacactatctaaaaatataaattaaacagttaaaatttgtcggtcatccccaaaataaaatagctcaattatcgtaggctatatcgaatctccactcaatgcagaaaactgtcgaatacaccgtcacaatataacacagtaaaaaattttctagtaaaaattatatttgtctttttcgatatgattgttgaacgtttttcataaaattgatacaactaagtatttagattcaaataaacacgttttacgaataaataaaataataaataaaaaataattattttattaaataaattttctgtaaaatataaagtgtcacaccaaccaactatttagattcaactaagtatttagattccttggacgtttttacacttatatagcatccaagttgacgtcagatatcaacttgggcgctagatgtcaacctgagtgctgggacctgaactgtctttagtaaaataagcataactcactcaattttcaactgattgacgcaattcaacttacattttgaagctatttaagctctctatcaagtcatgtataacaccccagtcaaaaatctgaagttatcatcgtcaaattcattcttaagggagttacaaaataagctcttggtaactcgtagcgggaccagtcgagcaccaaaattaactgttaccaccagaacctattttacctttagatcatcatcaacgatggaaaa

SEQ ID NO: 395693 - DNA, 1299 bp, Cannabis indica
ataatttgaattcaatgactttatggacttgtgtaccctgttaaaagtgtgcccttgcaagttctgctgattgtttatcactgactaacagtttgcacttggattttggggaagcaagcacatgggaaacacgggaaacaaaccggcgaagcaagagcccgaagaaattttcttgaagattgttcctccattagaccatgcctatgtcaggtggcttactcgggatctcgagaggactcatggcttcactccagcaaagccgcgcgcagtgaggcctccggatcattacatagagtacatgcagttgaatggatggttggatgtgaacttggatgatcctgacatagcacacttgctcaaaaagtagataatatgattatgttgattgctgttctttgaatgtggaaaatatattatgaattgttgatagaatcttataagataacactccttacactaatttatgtttctaaaagaagacttggcaagtcttgattatcgaaaagtcttgtttattaactttccttcttcacagctaacaactgaagttgctcaaaaagttttattttaacttattcctaacatttggattcattttgaaattgcttccaattttcttgctatgtttgaatttgaagtacatttgcagtctaaattgtacaagtgtgttttaatttccaagtatgagactcacgtggtaatgatttttatttatttgttttctactaaaattaggaaggaaaaaaaaagaaggaaaaattctccttatttttataaagaatactttacattttttttacttattttattttattaattgaaaataaaaatacaaatatacctaactatgaataaaaaatagagaaattattttatatattattttttaattgttttttcaaatttaatatttgagttgttctggtgattctatgtgggttgctatgtggattttggctgtaattttggttgctctgttagtgtctatggaggtttctatatggaattccgtaaaaatgtaaaaaaaaaaaatatattttaaagtgtgaaaagaaaaaaattcctaaaaaataattacatattttaacattttattatcttttctagacttgtaagtaaaataaaataattttgattttatcttttcttttcaaatatatatatattgcaaaattaactttcattaaaatcaaattagtgttgggtccgcctattattgttgggcttggaccatttaatggtttaaggcccaattttgtttgaacaattaaaagaaaaaaaggcatttacaaaatactg

SEQ ID NO: 395694 - DNA, 588 bp, Cannabis indica
aatagaatgacaatgcttgaaaagagtaggtaatgaattattcaaagagcttgcaactcattgacccacatactcgtgagtatgttgagagactaatggtagcatttccaacatgattcatctcgaaattgtcatattatgatagtgtctcgtatttacttcactcaatatttatagaaggacgcaagaagtattacttaaaatatacgtaggcgttgagaatcttgtttagagtaaagcaccttgagaaaattgtttatactacaagaggaataaagtatagtcagcataaccgcttacagataaagacaaagatcaatttattattatcccatgtgatgtaaatatgaaatgtgggaattgtctactttttatgaatagttacagggataagattctaagggttcgtttggtacgcaggactggattggattagatagactaatttgtctagtctagtgtatggacatgttggaagtctagatagctaatccatctaatctcatctgggattatttatcccatctagcagggtgggataaataatcccatgcaggtgagatttttttttttatcgttttttaaatt

SEQ ID NO: 395695 - DNA, 1533 bp, Cannabis indica
gacgtatgcattattattgtggtttctttgattcttttattccattaaatagtcctttaaatatttaattataatattattataaaataatcattcagttaaattttagcatacgtcactaataaaatattgatgtgatttattattagtctactatcatattaacgctaaatatttacatcagtattatgattgtcaaatgtgacacaaaacttaatagaaaagattattttacaagactagaaataattcgagaattattaaacaaaaacccaaaataactatataatcaatctcaaagaaaataattgaaagtgatatataaatattattctagaattgcatttgtttaatgttttataatatatatttgttttttttttttggtaaaataatatacatttgtttgatgtattattttgattaaaacataacatattttaatctaacatatttaattttttttaattataaataaaaaccgaccaataaatcataccccatcattacatctttccctctgttgaatatatttatttaagattatatatcatatcatcatagaagcaaatcgtatcgggtacagggataacgggaccacatttatagttcatatcctttaaaaaaaaaaaggtgtaccaatatctcttatttcaccatttatgagaatttttaatttagtttttttaactgtacattttagttatttaagatattttgtagaaattttaaaaaattcaaaataatttacaatataaaataatgtgttacaaaaaataataaaataaaataatgcgtataaaataataaaatcacatgtgcagcagactatttaaactttattttcggcaggttaactttctcctaaaaaaaaatctccaaattttacaaaatatctaacaaaaaacatataatcattatatattagaggaaaaaatttcaatgcactgggtgcactgatgtacttatacatttttatttattttagcattgagaataatttcttagtttaattttttttgtacgttataattatttaaaatatttcataaaatttcaataaatttagaaaaatttaacatgtcaaaaatcaggttcaaacagtctatcgcatacatgactattttattttttatacgcgtgtgaaatagacagcttgaaaattactttttatattgtaaattattctaaatttttcaaaatttgtagcagattttaaataattatagcatacacaattatgaaaaaaaaaattagattaaaaaattctcctacatgttgaaaccgaaacagataaggggtgcatcaatatcaatgtatctcttttaggagtgcattgtggaagggaaatttagaataatacctaatacttttcccctaaacatataacatgtaatatttatgggatatgacacattttacaatattcctaaaataccctcatttacattatcccctatcccctctcttcttctctctttcttcatacccatcggaccccaattggggttcccatcagacccgtcggaccca

SEQ ID NO: 395696 - DNA, 935 bp, Cannabis indica
tgtgttggtgatctcaaagacaacataaacatatagaaagtatactatctatctatctttcttccttatacttttaaatgagtaatactatctaatatctgtctttgataccattgatacaaaatctgatacttgaatcctattcaatcctaatatcaatattcttcgaaactttaatccttttttcatatatttgaagataatatatataaatgcaaaatgaaaatagtagtgtcttggtctcttatttccattatacaagtttacaacgatattagtattaaataattgaaatttaaatactttattgacataaaattattaagaaagatcaactatttttaaatattatggaatttcacattaattggacacaaaattcgacaggtagtgttttacatcattcccttttgatgagccctaagttgaaaatgaatcccactaacaacccagaaaatggacaaaaaaagaaaagcaaaatctaaagcacaacaatgcttgacagttgagatatacaatacagtgctgctatggctgaagcaagtactatcatcaagtctccctaaacttcatacatattaataaagcaatcaatcctcaaccaggaaaatactttcaatacacaatcacaaaaaacaaaccgagtgaaatctccaaacatctaagcaaagccatcttggacataaacaccatcttcctcttcctccatcaacttgtattgaatccactcaagtgactcacccgaaaccaaaggatcatacaatagaaactcggcaccttgatcctccgcctttctctttagcatctctttgtaaaagaagagcattttcaaagaccataaaatccattttcttatacccaactttgcaaaccacatctgttaagaatctgcttctagtgatgatgctgttgagaatcatggggttccatctcaa

SEQ ID NO: 395697 - DNA, 920 bp, Cannabis indica
tttttaatatattatatatgtaacaaaaataaaaaatgagcgggttggcgggcgagttcaggtccaacccgaaactcgatgattataaaaaatcaactcgcgatctttctttcccatcatgtttaggatctttgtctcgtccctcaagaatgggattttcatcaatgtatttctcagtactttgagtctttttagcacggcgaatggttgcctctgttggatctccatcgattcctatcttcgcctgggctgcaggagctacttcgtccataggagtgtctccatcacgactacaagttttattttgggtaagtaccatagttgcattatattattgtaacttgttttactaggatgtaaatttactaatatgtatgttgattataattctataatttaacatcctaaatataaattctctaaaataatgaattaaacacatataaagttataaaaaaccttacattggtggtagtagaataatatgactccttccgttatctccaatccttgatcctttctgtcatagagtgtgatcaagatctgaacttggattctccttcagttgacagtatgaactacataatcctcctcaatatgctaggtattgctttgacacgtgtggacatattctcaaactaaggagcatgaatttctatgaagaaatctcaagaagaattcataaaataatgatagaaaataataggtttcttttttattcaatttgtcagacaagagagagtctagagtcatcatcggaaccaaaaccattaacgctctatttatagggatttattaggtttagtgttagagttaaatgggctgattagaaagatcaatggcttagaatggaccctcatggtcaaatctcttatgaagcccatgagttagaattttgccattattttgcttccttaatg

SEQ ID NO: 395698 - DNA, 534 bp, Cannabis indica
ttttttttacatataatgaataagtataagaaaaaaaactaacagtgtgacgactcctatatatgagcagatcgtgtgagttgcttgtggtggctccaatataaatacacacactatgtatagatacaagaatttaaataaaatatatatacaaaataatatatattaaagagaagagtatgagagataaaataatattacctaaaggatggcgacgggtggtggtctggcgacgtctcaggcggaggagaggaggcggcagtactagtggtctgaccttaaagaggatcggacgatgaatattagagaatgaagaagatgatatggtgatatgaagatgaagagggtttgatttttttagatgtagaagatgaagatgatttgaatattgacaagatcattctatgcaaagagaaaatatacctaaatctacttgaaagtaagatcatttatatttgaacaatggatgtacgttcaggggtggatatgagttatcgttaaattctttggacgatcactctagattttacctta

SEQ ID NO: 395699 - DNA, 1044 bp, Cannabis indica
tttttttaatattttaatgtcaagtattatatatcttttataattaatgtttatttatacttaatattagttataattgtttatacttaatacttttatattagttataattgttgggcttcgttcttctatcttatcaggtcgttatctcatcttgactcttacattagtataatattattcattttgggcctaagccctcacaattttatttttggataccttttcaaaaagtctcatactaatggagtaggtggaacacttatatcaaagacaactctacttattcttccaatatgggacttggattgataccctaacaatcctcccctcaaacacatactcgtggcctcccctccaacgaaaccaccttatgccgtcactatcaccaacggaagtcaccgtctgaccatcttgtaccgccgattgccatcttgtaccaccgtaatcatcaacgagacacgccacctaactactacaatatcaggtagactttcaatacaaggcaccatataaatcatcaatcgcgaggtcatcacactaatggcttctctcacacatcacaaacgcagcctacaatcccaactctcctaaacctttggctctgataccacttgtcgggtcccattcttccaccttgtcgctacctcacattgactcccacattagtataatcactactacaaacaaaggcctttaatcccgatttttaaggccttttatcctggttttcgctaaaatgaaaattaagatatatgctagtggaataaaaagtctttgaaaaaccaagataaaagggggactttttatcttgttatttcataaaaaccgggataaaagggggacttttcatcccgatttttatgaaataaccgggattaaaagataaaaaaaaaataacccaaaaaaattatattagttccttgaaataatttttacaattagattccaaatatttatatcaaaatatacaaattaatacaccatcaagggtcaacacaaaaaaaaaaactcatcaaggaccaccaatgacgaagcttcgtg

SEQ ID NO: 395700 - DNA, 640 bp, Cannabis indica
tatttttttaacttataaaaagatttattccatctcattcatcatgactcatgagctttgtctatgttattatatacaatcaagtttgaggttgtttttcaattgaagcaactaatgtgttgttcttttgaataaaaacgtcaatatgaaattttgagggggccatttttttttatttttaaattctggattttatatttcatcttcttcttaaacacataatagttcaagccactgtaattgagataaaaaatggatatgatctcagttggactacaccaattggaccttgaaattgagaagattttacaaccccaattgatatcttcataatagttattatacatggaaatttataccgcggggatgggtaaccgcgggacccgcccctaatggggtggggattccccatcttagtggttaatggggcggtggtgggggacaatttcaatacccgaagcggagatggagcgggagaggggataatactatccgcaccatatccgaccccgatataaatatatataattttttttgtttttttttcaaactttgacacatatttagtttttattttctattaggttatgcttttttaagtagtttattttttatcttctatgaattatgaatgcataat

SEQ ID NO: 395701 - DNA, 536 bp, Cannabis indica
tttatatagcaaagtagatgacaaagtaggagaccaaaacagaactaaaaatttagagaattttactctaattttagtcgggggtgtaaacgtacaaaattttaagtttaaatagtttagctgtaaattaactcaaaattttatatattaaaaaaaaaactataacaaataagcaaacttataagtgacatattttgataacaaagttacaaaatttcatttttcatataattttcaaattagccttttacaaggaccaaaaaaattaattattcagtttctaaacctcacatcacaattaaatatattttttttataattgaattataatattacattatttacaattatgatttatattggagaaatatatatccacaaatataaatatattcttcctaatctcttatcttcccttccttgaaaagttaggtgtgaagacaaaaggtaagtcaaaaaatgccaccttaccatctgactcatacacagtgagccaattaatctaatacccctcatacaacttttttttttttttt

SEQ ID NO: 395702 - DNA, 924 bp, Cannabis indica
ggtaataatatctaaattatagtaactagttgttaagtcaatagtcacgtgacatttccttattagtctagtcactaaatttttatttttatttaaaaatttatttaaatataccaataagaaagtatcacgtgaataatgatgatttgacacttaacgatcaagtacctactaaaattttagaaatataacttaaatattattactgtgaaatgttaaacttatatttatatgtaactaagaattaaatttaaatgcattacacgtttatttatttatttatttacattggtggaccagtattcgaagttaaaacaatttttttttcaagaattactactaaatgatgtttatgtgatattaaatgtatatatttatattattttgtattaaaagttatttatttatcaagaaaaaagtggttgactaacttttaagttcaattactttttgtaaatattgtccattaattttatgaaaattgcatccttaagaacaacatgttcattctaatttgcgttgagaaatcaataattttaggtaacaaattaaattttaattttagtcacctaagtgtctaacttgtcaatcaatttgtaactatcctatattaaaattagaacattgctaatcaatgcggaattagaatgtgtttatataatgggatatttgttacaggagtttaagatcttagcaatacggagggtttatgttaatgtaagcctccttcttaagggtgcgtttggaaagccacaatataattggatttgtgtgtaattggaagtaattacataatttggcatatttgtctgaccatgtaattacaatgtaactgtgtaattgaaagtaattgaggggttccaattacactctccaattctcatggcccccccatgagaattgaatgtaattacactgtgtaat

SEQ ID NO: 395703 - DNA, 985 bp, Cannabis indica
caccaagtaaaagtatcaatatccttagtaaggtcttcaaaatcacactcttccactactttcctaaacccatccatagcattcaggttcttctccctacccccctgcttttctttcgcgtgaaggacctcattaaaatcacccccaataatccacgggccatgagtttcatctttaattctatgaagcatcgcccaaaaatggtgtctttggcttctaatcgggtcaccatacaccctagtaaaattccacaccaatgaattcaaatcacagacagaggtatgaatatgaaatcttgaatgagacagaatttttaccttaaaatcggcttcccatagcagcattaaaccaccgctgagacccaccctttccactagaaaaaactcgctgtagcccaatctcctcgccacactctcagcttgacaattgagtaacttcgattcagaaataaaaatcaaattcaacttcaactccatcgttctcaaatggagagcattgaacgtctcagggttgccgagaccctggacattccaccatagaattaacattgagatcggcgaccttgcatctcaaggtgcgccgctttatcatttttgtttaagaccgataaatcctcctctccagaaataatcgatcttacttgctccccaacctcaccatctttgtcaacatgtccatctactctccctttagtacccaaccgagaagcttttccacgagccaaaactttggccgatttaagctttcgaccattcgcactgcacaccatttttcctttcatccatccagcccgttgtaaagcccgtcgccatgtctggaatgttaaattccttgctttccatttgcttctccatctctctttcacaatttgccctttttccccctggttcatcgtcaatttccatatcgcttgctgtctctttttccatcgtcgatcgtttcttggaaatatttgttgctgtttcctcatttttctctttgcttc

SEQ ID NO: 395704 - DNA, 531 bp, Cannabis indica
gtgtgatttctagatgaaaaaaaatctgaatgtaccttcgttgtgattcttggctctttgagtcataaagaacacgaagaagatgaacaacatgtttgggctcttgaaaaaatacaagtttggatctgtataagccttggcacgccaaggaggtcttgtttaagacctagctggccaaggatggatttcaacggatctggtcggccaagggggtgtaccccataggttggccggtctatgcttgggacatgggtttctggccggccacaaggctaggtcatggggtctggcctgccactaaggcctgcaaccctggccggccaaggccaacgctctaaggggcagctagtttctttccctttgttgacctcggctagggtctcatgacggccttagaggcatatactgttgggttttttgccctcaataattcaatataatcagatttactaagtaataaaagattagaaatcattttatgtttcatggttcacatgatttatttcatgattatatttaatgtataaattc

SEQ ID NO: 395705 - DNA, 576 bp, Cannabis indica
tatatatatttgtatcataaattacaatcattaaaaactgattatgtgaataatgttactaatcacaaattcacaattctggtttataatatgatctacttgttaaaaaaatattattatgaacactaatttacttttttttggttgccaatcgtcattattataaatatactattaggtacgttatattaattataaatttctatggttgttccaaaataaaaataaaaatttaaattatatgacatatacatgtattttgtttaggacaataataatattcattattattattccaattttttcaaccatatactgccagttagtatagttatgatatctaatttatggcacgtcagagagtactactataccacccagatacctaataatgcattttcagatatatatataaggacacgattttattttatgatgtactttcacggaatgtattctgtaatgtacggcagtcgttagataagagaagttatttgatctagtgctgagattatctaggagtaattaaggttaaaaaatagtaacataccccgacactcatctaatgtaccctga

SEQ ID NO: 395706 - DNA, 797 bp, Cannabis indica
tttttttttattggctaaatatcattagtgacatcttgaataaatggaactaagtctagtatactgtattgcagtgcatgaatgtgaataaaataaataatgaaaatttgacaagggaaagtctttgacttcgtgtttatttttttttaattattattattattattttaaagaaaagaaagaaatggaactggctagatatataggtatgtaggtttttttatttatttatttatcattttttatatatatagctatgtataatgtatagctttattatcaatcacttcaagacttattaatttaagtgggactatgtggtctgaaataaagacgtgtccactcaggattgaggcgcatgttccgtggacgtcctcaaaaacagggactgtgactttttgagactactactacaatactacttcaactctcaactaatgacctacctacctaatctccaaattctttggtctcccttcttatacgtccttttaaaactcttcctattatttcatcccattcccaactagtttgatcactatttttaggatcctcagatttactcggtctcggatgatgaacaattttcattttaaaatgatatgtattttctatatttttttttagaataatatgtattttctatatgtttcatattattgcaagactaaatttgttaatactataaaaaactaaaaaataaaaaaaaacttaatttttgttgaatcttagtaatggtgctaattaattaagctacatttcaatgtaatgtgatatattggagtgctccatgtgaa

SEQ ID NO: 395707 - DNA, 696 bp, Cannabis indica
aaagaagaaaaaaaaaagtagcattaccacagaaagtggtaactaaaaatgaaaccagagaaagtaattgcagtgtgagtttgaaccaaatgatgcaatgtctaaggttgatatttccttgccaatacacaccaccaagacaactctttttttagtttctttcaaataacactcaagtaaatgcagaagattgcctcttattagctgagtcacttggtttgacatcactaaatttacaattaaaatgacaaaacttatcaaaataacattgagcaaaaagaatttattaaaatgacaaaactgcactagagctgaaggaggctgtttacataaataaatatggtaagaaaaaaaactagtttacataataagtatagtaagaaaacttaattggataaaatatggcattaaaaaaaaattgtattataaaaacattaaataccctttagatttttttttaataaaatttagaaacaaatcaactaacaatgatcgtcggagttgtcatcagcgccgaaaaagtcactggagctgtcttcgacactgatgacaaaaagaaacttaaaactcaattacgtaaaacaacaaatcgacaattaaacacaaaaagcacttacctaatacaactaactaagaaattgaacaagtataagacacctgttaacccagaaactttctctggtgacgtgaacatca

SEQ ID NO: 395708 - DNA, 1009 bp, Cannabis indica
tttttaattttttttaacgttttggacattttgtttttgtcttgttattctaactttttttttttttttaataatgttattctaactttttaatttatataaacacaataaagactactacaagttctttttctaatattttcttctttcatttttatgatttaatcagatttttgttttcattttgaattttcttttttctctctctctctataagattaatttttggaaagaaattaattatattctgaaaagaaaaatgattaattatatttttaagaaatagattaattatttcatataatatttttttagaatataattaatttgattactattttttatatgctattgattttttaaaaaattacttatttctaaagaagcatatgatagtcgattactatattttattttattttcttctaattttcattctgaccctataaataaataaaaaaataagttaaataatttatttatgatgaaatgtgtacaaaaattaattagtatatatcatgactatacaatttgtaacaactaattaaagatagagtagattagatcgtatccattaacacttctcatttgtaaaattaaaaaccatgcatattaattttagtgatccactcattattaattctttgattttaaaatgaacctatgtaccaaaagaacttattcgtttcaaaatgtgttaatattgatactacttcttttggtgaattacattaattcatgatatatatatatatattcagtagagtaatataatattcttttaacattattttgtgcattaattaaattaatatattcttatatatatatatatattgagtaaaatttataataagtttcatctttgcatgactacgtacgtacatagtttcttatattataaaataactaataataacttgatatgttatcaatagggaaatttgattttctatacttagaaaatcaaaaaaatttatccctaaaccaaaatttaaaacctaaaaaa

SEQ ID NO: 395709 - DNA, 943 bp, Cannabis indica
caacaagaaccaccaccaacagcagctaaaagagaaataatctcctcaataattagacaaattaattgttttttagttattctacttttaattattttgttttgtcgttttacggtcgttttataaaaagacagtatttttgtaaaaaattctgtgtaacaataaaattataaacttttacccaaaatccagtatatacgtgacatttttagctctctattagagacactcttaatagatgaaattacactctataccctttttatattgtcctcttttatttttaccctcttttttaaagtctatcatttttaccttttttttaaacattataccaattttgcccctgtcacttcaagatactctccatgtgactctcttatgttagggtattttggatacaatacatataaaaagaagtacgtttcaaataaatataaaattagagataaatttgattaattgattaataaaaggggtattttttaacttaccccctcttaatatgtacatatccttaatcactttcattataattttaacattttttttaattatacataactttttaagtttttttttgtactaattacacactatttaagtgaggttttcctatagtcattgcttttttgtattttctcatactaaataatattatcatagtaatttatatttttttttggtctatatttgaagttgtgtgttatgtttttgtaccaattactccattttcctttttaaaatatttttttttaagttctttttaacattttttatcatcttttttcaattttattaccctttttttatttgtttaatagtaaatacataatagtgtaaaaaactataggagtatacatatgatattaatcattatttgtgttgttattcttcttttttttttttcataaattttggttaattattattttatttttct

SEQ ID NO: 395710 - DNA, 1572 bp, Cannabis indica
acaccaatagggccggctgtgccataacccaataaatctttaaatgtatatacattaaatctaaacataaaatacaagataagaattattaacgcaaattttcgttaactaaaaatcttttcttaaataaataaaaatttagaattaactatctaataataataataataataataataataataataataatgaatgacaagaaatttttttacgtggttttaaaattaaatctttgcaatccaccaatccatcttattcagaattggaagattgtatacaaaatacaataaattatttttcaagaatgaacaataaatacaatattgtttatttttttaaggttgaccgcccttttgttcttgggctctgtccctttttataggagtttggaatgacagttattctcttaagatatgatcattcgtaattgctcgtaaaacgtggacattccccacgttttatttttatgcacatgggatgattataaataactgcctaactgctctttgtatttatctataaatagttatgctgactgtgctttgtgattctcgtcattcaattaacactttttttaaatatatccgtggaaaaatgtctaagtgtatagttgtaatacatctcgtattcttccttaaatgttgagtgaagtataggtgagatgcttacttcaacacgttaagagcgagatgaagaatgttgaagttgttgtctttattcttccaatattttcacgagtatgtgggtcaatgagctacaaactcattatctacccgttccaaatagtaccattatgtactctgtttatcctgagatagacttgtttaccttgctggtctcattaatcggtagttattactcatgtctcattattgtctatatgacgacgagttcaagtatttctactaattatatttcttgaggcgagttatttaagttattgatgcataatttgagcttgttcatattccagttttgttacacgtgttagctttttattacttctcaaaatatgggtataacaattgcctcttaaaaagtgctttttaaaataaaaaggattttttaaatgccttaatggtattattgtattttctccatttaaaaattgcatgctttcattttggcggttaaaaactttaaggtaaatcattttaacatttaatgttcatactgttcttttcccattagtttccatttattcgatctactctttttgtgatcaaacggttattgccttttgggtatattaccaacttaaatgtccttacacgattgaacgtttttgaacacattttgatcgcctatgtatgagcagttaatattctgctaccttagttatgcgcgagtagatagtattctgccataaacaatttttaagagcaaacttcaaatattttgaatagtatttagaattgctttacatattccttaattgcttgagtaaaaagttaattttctattcacattttagtttgcgtactatttatcaagacacattagggtatctgataactctatggtatagagttattttttatgcttttaaactaaaagtattgtgagaag

SEQ ID NO: 395711 - DNA, 851 bp, Cannabis indica
ttcttaactttcataatagcttataaatacacaaactaatagctcgactcactcacaacttagagaacaacaatctcaactgaattaagttagaaaggtcttagtggagatagagtttttcagaggagaaagaaaagagagaaaacaggggtcaccattgttagaggttatgctttcagcttgtatgtgtgtgtggagggctgtaaacagagattgtaatcttgaaattagtgtattggtgatcccacttgtatattctcctcctctatcttatcacaccgctatgaaataaaaattcattcattcattcaaagtattttattcattgattatttagttattgtcattatgttaataattgtttgagctctttgtgatggtgttcttgatgagctttatccgcaacaggatcggtaggggagccacatggccattagtcaaaaacggctgatagtgatcccatatagagttttgtaaaatgcaaagcaaaagttttgaaagaaatgcttaatagagaataagctttagcttagttcaactgattgagattaacactttatttatagaggtagataattgattacaagagtttgaatcaagaagcgcctaactacttttagttatactaatactcactgaaaagttgtattaacaaaaaataatacatgctagttagttatactattaatagacaaataaatagatgacaaaattttcttttttttttttgtacttgtattttgaatctcgttttctttaatccctttcctaaaagaaatccttccttttctttttttgtttggattggatcaactccttcgattgattgtatcttaaaataccgaattcga

SEQ ID NO: 395712 - DNA, 837 bp, Cannabis indica
tttgatttttttatgctttatacggttgttttgttgttgatctgagttgttttttaaaaatatttagggtaaggggaaagtttctaagtcaaaggttttctttgatggtgatgttgaagttcccactggtaaaaaaattattgaggtattgttatttttttttttttggattgtgatttttgttgatttacttttttttttgttgtgttgctgttattttcagttgtttaataggatttttattgcaattgttgtagtattggagtcctaagtacttgcgctctaattattaccattcaaaagttatctattgtggatattataggatcatttaggatactttaagagtttaactcctccccaagaaatatttatttgatcatttataaactaaatatataagagctttagaaataataaaatacagtaataattaagatagaaatttttacgtggttctagtattaattaaccttagtccacgagtcagtctattagcctctaaggacgtatttgatatgttttatagtattttgcaagaaaccctaactttgttgctctgtgtttctcttgaagaagacgaaagcttagagcaatttcaacagagtttcctatctaggttgtgatccccctttcgtatagcaatagaagggtatctataggtagtgaggtggatatggacatgcccatgactcgcctaaggtttctactcaaagcccactaatggggtaaattacatgcaaaaagagctgactattgggctccttgcaaggaattatgcttgtgcattgcagaagctggacaaaaggggaccattgtgttggattttatgcccta

SEQ ID NO: 395713 - DNA, 770 bp, Cannabis indica
taattttttttcctaaactattttttttaagaattaataatacattatttttttttctatttatttttattttatttgccaaaatcattttttaagaagtattgttgttgaagatggtgacaaattgttaggcatggaagagtttcatttgggaatttgttggagtttgtgtcaacatttttctcttggagacccgtataatgtcataggagattggctttatgggagaatttcaatcaaaattaccaaattcaagacaatgttttcatcaaattaacataacaagtaattaattatataatttggttgttatatctttttaaatagataactttcataatattctatcaatttttttattctaatttaatattttgtttttcttttcaatttattttatacgtagagtaatgaagctatggcagtttgcatgaagtttcgaaagcttagagagttcaagtgctaaaatcatattcatttaatcttatttgtaattttaaaatagtcttaattaatgctctatcagtttattgttttcttcaatattataattggtgtgtaacttttcttttttaatcatggaagatcaacaatcttaattttgtgttgtgatttgtttaccatatacgtgtaaagatttggagagagaaaaaaaaatgatcttattgctcaaattaatgatccaacggaccaacagtaccgaattagttttttttttttcatatatatgtatgtggacttttatacataaaattagaaaattttgaatt

SEQ ID NO: 395714 - DNA, 2133 bp, Cannabis indica
ttaacttcatcaatggaagtcactgaacaaattttatttaaaaagatatctataatacttctcctataattttattttttagccgttattattaatttgtttttttttaaatcttttttaaagttaatagaagtgtatcctatattttattaataacttttcttatttatttatttatttattttgagtacaagtaatttttcttatattaatatcacaaaattattaaaaaaaaataataatatgaaaggaattaattaaatgttggtattaagtgtaagagtgacacataatataaaaaagtacgtttttcatgactctatctaagtattatctaagtattttacttaattatgatagatttatttatactaagctatataatgagattaacaatgatcattagtgagattaaactcatggaagatatatctcaagaatcaatgaatatattctaattacaaccaatcaagcacagtgttaagcgtaattcaatcaaccgtaattgatgcaaaatatacacacctaatttattaaagtttatgatttatatgatacaataatatacaacttattattaagaggatatgatagctacggtttgtttgtctctggaaaaagaatgtgttaggtttatttgaagcttcgttctatcttacatcaagtgactgcatactatattaaatagacgaagaattgaaaattacttctcaccatagcatgataacaatattatagtatgagcttaaaatatactaagtatatatgcctggacaatatatatgcctgaaccgacaaattattgtttccaaacatgtaccaaatggaaactttcttctaattcaagatataatatatttttttgccaaaaatatatacatataataatttgaccagtgttttatattgactttttctcgaaaacttgcaaagttgtaaacctaatcctaataacaaaatgccatttttccacaaccgcgtgaaaaataagggaaggaagaatcttcgtgtagaatctcttttacactttgcttattgtgatatgatatattatactaataatttgtaattgcctaaagcaaaagacttggttatctctcgattagggagaatgacgtgatattttcttatataatgactggaggtgatagccaatagacacataattaagataatagaaagctaaggtagccaacaataattaaaccaaaaccataatgttttccttctcttcttcttctgtttcaaattactattccatactattggtatttagtattgtagcaacgactctatatgaatctaatgctcaactaaacactacattttactcttctacatgccccaacgtgtcaaccatagtaagaaatgcagttcagcaagctttgaattctgactcgaggattggcgccagcctcattcgtcttcattttcatgactgctttgtcaatgtaaagtcatatagttatttttactctttgacatgtccagatctagatttagtgtcaagttttgttgttgatcaccgagttctaattctgttgattaattatgttagggatgtgatgcttcattactgttggacaacagtggcagcatacagagcgaaaaagatgccggccctaatgccaactccacaaggggttttgacgttgttgacaacatcaagactgctgtggagaattcgtgctccggtattgtttcttgtgctgacattctcgcccttgccgccgaagcttctgtatctttggtatgtaaaaacaatcagcagcacacaaaaccccttcaagagacataaattaacttttattgaatactcaaagttgaggacataaatttgcatatatatgaaataatttagtgttaactattatgtgtttgtagtcaggaggcccatcttggaacgtacaattaggaagaagagacagcttaaccgcaaaccagggcggagccaacacttccattccaactcctacggaaggcttaacaaacatcacttccaaattctctgcggttggcctaaataccaatgatcttgtggcactatctggtgaatacaacattgctagattcatctcatatggcttataatttaagcccatgttcttatatgactcaatacttttacattta

SEQ ID NO: 395715 - DNA, 801 bp, Cannabis indica
  modified_base (745)..(745): a, c, t, g, unknown or other
tatatatatatatatattccacatttcttaatttggctatttatgtgttaattgaaattgaatgataaaaatagcttttaccttacaaatataaagaaaaaaaaaatattttagggaaatatttgatagtaaaatttgacttaaagactttgacaatacactgggagggcagcttcccaaaatcgaaattacttgtacgtattacaaatttttttacttttagtacaataaaatttgtgactaaaaataaaaaaaattgggactaattataaattatcattcttatgttgtaactaaaaggtctgtgtctaaaagtattagtcacaaaaaataacaatttgttgtgactaaatgtatttttagtcacaatatatttgttgtggctaaaattaatttagtgataacttgtatctaaatactatgtttaatcacaagtaattttttgttgtgactaaaagtcacatttagttacaaaaatttatattatgactaaaaagttgtcactaaatgtaattattttttgtagtgtgtgatcataaaacaacacgattgcttagctataacatatatactaaacaatttaaattgttaacaacaaaaataaaattacaagagataaaattttttccaaaaaaaatatcactttactaaatatttgtaggttaaaaagtaccatttgggaccacagtgcttcaccccttgaggaacttgataatgaactattagttaaaacaaattcaaaacnttaaaaaagttttgagcatgaaaagaaaatattttttttttttaaaaaaaaaactt

SEQ ID NO: 395716 - DNA, 1747 bp, Cannabis indica
agaacttgaagatgtcaattcggcatcgcagaagccaacccaggtgcctaaggcttcatccaacgcacaggttgacatttggacatagggtttcagttttcagcttcgttttagtgtagattgctaaaaatgtatacttagatatgaataagacatgtcacaagcacactagagacatcataattactttcaaaacactcttgtttgaagcacctaggcacccattgtccaagttgacctagtgatgtacccaatgcctaggttgacatgttgtcaacttggggcacttccaatcactttcctagatatgtttcttatgcatttctttgtgttcatccaaactaaagatataagtacttttgaaaagaaaaaaaaatgaatcaacctagaggataaaaaggcacctagcacccaagttgacatactatcaacctatgtcatttccaaggatcaagatacaggtgatttaggaaaaaaaaactgaagtcgtctggtggccaataagctgacccagtgctcaagtcgtttctaaggattttcctcgagaagtctcccaggaaatttctccgttttcatcaataacaaagatacaagtgttctcagggagcaaacaagagcatttgggagccaaaatacttgaccagtgcccaggttgacattggggctaggcctggttgacatttaactaggttcacatggttctgctgctcaagcacaaattttgcccctcttactatcttggtccaaaacaggataggagacctcgtttgcgatcttgactgccatagaaatatcaaaacgagtcccgagaagttcagtaataagcacccatcacccaggttgacatatgacctggtgcgatggatctacttatccgattccagttgcgttttgagaatctagctattttttgtagtaaatgagagctaaaacttgtgataagtcaaatttttgatattttaccttttttgaaaaagtgaaatatcgacaaaatagttacaaattaggtagtttcgagtctcccgattttacaaaatacaaaaccaaccagaactggtgaatggtttcaccattatcaagaaattatctaagtgatgtcaaaatatcactcaagcttcaaaaaataaagttttggcttgatttcccacttatacaatgtttaggttgacattgcacaactccttaaatcgcaagattgtcaacctgggtgctggatgtcaatctgggcgctgagtgctgaacagtcttcaataaaatgactataactcactcaatattactccgattgatgcaaatccaagtgcattggaaatatctttttcaagttatttttacacatgtctcacactcatatcttaattatgaagatttcaagtcgaaaaatcatcccaaagtcaaagtgctattttgtccacaaaatcacctgaaaatgattcaccagacatgattcaagctctaaaaattgatgatcatcatctagagtcatttcaaccattaaatcaccatcaatggtcaagattagcccattatgattttttatattttttataatattttattaatattttaatggacttccatgcctataaaaagagatctccactagcttatttttcacattctgctaagtctccataaggttagagcttgtctctctaatttttctaacttaaatttgagactctccttagctaattctcttatattctcatgagaaataaaaactcgaagtagacgtagtaccatt

SEQ ID NO: 395717 - DNA, 1098 bp, Cannabis indica
cttcaacatccccacattggtattgatataatgtgtttggttttagtcctataaatgttcatacatttaccataattaaatgataaaaaaaaaaacctaaagaacactattattacctcccacactatcacaaaatgtatactgatattactaaatattgagtctcatatattttaaagtaataattattgtgtagaaagaactatgtcagccaatcagattactctactgtcactgatgtctaataacaatacttttaaataaaaaaaactagttgaattggttcataatttagttgaatttagttgaattggtttatagcaaaaaaaaaatttagttgaattggttcatagcactctaggtttagtcaagacaagaacattagtcaactttgtaaaattagagctaattactttataaaattaatttttttttccaaaaaaaaatatatatatatatttcttctctctccccattattttatatttgaactaaataaattcaattttttctaataatatatttcttttccctctttgttataaattcaatttatttgttataaaaaaataataaaaaagtataatataaaattagatgtaaaacaaataaattttcgttccgatgatgtattttaaaaaataaagtgaaattattaataatgtcactgagatgaacatggtgtataaatcatatgtaaataaataaataataataataataataattattttcgttttgatgatgtattttaaagaataaagtaagagtaccggtgaggcgaacatggtgtataattccagaagaatagttttgtaggccttgaaaagggtagagttgattgtagacaagagaatagcctcttgctttcttagtaagtggttttccataaacaccatacaaaacaatgctatcaactctatcaccatccaatgcctttatatcctcaccaatttcatattcccctacataataaacaatgaccaatttttaatacaactcatgtacttgaatgtcaaaaatttcttagtagggactaaattgctaaacaattgaaaccaagaggtatttatgctaaaatttctgaaaaataacata

SEQ ID NO: 395718 - DNA, 715 bp, Cannabis indica
ccccatagtattcaagttgaacaggctgctttaatgtgacgtttggttggaggtaatgaaatagaatagaaaaaaaaggaaacaatctccattctattcttttgtttggttgccattaaagtgttggaatgtcattttaatggaataacctttctactattttaatagaatgacaattccattttgaaatggaaagaaagaccattctgatgagaaaaaatttaataattttttttttatcaattttttatgcattttaaattttattctattctattcctatttctattctcatttctatattttcattccttccaactaaaaatgtcaccggttgcgttacactccattttctaaactaggctaccaataaaaaattatgtggaccgtgctgctcgcgggtgggcaatatagaattcctaatatagtattaaaaacctaaaaatgaatatttttattataaatacccaaaaatgacaacaatttgtattcaatattaatttcaccttacttttcaaaaataaattaaaaaatttgtaaaaaaacaaaatcagtaaaaatatatttaaaaaaaatgcaacttgatgtattgtgtaaaaatcaaccaaaaaacgtattttgcttttaagattagaattcggttggggcttagccagaacaaaagataagaaaaagaggaaaaaaaaaagaaaaaattacactctacacttttttt

SEQ ID NO: 395719 - DNA, 1506 bp, Cannabis indica
aaattacctacttaaaaatttaaattttaagtaccaaatagaaataataaaggaactaaaaaacagttttatcgataagaattcaaaatccaaaaaattaaaaaatgaccatttataaattatagggttagttttgtaaactaataactaaactaaaaattttatacttttatatacattcttatatatataatataaaattaataatatggtacgtagggcgctattagggaatatggtggccgataaggtggcgacacgggaggacgctgaagcgatagcaaatgcggagatgagaaatgatccgaatatgatgatagagcccggcggagtagcggcggctgtgaaggcagctgccgccatcaacgagaaaaaagagtactgctcacatgtgatatcacttttttgcgccggactacttcctgcccttttttcctttacctagctaccatcgttgttcttttcgtttttttttttttttggaaattatgtctttaagttttttttatgtaaaataaataatgtaaaaaattataaaaaaaagagtgaaatatataaaatatattataggtattatatgtaggaaacatccgcattgtaatataaaataaatataattttagtttttgtatttcgtttgttaaataataatttaggtcatgttttgtaaatttagactatgttttttatgattttgcaaaattattttaggctaattataacttttatcctttttcgtatgtactaagtcatattttatggatttttttaagccgttaaaattttttcttgaattaaaattgttagatttaataaattgtctaattctattcaattttaaaataaaaacggtcagaatcccagattaataccggcgggtcccaccggtattaatctgccggtaatactaaattcaaaaggttgggcggtaaaaatcccgcccacttttttcgaggcgggattccgccggtattaatccaaacccgccggtaataataaatttaaaataatttttttttatttatttaatataatatttattatatagttattaccggcggatggctatttccgccggtaatacccccattaataccggcgggtgagttccgccgacaataaaaccgccggtaatagagttatttgttgtagtgtttattaatgtggcgattgtttatatatactatttctagaactttaatatttcttttaaatttttattcacgttagattcttcgtctgtaaaattagataaaatctctatattttaaggaaaatttataatggcctgtaaaagtttttttttttttttttgacgcgataatagcctgaaaagttaaaacaccatgtacatgtcaaagtaagacaaaaaaacctaattataatttataacttttttaaggatcgtggtccaatttttaatgcaccattcgatactgtccgaacagtttccctcattgcccaaggactcccatacgtccatggaccaatcctcaaggcgccatg

SEQ ID NO: 395720 - DNA, 587 bp, Cannabis indica
aagctattctaatataatggcatatgtgtctcttataacaatttcgcttctcgagtttcactcaagacagtagaactacttacaactagatcaaataaatttaagagtattgctattgggcatcagtggtgcctcatgatttggtaacgatattatttaaaaattatttttttaaattatataggacccgatacttcattacactaatagcagtatgacactgagaatggtgctagacaccaatagtgccttttggcaattctctaaatttaatgttataaaaatatattaatatatatatatatatatgcaattaagatacgtgaagattttttaataggtcaattttttcaaggaaaaaaattaagggatattaatattttagagattttatatatatatacattaattaaatttacttttaaataaaatttcattcaaatatattttattttacgagtattatacttaaattattctcacaccctcacataatcaagatacaatttcaaatataatagagataggtgtgcagattgttgggatttatgtcctaaataaaattcatttcaatctaatctgatttg

SEQ ID NO: 395721 - DNA, 767 bp, Cannabis indica
gttttatatattattgtcgtttttacaagtttttttttgtcgttttacattaaataattacatgcatgaatgaagatcaatcaaaatgataatgatgagtgagtgaaagtagagttcatttaaacttactattattgttacacttaaaatgttaaattagaagatttagttatttattgggtctctattaaaatggagaataaatttatatagttaacaattacatatagatataggtaaaacaattaacaatgataatcgagaagtaatacttgaaaagtcaagtaattgttgtgaaaggttactgcaacatgtctaataccaacgaaaatgttaattatttttattgatttataatatatttttttaacagattatttataatatttagtatcataactattacataaaattactatcaatagtgcttaataacaacaaatagttttcaagaataattttcttgcttcataagtgccaattacaatctttttcttaatttttgcatttaaaaacacatatccaatttttttatctattttttttcaacatccctatgaatttttataatatcaaaaaaatttaaaattttttgaaataaatttttatcaacacagctggtatcgatttctcccataaaggcatttcagctagcaggcttcttagccaacctgcttcttcactagtagaggctagtgctatcatttcagactccatagtggattgtgctaaaatagtctgtttctttgacttccaagaaacagggc

SEQ ID NO: 395722 - DNA, 574 bp, Cannabis indica
ttgaaagataccactgtttctttcaagctagaattgcaatcatagagctaaaaaaaaatagcaactttccagaccttctttctcctactagaactgggtcatgttccttctccataagacataatgttgtagcaatagtgtgaccacgcccccgattctcccaaaaacatagcctataacttaacttagaagatagaagagaatagggaatgaaagaagagatggtgtttggattcttcatctgtttacagagaatacaccaatatatatgaatggttgtccctcttgaagtgtcttcttagtgtctagctttactaagagtaagttgccaactgaaaacgtaaccttcaaatggactagatccttccaaatgaaagggaatggtgaaaagcttttttttattattattggtgtaagctattaagctttctaaacagaattttacatgtatggtcttctagtgtatcatgaagaaactgattccagcactaaaaatcaattatgagatttgggctgttgccctttcattttagaaggcgtttggttgggaggaatgaaaatataggaatgggaa

SEQ ID NO: 395723 - DNA, 899 bp, Cannabis indica
ctcttgtggctccttggttccttcgagttggccacctttccactgttgtcatagtagagcaccagtcatttttctacttctggaactacttccagagctgggtagaatttcttcaatcaaattgcttccttagttgcttatcaacctgcaatatatttggattccatagttgaatctacaatactagtttgcttaatgcttctctagactacagctcctctaccaagagtaaatactgatccagatgtcgacttttgactatctttgtctgattgaaaataagaataagtatatccagcaggatttaactctccaccaaaatatacaagcatgagatctctcgttctccgaagatacttgggaatgtgctttacatcaatccattgttctaaacttagatttgattgataacaactaacaatccctacagcgtagcatatgtcaggtcttatacataacattgcatacattaagctcctaattgttgatgcttaagggtactttctcatgtcctcttcctcttgaggagtttccgcacattgatccttgcatagagtaattccatgtctagatggtagttttcctttcttggaattctccatcgaaaatctttgtagcaccttatctatataagttgcttgagaaaatgctaatgttctcctctttctatctctataaattttgatcccaagaacatggcttgcttctcccaaatctttcacttggaattttttggctaaccacttctttgcatctgacaacattttggcattattcctaattagtagaatattattaacataaagaactaaagataccactacattacccttaatgtatttgtatacacaggctttttctttattttgtttgaagtcatactctttaatagtcttatt

SEQ ID NO: 395724 - DNA, 1264 bp, Cannabis indica
gaaaactacttttttttattacagtcaattaaatataactctaaactaattttaattgataaataccctcttttataattaaagtatcaaatataacctcacaaaacttattaaaattagacttcctaatgcacataatgggaatataacttataaaagtgggtataaattaaaaagtagtaatatgaaggtaaaaattaaaatatgaaacaaaaagtaagtatagagtgtaactacctctatagaatatacacacagtcaagaatgtctgacatatcgcctcgaaaaaaaaagaatgtctgacatatattagcttcacccacaagaatattgggtttttttttataaaaaatattggattttaggtaaaaatttataattttactgttacgcaattcgttttacaaaaatactgtctttttataaaataatcgtaaaacaattgaacagaacaaataaaatatcagtggaaaaactaaaaaataaccgtaaaaacttaacatagtacacagtataaaacttatactgtatttttgaaaaaaaaattacagtatttttgaaaaaaattctgttccacaataaaaaagtaaaaaagttaaaaacttcaatatgtggtgtaaaaactctaagaatattgtgtagttaaccaaactatgtgggcttattatgaaaaaaagggaatttttacaaaaatactagattttgagtaaaagtttacaagtttactgtcacacggaatattttacaaaaataatgtctttttataaaacaaccgtaaaataacaaaataaactaattaaaacaacagtggaacaactaaaaaataattatggaacaacagtgaaaacttaatacattacataatataaaacttacacagtatttttgaaaaaaattccgtcccacagtaaacaagctaaaaagttaaaaatttcaatatatgacgtaaaaaattccttagaaaaaaactacgtggtggtgaatattttcaactcaactattgaaatgaaatgaaatttaaatacataatttttttattagatatgtaactatgtccatatcaaatatcattgtgtttgctgatatatcattttgtagatttaataaatcatatgctaattaaataatattttacattatcattaagtaaaaattatagagaaatttcactatctattccacaaacttccccttttacccttttctaataaaaaaaaaaaaaaacccaaaacacacacaccaccgaaaacacaacacacacaca

SEQ ID NO: 395725 - DNA, 537 bp, Cannabis indica
aatcattttttaacatttgattagggatttttgtgttgtatcttctttttaggccatgtaacagtggagggggatttctttcaaaactgtatccaacaatgtattcaaaatcattttttaaaaaaattttaagagtaattttttaaatttgttttaagtttatatattttttttaataattggatgtatttataattttatggggtgtaaataaaacttctcaaattttaatcgtgtataggatgcccagtgagtacctgctatttatagggctggaaatccgacctaaacatgaaataaggaggcaacataaataaatttttatccccaaatattaaatgagacatagtattctcgctacgacatgccccaattttgatttatttgtaatattaattgggaattttgattttatatacttaaaaagttaaaatattttattattaaaccaaaactctaaaccctaaaaaaactatgacattatttttcaaaactccaaaaatacccccctcacaatcacccattctctctctctct

SEQ ID NO: 395726 - DNA, 965 bp, Cannabis indica
gagttgagaggataaatgtttgcgattggaaatagtcgaatgagtggttcttagatgggcgtaataggccttcgaacatttcttttgagggtgtaataattgttgggctgtgcatagtggaagcaatgtggagagaaaggaactttgtggtgtatggtcatgctcgaaccatggtttggcaggttataacaaatgtcaatagtaaaatgagggagcataaactagtggccactaatgctattgaggatttttgtgcttggagcccccattttgagtcttggtattgttgcaactgtgatgttgcttatgatgatggggggatggtggcggcaaccattgtgcgtaatgaccagggatctattgttttgattaaaatagagaggcgacacacagccgatccaaaaattggtgaagcctttgcggtgtgtatggcagctgaattaatggtggaaaggaagattgagcgagttattttccaaagtgataatattcgggttgttgaagcattctcaaaggaatatgaaaggggtatcgacttcaacctggtgcatcttaggaggcaatttaaccagctctgcaggagattaaaaaactggaaaattggacatgtctctcgaagatgtaacttcatggcacacaacattgcgaaatgggcgagggaggctccagtcacaagaattatctagtacagcgacatggatcatgaggtattgaatgactatgtagagtggaaaaagaatgcaggttaagtcaggctgttttgagtgttatggatgctgtagttgggtttttgttgctgcgtctgtttttgaatttacgtttgttccgtttgttggtgtttttatttctctgttcttttattgtgcttgtagtagactgttttttttttttgcaatgaattgggtgtgttgacacccccgttttcttaaaaaaaaaagtatgtgtgagattatgtagaagaaaca

SEQ ID NO: 395727 - DNA, 685 bp, Cannabis indica
atttattagtttaatttgggcttatttaatattttagatagttatttttagatcgaatcagattcatctgatattttaggtcaaatatgtattggaatggattatatcaatccaatctaagaaaatgagtaaaattttaatgttaattttcatatatacatatgtattttacgtataataatataaaatcaattacttcttcactaaataaaacaactaattagttcgattagatattggatatgtattagatttttggacacacatccaacattcgatccgatctaattagatatttaaaaataacattaaattctattcgatcccaattggatatctaatatttagcagtcaattataattggattgaatcgatttatgcgcacccctaaagtctaggaccacatttctgataaagataatataattttacacaaatctatcaatagtagatgtcaaatatagtattatattaaataatacttatacaatacaatacaatacactagaccaaatgaatcctaaattactaaaagattagatagagcttacctaatatgaaatttgagttaatttattttgtttttttagagatttaaattaaggactttttcatttatacacttcttaaaacggttttttttttttttttttttttttttagtttctatttttacgtaaattc

SEQ ID NO: 395728 - DNA, 306 bp, Cannabis indica
atttaatttataattatttaattatatataaaatcaattaatatagggaaattgattttttatccttacactcagtctcgcatctcttcgccgcacgcagaccgcccacaaccatcgacgcagaccacccacacccgtccatgtagaccgcccacactcgagcacccccaccgtccacgcaccagaccaccccacatcaccaatagccgaccgcccccaccgtcccttctctttctctctttctctctctgtctcttatcttctttttttttttttaatttttattcaatttttggtgcttaaatt

SEQ ID NO: 395729 - DNA, 744 bp, Cannabis indica
ctatgttgatgttgattatgcatataatagggataatattagatctactactacttatgggttcatggtcaacaagatctacatatgttggaaatcacaacaacaaccagtggtggcactctcaactacaaaatctgaattcatggccaccaatgaagctttcagggaagccatttgtttacatggaatactacaagaattacaattgcttagagacaaagggacgatctattgtgatagtctgtcatcaattcccctatgtaagaaccttgtgtaccattaaaagagcaagcacattgacattagaaaatactagattcgagagaagattgaggaaaaggttttggagttggaaaaggtgcacacaagtgataaccctgctgacatggggactaaggttctcactttccacaaactgatgcattgtcttagttagctaaaaatttgtacttgctgaacatattgagatgtcaacatcatcaaggcttttgtgaaaagattgctatatatatagtctgatttagataatcaaggtggaaatttgtggtatttgatcctctaaacaaaactaaaactaacttacctacccttaactaactcaactaactttcagttatgttagttggttagttcgtgctggttttgcacctagtttctagtggtgacttttacatataaatatggtattctttcacttctgaagcagagaatatagagagagtttagagagtgagtgcttagttt

SEQ ID NO: 395730 - DNA, 578 bp, Cannabis indica
agagagagagagagaattcttagttatcacacttcactagcattggtaaaattcttagttatcctttgaataaagccttgaatttttattctaattctaattcttttttttattgctctatctgtcactacgctaaataaaggaagttaccttttgcatctaatcataatattgatgaaaattactttgatcttatccatattgacatatgggggccttttaataccatactgagggtttcaagaattttattactattgtagatgattgttcaagatacacttggatacatctcattagacacaagtctgaagcccaaattgtccttccccaattcataaggctggttcaaaatcaatataacaaaactgtcaaaggggtaaggtctgataatgcaaaagagctacagttcaaaaccttgtttagtgaacttgggattatacattatcactcctgtgtccaaagacatcaacaaagttctattattgagagaaaacaacaacatttactcaatgtggctagaacacttctttttaaatcctatgttcctttagtttattggggagagtgtgtgtcaa

SEQ ID NO: 395731 - DNA, 661 bp, Cannabis indica
aattaagtcgtccttcgtcgtacctaacgaaaagggaaaaaggtaactaacgggaacgggtacgtaagtaattacttcgtaacgggaaaacggggaaagggtacgtactaatttaattttaccgttcccgtcgtcgaccccaaaccctaagttaagggttttaaacggttttaaaacctttttaaaacttttaattagttggttttagtttttttaatttctacgtttttacggttttaaaaggttaaacgttactaattttaaggtttaaggtagtttaagtttaaaaactaaaactaactttacgtttggtaggtaaggtaagtacttaacgtaaagtaccttccggttaaaaggttaaaaaatttaacccttaaccccaaaacctaacggtccggtccctacgaaggaccgacctaggttaaggtttaagttagtttaactttttaaccttaactagttaagttttaaggtttacggtttaaaaaccgtttaaaaacgttagtttttggttttagttagtttcgtttttcggtttaggtaggttaggttactactagtttggtttagtttagttaggtaggtttagttttagttagtagtaatttgaagtttatgatttgtgaaattttcgtgaaaaaataattgttatttcggttct

SEQ ID NO: 395732 - DNA, 691 bp, Cannabis indica
tttttttttctctttttcatgtttctttctctctctatctttatcaattttacttctttttctataacttcaaaaataatttttggttacattattaatttattgagctcaaaaataatatcatttgtgacctacttcttaatgtgagtattttaagatatggaaagtatatattttctcacttttttctaaaaaaaaaatcaaaataactatttagttgcttaccatttcaattatatactcattagttacattttaccattgtataattataaacttaaaaaattcataaacaagtaactaattagtataatattaatttaaatatcatcagtcaccaccaaaaaccccgacatcacaatattttttattggcatcattagcaactaaatttttttttatatcaataaaaatgcatattaacaaaagaatgaattatttttatgttgtgtgaaaaagtaacttcatagttacttctaaattttattttcggtatcataaacaactaaataattacttttaattatggtgacgatgagaaaatgtataattttcttttttcatttagttaacaaaaaatatccaaatttataaaattattttctgactaaaaatatcatcgtaatctactttttaatgtgatcattttaaaatgtgtgaatatatatttttttattatttcaaaaataaa

SEQ ID NO: 395733 - DNA, 943 bp, Cannabis indica
cattgtcttgaagactgtttgaggtcgtagatagatttgtgtagtttgcaaactaggttagaattgtcctctgtgttgggaggggtgaatccaggaggcaatgccatgtagactttttcttggagatctccgttgaggaagacattgttgatgtcgatttgcaaagtaggccattgcttgatggaggaaatagccagcaataacttgaaagtaaccattttggcaactggtgaaaaaggtatcaaagaagtccaatcattcttgttgactgtaaccttgagccaccagtcgtgccttgcatctttcaacaaagccatcattgttgtatttgatcttgtagacccaacgacaaccaatggttattttgttgggaggaagtttaaacaaagtccatgttttgtttcagaggagtttatagatttcagtgtccatagcatcattccacaccttgaattatcgagccaggttgtaattccttggttcgaaaagagcattaactgcaagaataaaagctttgtgagattttgatagcttgtcataagaaagacatttgttaagggggtgcggtgtagatgattgatcttgtatggtagagttgcactcataatctcttagataggcaggtggtcttgttgttcttgttgtccttcttggtggatcatgacttgaggcaccttgagtatttgttctgttggacgaagctggaatagcttcaggagcagcaattgattcctgagatatgctgggatgctgagatgttggttcctgcatatttaggggtatggcagcagcagtgttctcaggcagagcagtatctttagtgatatgagtatagttttctgcaggaaaatcactcacatgtgtgttagatatattagaagagggaaaaaccaaatgggagaagggatcaacaccaatatagaggtgttaagtgtctgaaatg

SEQ ID NO: 395734 - DNA, 634 bp, Cannabis indica
ttcatttttttagttaagatcttccacataaattttgaataatttaaaatattgaaaatagacttcaaaataattttttcttccataaacggttcaaaataatttttaaaatcataaaaatccatttttgacacggtacattgtaattatttgaaacattctaataacttttagaaaattgtgaataatttaccgtgttgaaaattcaaaataggttgatttgaaatttattttatattcttgtgaaataagttatttaatgatgaattctccttttggcttttttttttaatgagaatttttttggtttagttgttaatgattgccgacaactacttaatttttgtatgagaggagtttatttagtgtttgtttatcgttctgctaatagtatttttgttcggacttctttcttgttctttcttagattaaatatttagtaaaagtgttgtttatgactatattgttagacgatttgtgtaaagactgcatatgattaatactttaaattattaaataattagggtttatgtgtgagattttattattattgataataatacaatcatgtgaatttatttgagttcgtatatatttattatgctatttttctcaatttctgcgattgtgttcg

SEQ ID NO: 395735 - DNA, 725 bp, Cannabis indica
tattatttttttaattaatatatataaaatatacaatgctattgcacaccaagttaaatttttttttgaaagaagtgtagtataattttatattacatattaaactagtattgtattaaaatagtattatacaattaatacaattcactacaataaaataaacttctaagtattataaaccaatgaaccttttctaccaggacataactttttttctgaaataaaataacaagaaagtaacgtaaaaatttatgccataatttttgtagataaagaaaaagtaagatatttcttcaaaaaaaaaaaaaagtaaagatatgcttaattgatgtatgtcgacacacagctattgattaacgaggcatgaccaactgacattatactacactaatatttagttaataattatagtgctcatgaaaaacgacgtgtcattattatatatgtaagctcatttacgattcggagacagctcatataacataaaatataaaagcgattgatgttttccctctctccattttagttacggaaattatagtaaatggcccaaattataggagtatgttagtttatgtccttattttaaaaaaatatagtaaatggtcttaaatcataagactatgttagtaaatgtcctcatttcaattttttttttattttatatatttttagaattagaagcaaattatttaaacattatggtatatctatattagttttgt

SEQ ID NO: 395736 - DNA, 661 bp, Cannabis indica
ctctgtctcgctgctcgtagtcagtttcttactactaaggacaatggtgatgggtccgtctatttctgctcccattggtagttttgctgatactagttcttttggtaaggaacatggttttatcccatcagtgagaagctgatactactcatttccaaaattttgtatataagttttctctttttcccttgcatcctattggtaataaatttacctgaaagcatggctccttgtgtgaacggctggattggagaattgtaaataatagttggcaaagtctctatcctaaagctgctctttatcaccttggattctacgattctgatcatagtccttaaaattgtcttagatgatgatagtatgcgtgttactaggactaagagattcatgtttgaaaattactagcttactaaagcatattttttatagtgttaaggattcttgggtccagaataagccttacccttctgataatcatcttggcaaattcttctctaagcagtagttctgcattaaagctattaaaggttggaatgctgctaagaattttcctatcaagatttggtcaatgcagaaaatagataaagagtagtagtgtttggataaaaatggcagaatatctttcatcaaaactcagaatttcgagagtctagttctctcc

SEQ ID NO: 395737 - DNA, 568 bp, Cannabis indica
tttttttttaaataaatacttatgttataagctatttagaaatgtattttagaaaaaaaaataaactgtaattaaacgtgacatcatgtataactgctatgtttatattattattgagaatgcttataaattattaatttaatatatttattattattatgtttgtgatagattattaaaatttaatatataatttaataaatataacatgcatatttattatttgttttataagaggttgtaataaaaagttataccactgatcccttataaaaaagttgtaccaccgactataaattgttgtatcgttactttatgagtgattctaattactgtgtcatagaaaaaagaaattataattaacattaatactaaacattcatcaaacatatataagacttaaaaaaatttattactttatatagaaaataaaaattatgtttatgtattaaaaatatatataatttaatgtacataagatattttgtatatataatggaacaaaagtatataatttataaaagggaaaatggcggcaaaatccccaatactttagttttggttcgct

SEQ ID NO: 395738 - DNA, 758 bp, Cannabis indica
tttttttttttttttcagggttgtggtggaatgtatggtggtggtggtgcggtggtgctttttgtatagaataataatttataaatttggatttgtgtatatttttgtataaatataattttttgtctaatttttgaatttttggtataaatatgtttttatttttttttacttcggttcataacagaagcaataaatcaattttttgtcagtgcattatttgcttcggttatgaactgaagcaaataccttgcgtcagtgcattactatttgctccggttatgaaccgaagcaaccttttagcgtcggttaataagtgaagcaaaaaatatcaaaatttgcgtctatagttatagtgtcggttactttaaccgacgcaaattctttatatgtcacttaaaaatcgaagtaaaaaaccctttttgtagtggtgccaatttgggttaaatactacaactactattgctacatgatctcgcgtattagcaaatagggctgtacaaaaaaatttgtaaaccgcccaaaccgaataacccgcccaaaccgaaccgaaaaaaccgataaaaattacaaaccgaaataacccgaaaaaattacaaaccgcccaatctgttaattgggcgggttgaaaataagtccaacccgcccaattaaaccgaccaacccgattttgcacctttaaattttttttaaactttttagtttttattatatataacataaatgattaaatatataataatataaagttatatact

SEQ ID NO: 395739 - DNA, 921 bp, Cannabis indica
cgtttttttttgtaattagaaatacatattcaaagactcttgcaacggtgcggtagaaaggaacagtgatagtgataaattcgccttaatgtgtgttcacgattacacgacccaaagaaaccactaagatggatggagatgttcagactgtttaccaaggaagaattggtcttctaaggttttatacaattgtgattatcctaagaacaagattctcactcatgaactcgttaatacagagactggtgctttcctccacaagtttcagtggcttaaagatgatgaaattggatatgttccgttttggtttggaacgttttttagaatggcataacaaggtggttgaaggtgattccaatacttatctgaaagttgcacattatactcagggagaaccatggtttgaggcatggaagcactatgagtttgctaatctttagttgaatgaaacgaaagattacttgaataagaagaacgaggatgagaaagagcctaaccaaattaccaaccaagtcctagatttttatttatttattattaagtggattcatttaatttcaatcttgtgtgaattgattgtgtttgtatggagttgagtggagtgtaggttttcaacttgggattaaaaataccatcaacgacgatttatagcatcttgttttacttgctcttagttgtctttaccttggtctccttctccttgcttgttttattattttctccagtttgcatcacctagttatcgtgatcatcatcaactaaggcataacttccttcaccttgagtcgactttcgttgtatatcattaatgtatgaatattatatattaattcatgctatattatgtaactttctcgtttcaagtttcaaattggacctttacacccacagaatgatagctcttatacacaagtatgtcat

SEQ ID NO: 395740 - DNA, 1034 bp, Cannabis indica
ttatatttaacaaattcaaattacaaaagattatttgttatcccagtttcatctactatattactaataggttgtacttcagttgcagttgatggcacaaaatcaacatcatcctcaaaattagaatcgatttgaccggacattctattttaatctacattaacaccatattctcatatttatcaattaatgcatgcaactgtttaaaaaatatgataaacacatctacgaaaaattagatagcattttccctattttattaacctaaccatctgtcaatttcaactacaaacaatcagataacacacaagttttaattcttatatcagcgcagcacacaaattttacagatcctacttcactaaaacaggcaagttatcaaccttccattatcaccgcaacacaatctcagaacttactttactatggatgaatatataagatattcaaactcttttacaaatcatatgtaatataatatagcaattatagaaaaatatacctccggtgaatcaagattgaaatttccacttaactcagattcttttcaaacactcgcaaaacgccaaagcctataaaaaaaattggtagaaaaaagagacagatgaataccattgaaaactgaaaagtaacataaaagctcgtgaaaggaaaaataaaggctttaatatctaaaaaggtgatttcccaattccatataaagtagataaaaaatcatctggagttgcattatataatctgtattaaaagcttgattgtctttagttctttacctcattaatatcagcataaacgcctgtttataagcaaaattgaacttatacatataatatgcatacttatcactatgctaaactctacaatctataagcagcaaagagcttgatcacttgccttaacctcatgtgtactaaatagtaaatattctcaacaaagactcgaattttcattttcatcacaaacaattcacattactctgcccattcccattgttttacaaattcgcactatgaactatgaagcaactattctct

SEQ ID NO: 395741 - DNA, 598 bp, Cannabis indica
tatcttacactataataccacaaacgtttctaagctatgtaagactttttacacaaagagttagttaaagagtcatatacatacaagattactttaaaaaaaatttttaaaaaaaatacaaaaaaaaaaaaaagataattatagaagaagcttatagagaccgttcatcatctctctatgtttcacaattatataaatttatagattatagatatatagataaataaataagtttatatttgacaattatgtataaatatatagatagatttatgtttcatgactatatatatatatattaataattttaaataaatttaaataagaaataaaataaattaaaaaaatactttttatatgaaatacacgacaaaaattaaaaaaaatatattaatgtattttgttttcacttcaaaaaaaaacttataatttattgggcaatatttattaatcaaccacataaaaaataaataatactacaatgaaacaataataatctacatataacctaaaatatcacccaaaataaattttaaaccatgggagacttttttaaatggatgcactcttaataggtattacacatgaatgggtaata

SEQ ID NO: 395742 - DNA, 1379 bp, Cannabis indica
gtgagttgcaacattgaaccatcttgatctggccaaaacttcacgattatgtagtaagctagagtgaggatcttctggaagatcaagttgaacatgattaaaagcaattcatgccatctcatacttctcacgaacatctccattgtttatcttgatgaactgtcttaatactttttgtaatcttttaagcttaaccagaatagaagacaggtcatttccttcaacatattggttccaactatctaaaaccctatttttgaactccagatcatcaacccacataatgaagaacttgaaaggtggaatcccaatttggccaagacacagatttttaaccaagcaacaactatgatttgactcttattcccaatgaaaaaaggcttttgtattcgggtgaagatcaatccattcctcattcttgaacacccaatcaatcttagaaaaaatactctcattctccctaattgttgctccaagtgaaatgtgaaccaagattgtaatatctcaaaaatctaattatgaataattaggatttattatatattatgggttaattagagggtaatgagtaggattataatcctactaatctaatttagcgtgaatgataaaattttccataagtagataagtaagcgtaatttattaattatggaaatttatttagaatatgtgaatataatgtgagttatttgtggaataaaataattttaagtttggcgaccttagagacccgatcggaggccaaaaatatcacaacaattttagttagtaactttgataggattattgagacaagttagttttagaattatcggggtatttcgtggtactcggggttaaccaaatgccttaggattaaaaatttcttagtggttaaaaaatggtaaaataatcaattattttaattactttaatctttttcattttttttttctttttctttttctttttcttttctttcttatcttttattttattaataagaaactaaaaaatatatatatatatattgataagtaaaatgaaaggtcaaaccattctcatctctttctctttcctttctcttgagctaaagaaaccaaggcaagaaaccaaatttttttatttgatttctatccaaactcagctcctcaagcactagtagcaactaaagaataatcctagtggaagggaagcaaggtacaacctccatcttttctctttttctcttcaaaactttggtgaaagtttaggttttggtggttgagttttggttctgtagttgctgtgagttgggtaagattttagtttgatttttgggatggaatggaagtatttgaacactcttttttagttttgttgttgttgtggagtgagagccaagcttgagtttttga

SEQ ID NO: 395743 - DNA, 1323 bp, Cannabis indica
ctctctctctctctctcctttcaaaaaccactatcacctcaccaaaaccaccatcacacaaaccacaagataccagatccctagaggtaggagtgttcatccaatcccatccgcattattttattcatagtgcatctgatccgcactaagtgcggattttatattttagatctaatctaatccacacaataattcaaatccaatctaatctaatatgcaaaagtgcgaattggatcgattattttttatattaagttatttaatatttattaatttttttacataactaacaacaaaacaaaacaaataattgtttttttatgtctccaacaacaaattaaaataaataaaatagcaaattcaaaaaaaaaaaaagtgtatgtagaaagaaataattaattttgttttaaattatattttttccatatataattatagaatataaatttaatttattaagttttgaattatatttatattatatgtattagattcttaaattattatttttttgaattaaagtattaattgatatataataaaaaaaaattatataaatatgtgtagattagattggattggttacttttacatatcaatcaacatccaatctgcaaaagtatggatttacatttttcaattcaatccaatccgcacaagtgtgtatatctgtattttgcagattagattggattggatcgtgtagattaaattagatcggatgtttaatgaacatccctacctaggggtggaaccccaaacgaccacccaggatgaaagacccagatcaacccaaatgaactcaccagaaatggacgcaccagattgaaagaacccagatcctagccaacctaacccaacccaacactaaggagctcaagataaagagacgccttgcaaaatcgaacgactatagcaacagtccagtccaaaggaggagtagtgggtgaaggtgtagtcagaggtggatcacttatgggtggaggagtggcggggagatgaggaggggtcaaaggtggaggagatcggacaactggtggtgttaatgaagcaagaggagtggctaccagagctagtggtggctgagtatttgtcggcggcgtcactgagggagttgtgggggttggtggagccacaactgcgagtattcccgacagagaattttcaaggaattgagctgagacagaacccacaatagctaggagaaagagggagttggagctaattaggagagagagagttgtaaataagaaaaaaaaagtaaaaaagaaagaattttttttttaatttatatacattttatattttaaattaatttatttt

SEQ ID NO: 395744 - DNA, 1239 bp, Cannabis indica
ggtagtttggttattcacttttctgcatatggtataagcaagtttaatgttttggtgtactttaggttactaaaaaagaaaataataataataaatttattgtattataatttgtgcttacaaattgctaaggggcatgcgtgaaataatattatttcacaacttattacatcattaattattaatttaacctctaattaaatatcaatgagtgatttaatatatagtcttatattttgagctataattggttgaaaactctaaattttggtgcacatttatttcattactatcatgaattgcaatttgaatagacttctcactgtgaatggaatttttactagtgttataggccttatgagtaggggtaagcatccgattcaatctaactatttttttctcgtctaatccaatcaaattagaaattggatttggaaaattatcatctgatccaatccaatccaatccaattactaattggattggatcgattttttaataggatacacacctaagttttaatattaacttaaaaatatgaagaaaaaaaatacgtaaaaattaagtatcaccttttatttaagtttaatatttcataaagatactattcttacaagtgtaatgtagccaaaagttttaaataattaaaacaataatatttttaagtaataaaatagaacaaaacatcatgaaaataaatacacaaaacaatcaagtgttacaaattcaacataagaaaatctaataaatatatatattatattttttaatattttgtatcatataaataattttttaatatatatataaatgtaattagattggatcggtttttaatttgattttgagattgacatccaatagccgatctaatccaattagaatccaatttttaggcatccaatccaattgtaattgaatatccaattttttgtaattggattgaattggatcggttcggttgaattagattggattggatgatgcccacctctacctatgggtatccgcccctatcggggcgacaatttcctacctagctaaatggaaaacgggacaggagaatagataattttatattctcgaatttttaatggggcgaggatagagatgatactatctgccctaataggtggcggacccaagattagattttagggtgggcttagttatacatttaatataattcaaaacaataaataaatagctaaattaagtggaatgatggtttagcaacat

SEQ ID NO: 395745 - DNA, 893 bp, Cannabis indica
gacaaaaagtccattcctagtatgatttcaaactcggccaatggtaactccactagattggcacataattctctaccctcaattttgattaacaccgaactaacccactttcttgagataattagtttcccattatgcaacagggttctaaatcccatctcaaatatgtcactaggcttactgagttgattaagaactcttgttgcaacatatgagcgcgtagctcccgaatcaaataaaatagtaaaagtaatgccattgatgagaagctgacctgtgaccactgaagggctggcggcagcatctgcctgagtgatggcaaaaacacatgttggcgcaggtttagcttctggcttgggttcctctttcttcaattggggacaatctttcttgagttgccccactgatccacactgaaagcatgccctctgattacaagtccaaaggtgatctttcttgtagcgcgggcactcaggataggaataagtctgatgtccccctttaccttggtttccacaaaaccttttatttttccctgaactttccataggtgggaaagttctctttttctgctcaacggtggaatcaccactcttctttacaggacaaggaatagggagagtagtggtcccaccagcaccaggagtttcacgggtttcttgcaaaaactttaccactccttcagctcaaagagccttatcaaccatctcagcataggttgtagtatcgtttgtagtgataaccagatcatgcttaatcttggcattaaagcctgccaagtacttttccttcttactgaaatctgtttgcacaattcctaaggctaatttggcaaagtgatcaaacttggtcatatactcggtcattgtcattgtaatgatcgctttagtaat

SEQ ID NO: 395746 - DNA, 718 bp, Cannabis indica
aaaaaaactgaccaaataaagctaaaatttttttgaaaactttctttcattttgcgtctgttattaactgtggattattgtatttgtgagggtttaaaactggcgtaaaataaaattgtgagaaatataaacagacgtaaatttagtaaatacccgaaaatccaacaaacacatgctactgttcatacacaatatatccaaccctaaactttgaatgctctggcgaaacctgcttccccttcgaatccggccagtcccctccaaaacaagccttgagtctctcgatttcctctctaaaattaacctcttgatccttctgattgtttgtctacgaaatcagccactcaaaaacctttccctttcgtcgtcctcttcttcatggtggtggtttgaagctttcttctggtttttgacaatggcagacaacaaaaccattacttctccaacccaatacgacgttgtcaatgccaaatgggacatgtgtttggatcttagtcttcattgtttcgtgtatggttccttcggtggagccttagctggtcttcttctctttaggagtctagttactcaatgggcatctgtagcttttggtgctgttattgggattggatttgcttacactcaatcacaacaattattatcatcatcgtcatcatcccaatcttcttctacaaaggataatcaaacacttgaatcttcggtaaaacctaatttttca

SEQ ID NO: 395747 - DNA, 649 bp, Cannabis indica
ttgacactaaacgtcttaggctatgaaaagaagcaaaagattttggcaagatgaaggtggaagagtttatgggttccttgcgtacttttgaattaaatcatcaaataaagtagaaagacaaacccaaatccacaactgatagaggtaaaagtattgctttaaaatttgctaaaaagaaaaatctgatgatgaatgtgatgatgaaattactttattaactaggaactttcagaaatatataaaaaaaagatgggtaataaaaagatttcatcaaaattttcaaaaggaaatattttttaaaaccttctgtgactaataaaaagggaatttagtgcaagaaatgtgaaggttttggtcatattcaggctgaatgtgcaaatactataaaaaggaataagaaaagtttctaattcacatggagtgatgatgaaactaacagtggaagataattctaataatgttgtactaacttcaatttcttctaggattgtttatgattcacatgtaaaagaaagattggtatgattgaataatacaattgaaaaagaagattctgactcagatgaatctcaattctgtgaagaatccttggctgagtcttacaagcttatgtgtgaaaagtggatacaggttacttctgaaaatagat

SEQ ID NO: 395748 - DNA, 658 bp, Cannabis indica
gatatgtggaccaataaactttcagtatgttacaatttttaaaactgcgaatggagttgttaaattgggtatctacagacaaatgataatttcgagcttggggatcgatactacaatttttttgatattggggacttatatgcattaaagtaaatttttttgaggacttatgccacaatttaatatcaacacatgtcatttttggaagcaacactagaaaatctgttaaaatgagaactaatggacttacgagaatctcgaatttggaaactattattgtattttttttagggttaatgacttatttgcatcaaaatcaactttttaagtacttaagacataatttttcataaaaatataaattttatactgaaaaagaaactcattaccaattggttttgagatggaactacatttatcttattccaaattctaacatggtatcagagcgaaaacaaataataaaaaaaaatctctagcaactatccaaccccaaaaaaaaaactcgatcgaagtagagccaaataaaaaaaggaataattacataaggcaccattttttgtaaaatatttatatttttacgttcaaagaatgtttttttacatttttacggtttttcaaaaaataacacgaaaacaacataaaattaacaagaaaa

SEQ ID NO: 395749 - DNA, 829 bp, Cannabis indica
caaaaaataaataaataagaacaagaaacaacaatatcatgacaaaaccaagatctaatgaatgataaaaggagaaacttgaagcaaaatataacgaaaactcaaaaagctttctggcactttaagaccagtgggcaatggcatagacgtgtttatacatgtacatttttatatatctatagccgaaacaataagaggaagatttctcaaaatcatgtctcatttggtctaactctttatcttttctttcgttcacccttaaattaatagaataaaccggtatataaaaagttgcggactcactcgtaaataagttttagaaaaggtaaagattttctgggtacattttctcagcaaccaaacaaaaacaccttcattagaaacataataaaaaagaaaaaaaaaatccaaaatggaatcacattgacatgaaaagagttgagaaacaacagatcaaaaaccatgaaatgagaatggagatgaaagaggataaagtggcatatgtggtaaataacttacgatttcagtccgatctgtgaaaaatttgaatgctttttctgtgcgaagagagagagagagatttgaatggggttttggcttaacaagctgtattttttttttctcgttttctttttttttgggtgtttctgttgatttgttttatatattactgagtgactcgtcggcattaacaccgtttcttaacggcataattagaccttttttatttgtcattttcttttgcaaaatgtatttatttattacaacaaacaaatcattctttatttatttttttttttaaatctagtcgtttgtttattaagctaaa

SEQ ID NO: 395750 - DNA, 1392 bp, Cannabis indica
aaaatggcaagttggacaattgtgtacagtagatgcatcaaaagaaaattccagccttttatttaatttgtttgtaaccaatacagatggatgaccaaggcgtgaatgccaatggtttgtattttgtacattacaagaaatggtactataggcttgataatatgatgcatcttgattgatgtggtacagcttgccgattcttttagcagtcccaatcgtcgaggtctgagaatggtcctgaatagaacacaagttaggtgtgaaagaaacatgatattgactgtcatcaattaaagaagtaatggaaagtaaatttaattgaaatttagggacaaatagaacattgtgcaaagtgatattagagttgataggcacagttccaatgagttctatttggacagtagtaccattgggtagagtaacggacttgtgtgttgttgattttgtgatgtgagaaaaacatctaatgttgcagcaaacgtggtgagtagcaccactatctattatccaaaatagagggggttgaaaatttttattaccagtaaagttgttgattgctggtccttctgatgttgatgcatcagttgtgggctgcatttgttgactgagcatggaaattagctgctgacattgagctgcagtaagttgagatgttgagggatcattctgtgatgtcgaaatttgatgtgtttggggattggtccgagaagaagaaccggtttctggttttttgctggtattagaggcagagtcattggatcgtggtttgccataaccaggtgggaaaccatgtaaaaaatagcatttatccttgtaatggccgggtttttgacagtgagtgcaatgaggtcttggtcttttattttttgatgtattattggcagcaggagagggatcattagaaggatttttcgtgtgtgctgcagcagtgataggagggattaatcgattaccaagtgttctttgtctttcttggtggataaccatagaaaagactttgttgagtggagggcaaggatcaagtaatagaatttggtctcgggtggcatgataagtttcattcaatcctttgaggaattgtaaaacttggtcatgattgttgtaatcttgattttgtgctgcagctgcacaagaacatgggattcgagggcgaagttgattgatttcgtcccacattgctgtcaatttggtgaaataagcactcactgtgtcatcaccttgatgcagataagtcaaggtttcgttcagttcgaagattcttgggccgtttccttgattaaacctgttgtttaaaacagtccacatctcggcagcagtgtcgaggtacatgatgctgcttttaatctcaggtgaaacagagtgaagtatccatgacataactaattgattaca

SEQ ID NO: 395751 - DNA, 1050 bp, Cannabis indica
atgccattcattatttttataagtactttccttctaatcatcattttcattgctggtttttggatgctattagattagtggagcattcaatgacatttgttctcatgatttaacacacacatatatatatatatatattaataataaaggttccattgaaattccatgatatcatcataacaaaaatttaacattttttttttttcgtaaaagacatttatttggggttctctttacatactttattaattaaatttataaaggcatttttgagtgcaattaataataaagattaaaaggaggagacataaagaacatccagcccaatgaagggtatgtttggggcccattataaatggtaacacccagacccatggaagataatccaactctttcctttttatcttttctttttcctttatttatgtttttctaattatatttgagaattataataaaataatgatatgtgtacatatacataccaaataaaatcaaactaaaacagcatgattgttgaatagttttgcattctaaaataaaataatggagtctaaaatctaattctaattaaaatttcaattccatataaataatattggataatgctttaataaaaatattgaaaatgacgttatatagagtcattttttaaataagtgtcattgtttcattttatgaacatatttaattttatttccttatatattttttttataattatttgtcaaaatactcacccacaaaaaatattattttttggtgaatatgatcttagaggagagatgtacaaaatatttttttgcattgttctttaacttcgctatgagagaatttttgagtctcaacctctattttattttaaaaaatttcaaaattcttagttttggttataataatttaggttctttgataagtaagttttaagaatttttatggcgcgtttactaaactgtaattggaatcagaataatcaatatcgatttaaaatagaaaataatcggaaacaatattttattatgatgtttactaaactgttcggaaagaaaa

SEQ ID NO: 395752 - DNA, 670 bp, Cannabis indica
ctcccttccttgatggcaccttacctcaacctcctccaaacaattctcttcacaactcttggatttgacgcaattagatggtgatgtcgtggatattacactctattttgccagaaatcaagagaagcatcatgaattcggacattgctatagaaatgtggtttgtcctcaataatcgcttcaaccaaggtaatggaccacgaatctttgagctttatgaatccctcatttatcttcaccaaggagatgaatttgttagtgtctatttcactaaactcatagccatgtgggatgagatcaatcaacttaggccaagaataccctacacttgtgatgctgctgcacaaaatagagatcaccttaaccatgatcaagtcttgcagtttctcaaaggtctcaatgagtcttatcatgccattcgagatcaaatcttcctccttgatccctgtccatctctgaacaaaggcttttccatggtgatccatcaagaaagacaaagaacattgggaaatcgcaacgctccacccatagctgctactgcagccacaacacctgctgctaatacggatccagcagccaaccaaactttaaaaaataaaagacctcgtcctcattgcacacaatgccaaaaaccagggcactacaaggacaaatgctactttctccatgg

SEQ ID NO: 395753 - DNA, 1273 bp, Cannabis indica
acatgttatatggtgccaaactcgtctccaccctgatggaaccaaacacacatctcagtaaggacataatggagttactttttgatcctaccacttatagaagtttgattggaaaactcatttacaaaactataactagacctgatatttcttatactgttaataggtttattcaattctgttcggctccgcggcatcctcatctccatgccgctcaatgcatcctccaatatttgaagggcttctcaggccaaggattgtttttccactgcactcattctacacaactcaaagcttataccgagagtaacttgtctgttaatgaggtacaacttaaagttttttctgatgctgactggggtgcttgccccgatactagacgttctgtcacaggttattgcatctttttgggagactctttaatttcttggaaatccaagaaacaaaacacgatttcacgttcttccgttgaggccgaatactgcgccatggctaatactacttgcaagatactatggttactcgccttgttgaaagactttaggatctctcatccgcatctagtcctcatgaattgcgacaataaagctgctattcatattttcgaaaacccggtctttcatgaatagaccaaacatgtcgacattgactgccatatcgtccgtgaaagggtacaaagtggccagttgaagctttttcgtgtcaacaccaaacgcaaccttaccaaccttctcaccaagtctctttttacatctcatttcaaggatttattttccaagatgaatattacaaacttgtacattccatcttgagggggcatattaaatattaaataaatattttatgtttgggtatagagataaggttattcttagttggatttggtgtgtattctagggttggatatccccctatataaatcactttactgtgtacatttattattattcaagataataaaatcacattttactaatagtattggtgacatttttgtttgttaagtgtgtcaaaaccttgtttcttccacattattcttagtactttttgttcatactattttattaaataacaagtaatatatttagataaaacattagtatgtattaattattatgaccataaattttaatataatgtgatttttttttttggaaagtatgaatcttattatttaatagatatttttacactaacggtatgtttggtttatagaaatgggaattgtaatggtaattaatatgttcattactttatttgtttttctttttta

SEQ ID NO: 395754 - DNA, 561 bp, Cannabis indica
gctagttaaggcaccggcgaacagagggcgttctaagtggaaaccttcaggcattttatgctattttacgatacagaaaatgttatacagatttaaatcctaaaaaatggaatgcaacgagttaaaagaaacacgaagccaaaaaaaattaattctaaacttgtattgtatgataaacccagcgtgaaggaagaaaatcaagccctatgagaactaataccgagcaataacaaaaattcatacataaggcacgaagagatagacatagaaagaaagaaaggaaaaaaaaaatactaaaacgacatacatggtcttagaggacgaagcaactgcgccgccgccggtgattgggttccttggtcgagagggaaaaagaggtttttggtctctctgactctgttgtgcagtgagatgaggagtggagagtcggatagcatcatttttacactaactgagaagaacaacttttgatttggtttggtttaaggaagaaaaaatcccacatcgactaaacatagcttttttaatatgtttatattattggtttggtttgactagggg

SEQ ID NO: 395755 - DNA, 929 bp, Cannabis indica
atgagatgaataatacataatttgaattaattagaaatgttgtggctactctcaaattaattaaaattatatatcattatattttttatttcaaaacaataatttaagatatgaattatttcactttatatataaaacttttatcatcatttacaacaagtaacatattgtttatatatataaacatatacattactctcactgaccatctggtatacaattaattcatacttcttttgaaaactgaaggaaaagatgacaagatgaaatatcaattgtgagaaatttattttaatctattgcattggtagactctttatagcttgcatatgtttattagaaatttattggagtcacaattgtatatatataaaatgtttgttaggtcatcaaataaataagtcaaatttatgtggtttattttggaataaaatttatgacttaagagcataattgtcatgattttggataccaattagataatttctaatttgatgagggggaaaattagaaatagttaataaatattactaactgttttaacagttggtaatataacaggcaatggtctccatttactcatcatcaggaaaataagggcttcaaatgtttttgaagcaaattggaagattataccttttacaaacgattcaatagactccggtacgcttccgcttatctttgattctatagttagatttctcttgaattaattaggactaaattcataatttacagtattcttaacatgtggtattaagagtatgtctaaattgatttttgagaatttatagtattattaatcttcaataattttttttttgtcgttgtgcatatgtatgtttttatttgagattaaatttgtcaatgagttattcattccattactatgcgtgcgatatattagattttgatggaatcaagttcct

SEQ ID NO: 395756 - DNA, 517 bp, Cannabis indica
aaaacctacaaaaataataaactaccaaaaaacgtaaaaattacacaaaataagagtaaattatttaaaacaatctaaaaattatactaattaaaacttaacaaattctccaaaactaaacatttacttattctcgagtaaagagctaacaacgaacacgacacaacctaaatgaaacaagacaatcaaccaaaacatgagtcacaatctttcaagtaagccaaataacatggttttgtacaaaatttttacttatgtatttgaatctagaattttagctcaatcacacccttaactcacctcaattatttcattcagttcatgacaccataattaacacttaactaacatttaaaacaattcatgcatgctaaataccaccttcaatccactaaccaaatgtattccacatgattgcaaaactcactattctctactaatataaatagatccataatcaagaatcaaaaggtctttctaggtaataaaaaagctatatttcgaccaattaaagata

SEQ ID NO: 395757 - DNA, 552 bp, Cannabis indica
tttttaagtattttttaacaaaaatacatattattatctttttttgttaatttttttaaaaaaaacattattttaacattatagctatgggaaaacaacgcaattttttttacaacaattacgaagtttttgttttttttttttctgttatctcataacaacattgtttttactagggaagcctaattttcatgttgatcctacaagaaagcaatgtttttctttagaaaaaacaatttaaaacatgtaaaaaattagaattcataaaaatattaataaaaaatgtgtaaaaatatatataaaaaaatatatatctatttttaagtgtaatgtataaatttctctcatttttgtcagaaaaaaaaatgtatatatatacacgtaatcttctttaagggcccgtttggtacgcaggattggactgaaaaggattggactggactggacaagattggattatgctgaaagtaatcttgtgtttggtttaagaatggactggactattttatttatttcatttttgaaaaaaaaaaacttaaattaaataaaaat

SEQ ID NO: 395758 - DNA, 670 bp, Cannabis indica
gatagctaattaagtaacaatactgcaatgcatcatttctttctaataagggagggaaatttcaaagtccaatacaaaataattgcagagtgaaaaataagcaagagcagactaaaaggaaaataaaacattgtacctgtgacagcgtatagcgcacataaagcatggaaatcaagagatcgatcctgtaaagaaatgaagatagcatcagactcatcaagaaccacataaatgtatccctgatgtgatctacacaaagctccacactcagacaagctaaacctctaccattagaaatatagaaccacttgtctagaagtaaggctagatctaacaatgataagctacaggtcagtatatacacttgtcaaaataacaattacacaaaataatatagtgagatgtgaattgtccattcattaagaaataactgattaaaagggccttaaacaaaccaagtggtgtattggaacagctgtcaatgttccaaatctgccgttaattcgtccaacaatttcatggacctggcttgtgagtttttgatctgtgaaaatgcaatatgaaacattgataagtcaaatttaacaagaaaacaaacaaaatgctcttagaattcaagtaacttgctctaacacattaacttatctaactctgcaaaaaaaaaaaaaaa

SEQ ID NO: 395759 - DNA, 833 bp, Cannabis indica
gagaccaatatccaaaatcaaaatagtaggaccaacattaaattggcaagtgaaaaaatggaagaaaaagatgaaattaaatactataaattatatacttttataagcagagtagtggaaagtaccgaaatataatatccaaaatcgctgggtatttcagaaatgagaagatcgaaagataatggtgaacatttgaggattatcgcagagatttggggaagaaatcttcatagtgttgcgacaaacagagaaaagagtaatgttgtacagagtaataaaataacaaataataatttgaaatgttgaaatagacaaacaaggatgaataccaagctttggtcttcaaataagagctatgccgaggaagaaggatggccaagtgtggagcattagcaggttaagcctagaggaatgttggtctaatatttcaagtttacttgtgtcaactgatagaggcaagtccaagagataagaatgcgtataaaagcttgtacaattaaaacatgcatatctatcattaaagaagataattaaataagcaatataagagtttcatcgagtattctagtttataatgatccatcaagtgaataagaatgatttcaaaattatattgatgaaccccaaaaccaaaccacaaccaaatcaattaatataattctttttactgttttggaagtgctcccaaacttcaacaacccagaatataattattttttcctatttcaccatttcttcaggtgtctttcttccaaagaattcatcggatactcctttatgttggaaattattttaccaggatcttagatatacttacaagtatgttgattaac

SEQ ID NO: 395760 - DNA, 715 bp, Cannabis indica
tatgtgtctatgtgaataagaataatttttcttgtgtcttccattataaaataaataaaatgcaccaactcaatatattactagaaaagattaaaaaattagaagtttgtgtcttttttttaatactattaaaaaattaatatatatataatatattataattttttaacaacatatataattaagtacagatcggttactttttgagatcaaacaacatccaatccgcacaagtgcggatttaagatttttcaataattcaatccgcgcaagtgcggatatctacattttgctgattggattgaattggatcagatactttataaacaaccctagtatgcacatttacaatgataactagcttcactccatgcttgaatttcacataacctattaacaacaaaatctgtagaatacgagtacacaaagataatgaaagtttttattcttctttattttttattttatgcagcaagagcaccaatccaacactcttatacaaaaaaaaaaaaaacaaacaatccaacactcttatacaaagtgagcaattcccaattatcatacaacacaagtgaaaccataaaaatctacagaaaaataaatagagtaaccacaaaaattgaactaaccttgttgatcaacttgtcttctctttagagtttagatccagactaattccattccaaatttaaacttaattaaagtaaatcaaaaa

SEQ ID NO: 395761 - DNA, 502 bp, Cannabis indica
ttatattttagggggtaaaatcatatagtgtcgaaagatcaagagacaaaaatgctaattatacttttcaaaatggagagtggatttagattgctcttagcctatagtatcaattttcattcctagattccaacaattacaaactaaatttcataactatagcaaaatcaaataggtaagaaagagggtttcatggaaaagtttgaaaaatcactatattactcatggattctatgcattttaacatggaaaataagaagtaaatagtgtaagggtgaggataacttaaggaataatgatcttcaagcttgaatcctctccaacaatacttgatttcttattgaaacttttctttggaatgggtttggatagttttgtaaagagaaactttttaaagtggaaatgctactatattttttaatgaagagggggaaaatgaggaattaaggtggcgtttggttggaaggaatgaaaacataggaatgggaataggaataggaat

SEQ ID NO: 395762 - DNA, 827 bp, Cannabis indica
gcttactggtgttgaatattttgggggcaagtagagaaaattgagtacaactcaaactcgattgacattcgggctccaagtttcatctcctaggagggatggagggtgtctctttttcccgttttttttttttcaaagtccttcgcgtctgtcgccattacgcaccaaatcgtgtcgagaggagtggtcactggtcaatggtcagagaagcaatcaaagcaacaccgtttaatgactgtgatcaccgttttacccttttacttgctcagtcattttcttttttatataatatttatcaaaattatcaataaaaaaattattaaaaataagagtacaaatagaataaattgttgcatttatagtagcttttttcgttttttttctttcttttgaaattgtagtagctcttttctgaaaataaattttttgacaatatttttcgataaactgttatcctatcttccaagttccagtacattaaatcttcatcaatatgtaaacatagtactatcttcaattcataacaatacccaagtagtagtatatcgatgctgttatcatagaataacccgtacaaaaaggtttttgcatattcgtttagaaatttgaaaagggaaatttcaatttttgaccctaataaaataccccatttcaaaatatataccctccactaatttatacaaattaattccactattactcatttgtacccaaaatacccctcaaatttaattttcctattcacactctctttccgtctttccctctctttcactctctctctctctctctctctctctctctcgtctactctctctctctcgtcg

SEQ ID NO: 395763 - DNA, 951 bp, Cannabis indica
aaaaaatcgaaagaggaaggataaaataagacaaacactttttaacttcgttcgggcattaagtagccttagtccacgagtcaatattatttagtaacttgttttcttgaaatgccttaggaaatacacaagatgtatgttctcaagttttcctgagtaatgtttgcaagagagttcaacccttaatccatgagattaatggggggtatttatgatagtttgagaattacattaggtttcccatttcctctactagagagcttatagtaaaaaatacttatgggctttctcatcaaatccagcgcaaagagaagatgatcggctgactaggaggattggattttggttgatctggtcaacatcacgtacactgattgtgggcaattgatctagattaatttcaaaatatttaatgtgagatgtttcctctttaatcttgatacgtgtttcccagattttttgtaaacccgacacctaggtcttagccagataaggttaagataagatctgctggtcgactccctcaatctcaattcaaagaaggttaaagtataatcggccttggctcgtgaaaagggccttcgtggttaggacttccttgatagctagcaatgcgagggatatccgcaatctggagcctcacctattcccgagaacaaaagcaatctattcctatagaatcaaagttaagtgtgttcgaaatattttacaaggatctagatttactaccatgtatatttcattaacatcctaatatgaattctaaaaatatgaaataaacacatataaagtttatgaaaccttacattgggtgcagcagaatataatgactccttccgttcagatctctagcccatgattcctttttgtagcagaacatcaccaagatctgaacctggatctctttctctccttctttttggttggattctacacaatcttccacactat

SEQ ID NO: 395764 - DNA, 713 bp, Cannabis indica
aaacagttcatggtgacagttaaacagatgacgccttaactttgctactggttcagtagtttagacggttttaccgccaaaatttgaactaggagagttaaatgcaagtgaaacaatagttgagagaatttagccgccaaaaacttttaaattaatattaattttagtttctacactattaaaataataattttttaagatatatacaatatacataaataaaatattacttatatattattaaaataagtttagagaatgcactattcattatctatatgtaaagtaagttgcattggtttgagtgcatctctattatacatatatgatttaagagtattgctatggagctccagtggtgcctagcacattctataggcaacatcccacggttggttagcgatatttcttaaaagctattttttttaaagttatataggactcaatatttaattacagtaatagcggtatgacaccgatgatggttctaagcactagtggtgtcttttagcaattcttatgattagcattactaagaccttctataagtggcgtcccacgattagttagtagtattctcttataagattcgatacttaattgcacccatagcaatatgacagcgaggaagatgttagatactagtggtactttttaacaattctcacgattgaaaggagttgatggaagttttttttattacatttagttaa

SEQ ID NO: 395765 - DNA, 632 bp, Cannabis indica
aatataattgaagcaaaatgtgtggataatttcaacatgccatcatattttcctagtgcaaaggaagtgaaaagtgtgattgaaaaagaaggatctttctctttacaaaagcttaatactttcgaaacaacagcagatgcaggcttcactagtgaacatgatgacactactttaaattttgaagctgaagaaagcaacaataataataataataattataaaagagggaaatatgtttcagattacataagagcagttacagagcctattttggtgaaacaatttggagaaacaataatggatgaattatttgagagacttgcttataaggttattgagtgtgccaatgacaagtacttgaacttggttatttccctcacaaagaattactcataaatgaatcatgtccaaaaataatctagtttcattttggagaactagttacacaagaataaattgtttcatgtactactttgatttaatataatttacttagaatttaattaccctgcagtataatatcttgcgtttggttggaggtaatgaaatggaatagaatggaaatgaaacaattttcattccattcctttatttggttgcattttaaagtattggaatggcattccaatgga

SEQ ID NO: 395766 - DNA, 1123 bp, Cannabis indica
aatataatttttgcataatcttcgagaagtatgcaaaatatggtcttaaataatatattcaacgtgtcatacaaaattttataacttctaatatagacattgtaagtaataaatatatataatacaagactaatatatagaatatgaacattctttaaaattaaatgaattcagttcctatcattttctgcaggaaatgataaacaaaaaaaatacatgtctcatgtgtttaaataatattagtcatgctcaatgttattcttatactttgatgtttcaatgcaatatttttaaaattaatttgggtattcaaaaccccactaaaaattacatcaataataatcatttcaatgattctttagttgtattcatataaatataatatcattgataaatataaaatattcaagagttatttgcacaaatctgtaatgacattagattgctttttgattgttattaaataacataagaatatgtatatgaacatttattcatctcttgtattatatttcagctaattatatgacgtgtttatataattttaggatataggcataatgtttatatattatctatcatatcacaggtacaaattatataaaatatattgtaaatatggtaaataataagaatataatgtatatatgaattcaataataaatatatgagaataagaatatgtacatacatatataatatataaatatatagataaaatataagttcttgaaattatttcagttagatgagcataaatatatatatatatattgtgagcttgaaataactcaaaaactttaacaaaatatttaccttgaggtttgggcagagactcgtgatgataacgtgttataaaataatatagaataatataaaatatataagaaggaaataaaaggaaggaaaaaaaaatttaatgagaatttctcagtacttcatttcaatgagatgatctcttatttatacaaatatgtgagtcatatattaggaaactaagagaagaatagtaattacaaatttaaaaaacaaaaaacaaaatatgttctgtaaaagttcatttttattttcattttatttattttatttaagtcgggtctaggtccgggtcgaattcggatcc

SEQ ID NO: 395767 - DNA, 687 bp, Cannabis indica
tgtgtagttctcttataccataactttaatttaacaactaaaaatggttacacagaacaactaacaacaatatgtatacacttatacggtacggtaagtaatttcaatcaataattaattttatttaagatcggtctcacttataaaaaaaatagtttaccagatgggtgtatgtaatgtttgtgtataaattatgtgtgtaaatataattatttataaaataaaataaaatagaaataaaactgtttttagaacatattaatcaaacatgatttatgttttgaaaataaaaacaaggctaatttgcatatttttgtaaactttgacatgtagtaaattatattttctgagctttttaacttgttaaaaattctcttcaaattattaagattattacatttaaggacttttttccaattttactaaaaaaagtgtgacgtagatgaaaattttgggagcaaaatttgatagatgttaaagttcaagagacgtgatttggtcagtgatagtcccagaatttttactttgtgagggcttatatatcataaaaaatatttatacttacattataatcactattactatatttatttaattttgtggagcttttctactattttgatctataattatcaaattaaaaataaattacatttaattttttaaaaggtaatatttttattagtg

SEQ ID NO: 395768 - DNA, 544 bp, Cannabis indica
tattagtaatgtctaatacgatctaaacaataatttcaaaaagcctactattttcttcagtaaaaatgtgagtggaactattcagaaagttatttgtactattttgaatataaatgaaactgatgagaatagtatatacttgggtctcccaagtacaatcggtcaaaacaagtctactgtattgggttttcttaaaaagaagaagaggaagcgttatacaaagttaaaatggtaaactctagtcacgtactggtacagaggtcctaattcgtaatgtggctcaaagctttctaacttttgttatgagcgttttccttttgcctgcgggaacgtgtcatgatttgaaacaacaaatgactaatttttggtggaaggatgtaacgccctaaataattaggcacgctacttaaaatacttatgaaaccctaatcccataatcgggattactaatcaaaatagcgcagaatttaaacttttatattaaacagaatgaaaataaacttgtaatatatttaaacttttaaaatagttgggatcccaaaaa

SEQ ID NO: 395769 - DNA, 1098 bp, Cannabis indica
gatgagtatcctgtgcctccgggcattatcttgactctcgttcattcagatgaggaaagggcccagctccggatttctaagtacaactacgccttgggggagtacaccaaggggaacgcggaggtggaggctctgaagaaaatactaagggacgcccaggatagatctgtccaaagcaaatacaccgaaaatttttgggatttgaatttggatcccttgaccaactggtttaaacgcttcgtgggacctagcctagctccttttgcctcagagataatagccactttgctgccaggttgacccaactccccatgaagagatatgcggcctacgcttcaacaagccccgtgtaccaaatctaggacatgagtgtggccctcactgtagtgagttcttatcttttagattcgtcaagtctctcttattattcatacaaggttctaataacatatatttttttttgttgactgctagatttcagcagaggtcggtcgtctctcaaagatgctaattgatgaaggatataccatgtccaaatttggtggtatggaggaggcgataaagagtccccgggagttagaggagcagaagaaggcatctgtgacgaagcctagaaaagggagtctcttatggagcagaaccaccgggaggcattaaaggccagggatgaggttgttgctgtagtgaggagagatcttcgagattccagggaggaagttcaagaactaaatgcaagctaaaatctttggaggagctgcaccagactgatttggaaacaacagctagcctgattgttgaagtaaaggagctccgtgtattcggggagcaggctcgcaaagaagcagctaaagcaaagagggatgccatggtggctccagtcacttgtcaacactgtctaaagcgttttgatgacagtgtgttcatgtgctagaaagctaactatttcgaacctcggctccttttctaccctaatcctgaggaagtattggcccatttccaggagaagaacaagaaacttgaggtcattctggaagaacgcaggggcccccatcttcctccccaggttcactaaatgatttgcttgtttcttaattttac

SEQ ID NO: 395770 - DNA, 1044 bp, Cannabis indica
gttgtgtgaatataaatattatctctctaaatgtgctcatatatgtcttagaaataatcttttgtattttctattgagatatatatgagcaaaaccaattttggattcatcattttttgatctattattctgttttttgagtaaatgggtattggaaaatgatagaggattaaaaatgggacaaaacgcctcaaacagcgtcggatttggtggccggatgtgggagatatggtcgggtcatggaggagtcacgaactgggtcgcatgacccgagtttcagacccatgggcattttctgggcaaaagggacgaagaaaaatgacgtgtcgtttttcagccttcaggaacagtaaaaaatgacaagtcattttcaagtcttcgggaacatccaaaaaatgacgtgtcgtttttggctttcagatcttcctcaatacaacgtgtcattttttggcttatgggttctgtctaaaaaatgacgtgtcgttttgtgtcttcgggatcagcctaaaatatgacgtgtcgtttttgtcccaaagccttcccgcgaacaacagtcattcgtcgtccccccttgcgctagttgttttgtccaaacgacacgtcgttttcgttaaacaacatgttgtacggacatttgtataatgtaaaaaaaaaaaaaaaggaggaagaaaatgggcgcgtgcaggggtgtttttgggccattttcccaccattttcatgttttttaattctctattatttttggtatgtacaatactaattgcatgaattttattcatatttggttgataatgttagtattgtgacataaattttgtgatttatttcaacaattagtgcttattttcttgcctatcgtaaaattaagcatggaaaattgtttggtaaggaggaacacttaaatattaatttatttaagtattgtattttcctccaaataacattaagatctttataagtaattaattatcctatcgatgatggttgcttattaaagatgcttaatatggtgaagaaaattattaaatattatgaatcacaatt

SEQ ID NO: 395771 - DNA, 956 bp, Cannabis indica
aaaaaaaaaaagaatgaagaagacaaaattgaagatgatctagtaatttgtttcgtattatcctacaaataaaaataaataattaaataaataaataaaatgtactatgctgacagatgagatatgaaacagctttatcgatacatggtgaaaaaaaatgaaaacctctttcttcttttaatattatttattttttagggaaaaaaaatatactattatattcttttcaataatttgtcatcaatatatatataaaatattatttatctttcttcaaacaccaagataagagtaaaaggttaattgtaattttattttattatattaaaaaaaaaatttaagattgttaatttttttttaaattattgaaattttttgatttaataatttttatccaattttagtaagagaagtctaatatagattaaaattcgagaatatgatttggtatttgtgaaaaatttgagaggcataatttggtagacattaaagtctggggactataatttaatacatggataaacactgaattaactaatgatttcaatagttcagagagaaagtttaaggaataaaaattataattaattaagataaaataataaatcttatgaaattaagtttaaattcataaaagaaattttaaaaaatacttataaagcacaaaaaatcatatgttataaataaattttaaatttttttgaataatttataaggtttatatattttgtctcttcattttaaactatttgattttttttttttacaaaatttactaataatcttaaaaaactgcaatgtatgatggcataaaatataaacttaacttttattgatattaaaataaagggcttttttcatttttacatttcaaaataatttttttttaacatttttattaaatttcatataaatactcttattgcaactagcgctgcaacttaaattgtaacaaa

SEQ ID NO: 395772 - DNA, 1127 bp, Cannabis indica
gacctatacatacatacatacattaataattaaatgaaaatgcatgagttaccataaataataataaaattaatagaatttaaaccttgtttcatcagcgcagaaataagtgttggtcttggtactagggtgaaagtagatgggagttagttctgaaagtgcgtcgtttgcaagaactagaacaccaaatggtccaaatgtgctcctatccaccgaaccaccaccgcacccattattggcgtgacccgcggcctcttctaaaccacataaatctacttcgaactccgccaatatgtccaactacatatagtacatattataatctcggtttagttttagaaagaaatccacatagctctccactaaatgcactcttgcatcattaaagtgtgagcattctctctaatatatagaacatcgaaagttagcatcatttcgatgtaaatgcactactagtttcagattacactagtagtgaagatatagctattgaggatttattttaatctgtttataagtggtataaaatcaagtgagaatgatttagattggagagtaattgataataattgaaaaaactagtaacttagtaaccagttactaagctttgtgtgtgcattttttaacattgtggatgctttttaacagttcttacagcctctaaattactcagttaattacatttacacctaataaagagatggtacgtaacaatgaattttgaatattaaagtatgtcattctaaatattataattaggtgcctaaagtttttatttttgataagtagttttctatccataagcacttgctagaaaagacaagtcttaattatttctaaaactattaatttcctaataaacagttttcttagcgcttagaaatagaaagaaaaaagtttttggacaaattaaggcataagccttgttgaagttttagtaattctcactattttatacacaaagttgtaagtgagtctgtgagtggtaacacatatttttgtgttattatatattatttgtcttaaataatatatctgtaatctctttattacttttcttatattatatatatatagtgtgcagggcctattagtgggccatagaaaaaaattatttgggcctttat

SEQ ID NO: 395773 - DNA, 641 bp, Cannabis indica
aaaaaaaaaaaaaaaacataccaccataaatcacaatagccaccacatgtgagatctctagacccacaaacccataactcctcctcgttgaaccaagaacccacgaacccaaaccccaacgatgcaacctgtcaaaaaactatgaacattcaacaatggtcacctgtagagaaaataaaataataagagaagaaagacagatatgtgttagaaataaaatgcacaaaaatgatgtctaggccatgctggccattctcaatcgccgcgatcgtcaaaggaaacctcaccgttagctttctagctctaaaaaattctcgatcaatctgtcacaatcctctcttggaagtttcaatcgcgtggctccaatgtgtagtagatttgatgaagcaagcacgagactggtgtaatgagatgccccgccgatcggcgttgcttctacgatgctaataacgaatagtgagacacaataatagggagagagagaatttgaatgttggggtggggtttatttgaacgaaagaaagatagtgatcaaaagagagatggagtagtctataattgaaaaaaaaagcaaaagaaaaaagaaaaaaaaataaagatttaaaaataaaattagagatttattttaattaatcaattta

SEQ ID NO: 395774 - DNA, 824 bp, Cannabis indica
aacaaataaaaaagctacctgatgacatccacaataatcatcttgttaattacaaaatttatgagcaaacagtgttgatggcaaaaaggatactaacccaacttcttgtgtataacttgatagcaacagtattagttttcatcctgatatcaagaaaattcaagaaaggaaagctaaatgacacgttaaacaaaggtagtaaccaaagtaaaaagggaacaatgactatgatacaccaatgctgttatcgaaacaccaccactattgcaggccacctattagttcaccgaagtcaaataagtaatgaaagaaacaacagataaccaaataagaaagaacatatgcggagagtgagaaacaaattaattttataaacgataagttgaaaaaacaaacgacacgtaagcaagaaaaccaaggatgtatatctaaatccagatcccaaatataaaacaaagatggcaacatatgcaatgataatggagagaatcacaaaaccctccattggtaaataaatttccgcctgcacgaacacataagaatttccacacttcaagaaaaggcgcatagatgcaaaatctaaagtcccagctcaatatgcaaataaaaaattagcaaagttctgcatcaagttagtgaaaataagccatagtatgacctcctatgtgaagataatgatgaacatatctaacccaatgctgggacgggagaagatgcagacactaattatgagaatattttttaaaaagttgaagcctgaaaaatttgatgaacacccccaagaaaaaacatgaacaaaaaatcacaatgtagtgaaagataaa

SEQ ID NO: 395775 - DNA, 800 bp, Cannabis indica
gttatgtactctatcaaaccttgaaatttgttggactggactaagtgaagtactctaactatacaatggctccatgaaaatcaaaaggtgatggtcacttataatatgaactaagcctcataattacataaggtactatttttttgtaaaataattacatttttatgtttaaaaaatgttttttttcacatttttacggttttctaaaaataacatgaaaataacataaaatcaacaagaaaactacataaaagaaatatgaaaataatatcaaaataacaacaaaaaataatataaagataacaaaaaatcaacaataaattaacaagattataacatataaagaccgtattttctataaataaaataaaaaaattgtaaaaatatttaaaatttcgtagaaccttatttttataatttttttgttctttttatgtttttgtgaaataatccctaaaagttttacgtgattatgagagatttaaatattatctaatagatatattcgttagtttcaggtgtttaggcttatgttgttacttattttagatttatttttttaaaaaaatgctacggtagaagttttattttaattgattaatatgtatgtttttttttttttgtagaaaaggtctgctattataaattaacaagagtcatttacaacaacagagaaaatagttgaggggatgtcctcataccacatacaatcattatctagcgctaatgcatgtttagccaagccatgagcagcttggtttgcatcccgtcgaacatgagatacacaaacattagggaaa

SEQ ID NO: 395776 - DNA, 998 bp, Cannabis indica
cctaggtccacctatgcaaagggtcgggcttgacttggtctgctgttatgttatgtttaacatcactgctgccatcaatgtcaaatactacaagatgtcacatattaattaattaaaacagtttaaagtttaacatcactgctatgtttggcattattgcatagttcacatatgacattattttttggagagtatttattttttaaattattatttttatttaattaattaaaatagtttttaaacgtgtttaattaattagaaaactgagacgttttctcgtcctaatttttagcatcaattttatgatcccacgttctaacgttcccatgatcagaaacgtctttcatcctgttactactttctgtgcatttcctatataatgcatccgaactaataggagaaatacatatttttctcacaaaaaaaattatatacaattatatatgattatattacaatatgtattcttaaagcaatagtgttttgttgggtgtggtatttcgatagttctctatcgtgcaacagagctccagattcgactagactattttattctgggtacgacgaagttgatagtctgtttgcacaattctaaacagtgttgcgaacgtcttaaagagaacgacctaatctgtgactcaacccaaattttaattcggtaaatttattccttttattttttacaacaactatttccacaaccaccaccaaagtgacttggggttggatatttacaagtttgatagaaatttccttcggtaggtagtccttaccatagtgatcgtctattctattttggaggaataacacaaaagtattattattaggcactagtaatattattatgaaaaagagatgttttataaatgattagcgatatccaataataatttttaaatcaaaatatgtgaggtgagatacttaacaatataggtggcgtttggtaacacttttttaatcagttttctgtttttaaaagtagaaaagtgaaaata

SEQ ID NO: 395777 - DNA, 873 bp, Cannabis indica
aaagttcgggaaaaaatttagtaattagccataaaaacaatcaataaaagttaaaacaagaagatggaaatactgtagactcatacatttatatagtaccatatatcatatatatatagatttactaaagagcaccagtggtgcttattgctgttattcgtgttttcgaaggatagacacgtggcataaccagaaggtaatcagcatctaaaactggacacaagcctccgtttgtggaagcccaaaccaaacttctatatattttgttatctgaaatattttcttagttaaattttttcccatagtcatgtacgttagttatttatgacatcttgtaaaattttgaaaattcaaataaatttaacacgtcgaaaaataggttcaaatagtgagttacacgcatgactactttattttatacacatgtgaaatagattatttgaatacaactttatatattataaattatttcgattttctcaaaattttgtaagatatcttaaacaactataacgtacataaatatgaaaaagaagactaaaatattcttctaaatgccaaaataagtaaatggtgtatcaatgcatcccttttaaaagcgtgcattgtagaatcaccctaaattattaactaatttatctgagtttaaaaattaaaatacaaaataagatgctaaaatttactctcaaactctaatagctatcctaagatcttataaattaggtattaactgattaaataattcaactaataagtaaaacaaatttaatatgaaattatatataaaaaaagggtgcttctatgaacctttatttttttggtatttatgagaattttttagtctgtatttttatagtagtgtacgctataagt

SEQ ID NO: 395778 - DNA, 1043 bp, Cannabis indica
cattcttcttcttcctaccggtagctttgttgtgaaaatatttagtatttctatctcctagcgctagccaatctgcacatgaccttaacttccaatagcactcctcacgggagaaaagatctttcagtttaacctcaagtcgtttcacctcatccattcgaaccaatggtgcagacacactgaggaggtcatccaactgtttctgcgtttctctaaccaacctaggaatcgaaccaaacttgcttttattccacgcccccaactgatcgacacacattcaaaaaatatccagaagactatcttgactagctaaaggaaaatccagagacaaccacgtcttattaacaatttcgtgacatgtagcatctttcaaccaatgagttttgaatcggaagcttctcttcttatcattcgatcgaagcctaatgatattctccagagtagccacaataggcctatgatccgagtgaaacaaatccacattaatgaccttaactgatggaaacaaatcatgccggccctggttacaaaaatagcgatcaagccgctcttgcacatgcgcaccaccgtgtcttttattaagccatgtaatccaccaaaaaacacttatccagagcttgttggaactcattcatagccgacatgcgacaatcagcaccacccttcttcgtatttatggaaagaatttcattaaagtcaccaccacaaacccatggaaggtcaaatatatcattaagctgacacaataatctccaagattcggatcggcacctagccttcgggttcccataaaagccactgaaccgtcataattccccacctggacacttcaccaaagcatcaattgttgggttttatgccctaaataaaacttatttcaatataatcagatttacttattaatatagatcagaaaaaacattaaatgttgcatggttcacatgatttatttcatgattatatgtacaaaatgtatgaattcatctgaaacccttttcacatacttgatcctatttattatgttgtcaacacattggaaagta

SEQ ID NO: 395779 - DNA, 619 bp, Cannabis indica
tttcacagggttatacaccaacaccagttgaaggttattaaatggatgagatttcttcatctcaacttatgggaatgaatgtatgggtattattttgacatgacaatatgtataaattgttggttatgtaagtgtagtctgatatggataatacttgtgtccgtgtgtgaagattaactatttagcttatttatgcgctacgtatttatggttaggggtaaagtgaagacctcttttgaattagtctttgcactctattactaacacaaatcttctaaagagatcctctacaaattaatcttctgaaaagattcactgcaaggttaatgaattttgtagtgattgcacaatgaatgtttaaagattaatgatacatgtacacataaatcacaccaacacattttactcaatcatttttatttaagatagttctacttattgtaagtgaccagattgtgttaattttgtggatgatttatatgtacatatattattattctttaaacattcgatgtgcactcataggttggtatttatactcattgctgtttttcaaaatgacgtcttgatcgcataccctctatattagaccatttttagttatatttagtataaaaat

SEQ ID NO: 395780 - DNA, 703 bp, Cannabis indica
aaacatcaacatagaaaaatcactgttgaaggattcagtgattcaaattttgaggggataaggatactcgaagatcaacatctgcatatcaaatttttgtatggggaaactatgttagttgaaaaacacagttacaatttgtggtagctctttctactatagaatctaaatttatggcagctactgagaccataaaagagtgtttaaattcaagtgatgcagaaatatcttgtgcaagaattccatgtagcatgacaaaaccaaacacatagacatcaaatactttttcataaagaaaaaagtatctcaagctcaaggacagatcaataaaaaaggtgcatgacaattcatatgggaaccaaggttgtaactctaggcaagtttgatcattacaaagacttgcttagagttgaaattggctaatacaatttagattactctgaactccctagtggcatttcattcttcttttagttctagtaagaactgatgtggaatttgtaagatcagttctcactaaaactagtgcaaagtgttcattcaaaccttgttttcaataattggtaggtagttagaaagttcaaacctctatatgcactgtgtcaattttttaattctgttttcttttgttcttgatttctagtttctttgcgggtaaataccattttggatcctgtattttgcaaaagttacagattggacc

SEQ ID NO: 395781 - DNA, 571 bp, Cannabis indica
ctcatttattataatatttctaaaacaaaaaactatatctaatttttagcaatatttttaaaacaaaaaaaaaaataaataaataaaacactaactatacagaatcctaatttttttaaacaaactgtacatactaatatttttttttaaaaaagaatccataagttttgattttaatttttttaagaaaataaagctataatactgaattaaatattaaatattagtaggatatgtatatagatttttgcaaatagacccttttcaaatcatattgtaatgtccgtatttaaaacttctaaactcgaaagctaattttattatattataattaattaatcatataagtcgggatcccgagatataaaatacagttgaaactacatttgttattataaaaacctcttaatattattattttttaacaaaagacaggcattaacaaaagcaactcaaaatgttgaaagaccgaaaccctccagattgtactgtcgcgatatgtacaatcactgctgagctccatctcactgttcctccagcttaacttttcctttacctacacaaggtagca

SEQ ID NO: 395782 - DNA, 519 bp, Cannabis indica
gagttttatttagggcatcaaaagccaacaacatgtctgatgctaaaccttctctcactcccataacaagtggcctaagattatcgacctatggtagcatactatttgaagaccctcaactttacgtatcatttgttgttgccttgaaatatttagtcatcaacaaacatggcatattatttattgctaaaaagaacatgttagttcatggctaatccctcctaagcacattggcataccgtcaagcgcatcttaaggtgtctaattggcataattgattatggtttcccaatccattggtcttttctaaatgaaatttatgtcttctatgatgcaaattgggccacttacccagatgattgatggtttacttcaggatataccattttcttttgctcaaatttcattgtctggtgtaatgggctcaccttttcaggcagcggaacacccgtacagaaccttgacttctctaagccaaggtcagccttccaaccatccgagtaataataggattatttt

SEQ ID NO: 395783 - DNA, 747 bp, Cannabis indica
aaaaaaaaaacaaaaatacaacagaatggttaaaataattgttgaacatgtgtaatatcgaaccaatatcagatgcaatcgggctgttatcgcactcaaagaattatatttgaaaataattacaatcgtgccgacatcagactagacatcacaaaaccctaatcgatatactacaaactattggacacatatcgtccaaatatcgaacacataaccctaacactaatctgaacaagccatcaaacacctattgtctagacattggacccatagatatcagatacatccctaaccttgaaaatgtacataccatcagacacaaatcgggccctatcgaaccctattaggacatctttcccaaccttaaaattgaacaaactatcaaagttccatcggggtcgtatcagacacaatcagactaatcgagaaaaacacaaaaaccagaaaaacaaacatttttcaaagaactatttccataaaaaaatcagcaaaaaacagcaacaacccaaagatatagaaaacatctaaataatattctaaactaaatataacaaccaacaacacaaacaaacaagaaacatcacctacccattggttctgtcgatgatgctcgtgcttccttaaaaaaaatcccactagcaatgtaccttagatgtgagctcggagtagcttggagtaactacaatctttactctatgcaagattttaggtgtcgtttggttacaaaataaaaatagaataggaatg

SEQ ID NO: 395784 - DNA, 654 bp, Cannabis indica
agcaacaagattatctccataaaaaattatgaagccagaggttgagcgttgatcatctatgtcagtggcccaatcaacattgcaaaaggcaacaatttcttgtaaggacgaccttttgagatgaaaaccatgattgatggtaccactgagatatcttaaaatcctcgtcatggctaaccagtgacttaattgaggatccttcatgaactgacagactttattgacactaaaagagattttaagtcttgtgattaggaggtattgaagtgcaccaacaattgagcgatacaattgagtatctgaattaggttcactgccatatgcatatagtctgaggctgctgaccatgggggtagaaaaatggtataacatcgtacattttagccttaaaaagcaggtccctaatgtatttagcttatgataggtgtagaccaaatgaggttgattgaacttcaatgcttagaaaatagtgtaaatccccaaggtctttgaatgaaaatttgctgtcaagagcaacaaccagatcttgaattgccttattattgctgccaattacaagtatgtcgtcgacatacactaacactaaggtagtgtatgtagaggtttttgggttttatgccctaaataaaactctttacaatctgattagttatc

SEQ ID NO: 395785 - DNA, 586 bp, Cannabis indica
tgtgattatataggaatgtgtatgtatatacgaatatatatttgtgattatataggaatgtgtatatacgaatatatatactggcaaagaaaaaaagtatgcagctaaatgattttgagtgtttatgtacggctatatatagagaaattaaaaaaaattaaactttatttgaatttggaatattttttagaaagatctattatattatcaaatattttggtttaaaaaaaatgaaatatttatatttcagaaaaaaaaaaaacgtaatacgtatataccaatatattctatcgacaatcctgtaggtaaggcctattatatgtttttttatgtaaataataatcatacgttttgtgaaaaaatatctatttcttattaaaatataattactttctagatattttaatttagatatgtattcaaaacgaaagataaaccctagtttaaaaaaaatcaaaatacacccaaatttaaatttaaataaaaattatcattaaaaaatagtattattaaatctattgtatttgaaaataacaattgttagggtaaatactatttgggaaatttgattttctatacttagaaa

SEQ ID NO: 395786 - DNA, 830 bp, Cannabis indica
ttttttttttttttaatttagacctataatagaagtgggccttaggcacagcctaacccaccttagcctagggccgtccctaatctaaagggaaacttacaaaaatactagaatttgggttaacttttacaaaaatactgtcatacagaaaagttttcaaaaatactgtgtttttataaaacactagaaaaatacaaaacagaacaactcaaaacaacagtagaacaataaaaaaacaccagtagaacaccaataaaaacttaacacagtatactgcaatatgaaacttataaaaaaatatagtacaatagtaaaaataccacctaacagtacttttataaaaaaaataataaaagttaatatactatataaatttcccaatctaaaacaataaaactaagagagttggcaatatcattgttactcccaattaactctataaaaatcttatcctaagtacttaacattatataacaaagcgaattttctaaataaatctatggatagaagtctatccttccaaatgataattatgagtgttacaactacttttggaagtgagtagtattttttatatttttataaaattttacataaaaactctcgtaaaaactaacagaacaacttaaattgtaactaaaatttgttagagattttattatcatggaagaaaatcaagatattacaactttattgcaatataatacaaggatcaataaaatagattaaataaatgttacaatacataatatacaatatatatacactatatatattatatataagaaaggtagaagaaaatagattacaacatatgtaatataatatat

SEQ ID NO: 395787 - DNA, 646 bp, Cannabis indica
catagcatacgtgcatcgcacgtaacaatatagtagtatatatatatatatatatatatatatatatattttgagtgtaattgtatatttctttccatttgagttattaattaaaagggaaaagagtatttataagtaaaagtattgactcagcaaattgaaaaaaaaaaaaaaaaatatcatgagtcactcactctttaatacatataagaatgatggcatgggaccctcctatactacagatgaaatattgctattgctaaagggcaacctagcatttttataatttttaatattttttcaggttttaattatttcaaatgaaaaaaaaatagaggcagcagtttggccatggtaaaaatgcaggaggtaaaaaaataatataattattaaggaatagttatggtgaaacttttttaatatttataattgttacacatattatctcaattaaaaaaaaagtaacagcaaaagtattttatcttatgattttgttacagtcgtactattttttagtcgttaagtattagtttagaaacatatagcgatatattattggatcacgtattaaataagcttaaaaaatagggattaattctcacaaataaaacaaaaataacaaacaaattacaaaaatacagtttta

SEQ ID NO: 395788 - DNA, 1401 bp, Cannabis indica
ttagagaaattctccaagtttttgtagcttttgaacaaattagagttggaaaaaattgatttgttgctctttataattatctattgcagcaatatgttgagaggaacgaaaaggttgttgagcttcaatggtgattttgaaggttgtgtttttgtttagatcaggttaacgaattttttatttttagagcttcaatcatgatcttccatgattaaaatcaaattttttgttggttgattatttgtttttttttttttttttgaaaaaatcagtttcaatttttttggtagatctgtaatggtaaattgaaagatggaagatcatgtgatttgttgatcagtcgctgtgtttggctcgattattaaaatcggttgaagattctgatgagttttttgtttagaattcatggagcttcgaatgtagagttgcagagctataatggcggtggtgaaaattggttctcattttttatattttgtgatagctgtatatatatgatttgttataagggtgtaatgtgcataaaaattgtaattttgttgcaatttaggtatattaataaaagttaccattttttttaaggtaaacactattttggaccttgcgttttacaaaaattaccgattgtaccttgtgttttgttaaataacaaaacagactctgtatttttcaaaatggtaaaaataggaccttgagcttaatttttgacaactttttttttaatataaccaacttgaagagaattcctaacacgaatagatgcagaaaatataaacagttttgtcataacacctttaaatcggattattattaaatttaattttgacaaaaaattagtttagggtcctatttgtacaattttagaaaatacaaggtctattttgtcatttaacaaaatagagggtccaattagtaatttttgtaaaacaaatggtccaaattagtatttatctcttttttttataaatatatagatttggtattatatctattgggctactaaaaatattacacctatttttgattatgaactgatatctaaaatgattttaaattgaaacattaagttagtaaatgtcatttttttataaaataaagaaaatagtcaaatataataaattagttaattaaaattataaaaatatatttattacatattatttttttttaaaaaaaaatacataataattaaattaagttatataatttttttagggttcgtttggtacgccgtattatactgcattgtattaaattatattttatgtcaaaaattttaaggtaagactatgtgtggtattaacttttatagacacctaaatatataatattttagtataaactaaagtttaacatagtgttatataaaaatattgatatataattcaattcaatataata

SEQ ID NO: 395789 - DNA, 528 bp, Cannabis indica
tctttgaatgtccgtcttcaacagctccgtttgtctcccctacatcgacgatcgtctctactgaaatcttgaccaccggtgcttcatctccaccgatcgctccgctaccacctgaaatcttgaccaatggtgtctcgtctacgtcaaccattctgctgccatctccgtgtcctcctggattgtcttctttgccattcttcacatccattcttctgatgagcttcacatcggtgtctttggttttctctagtttttcagctcatcctcccgtggctccaacgacatctctctctcttttccacctgactttcgtatttttgatactcctcttatgaatcttgatcgaccttccattgatgaacgcaatccatatcatctcgaaactggagacaacctaaatttcctcattgttcccttccaattgattggccaagattatttccagtcatggaagcgcgctgccacgatcaatctgactaccaagaataaaactgtaacaccctaactaatttaggcgtgttacatgat

SEQ ID NO: 395790 - DNA, 2832 bp, Cannabis indica
agatgaccatatcaagtaataaacaaaagaacattttctcttaagtgaatggccttctcggcggaccacgcccaaaggttcggataaaattacaaagtactcaagtcagatgaccaccatctgaagtacaatttttaattcctgcaatttgttttatttcattttaagctaaagatcaggttagatcaatataatagctttgatgtaagttactacggtaacagacatatttttgatcaataaatgaataaagaagtttatttcaaaattcaaactgagtcgaatatattagcattttattaatttaccatcaagtgcgtacaaaaggtttggtcaagcccaaaactctggacaaacaaaaacgcacacttgaaaaaaatataaaagtgaccaagagtcataagtccgctcggtcacatggggggcacctatacctgtacaaagcatttggtaaaaattaaacaaacacaattgcacgatgattataaacagagaatgaaattcattaaagataacaaaagcatgtaaaaccgggattaaaggctgcccgttcagctagttgattgaaaaatgaaaaataattccaagtttaatgactgcttggtcagtcactttgtcttcaaaaaggccttatggctgaacagatatataaaaaaagagatagaaaaataaagtattcaaacggttggagtcctaggctctttgtacgggtcttctgggtcagttggagctggtggatcgtttctttgagcgtggagcacttcaacattttggtcaactggagaggtggaagtggtcgcctcggagtccccaaaagtgagtactcgagaaacatgtctctggaatcgcccaagtaatcaaagtttgcttggggattggccttccaaaagtcatagaaaatcttgagaccagctgtctctaaggcattcactttccctccgagcctctccacttcagatctctactgcccagcctctgacttatacttctcaacctcagctttaagctcctcctctatggtcttcttctcttcttccaacattcggaaaacagctcggagaacctccctttcttcctgaaggatggtcacttccttggataaagaggaaatggcggcttcaagctgatcggtggcttgaagatctttaattattttggccaccttcttctcagtagcaagaagcttcttattgacctctgccagctccatccgaaaagacccaagttaaaccctggcttcatcggcatccttcctggccaagtccacttctgcctgcatagtgttggaaatggcagcattcttagaggtagccgacttagctcgggaataagcataagtcatctttatactggtctatacaaagatagaatattaaaatccgaactaagagaaggacaaaaggaaattgtcaggaaagacatacacttgtaaactccttcaaaactcctcccatcaccagctccaaagaaaggtcattgtctgccccagcaagctgctcgttcacctaagggactgaccgagtcacatagtgactgagcctttctatgtctcttttggtctatgggtgcagtatcggacgttgggcaggggccttgatcagctcgaatccgtccttcgactgctctggcctgtttgagctacctccacgagaatcctttgacttagtcatttttgggacaggagggtctgcaatgatttgctcctcggagaggtcaatgaccacttcagttggtgccttctctttcgatgggattgtctcaccgctcttggacttcttagccagagcttcctcccactctcttcttcatagcctcaagcattttctgagatatgtctgcatgaaatgaaagtaacatggttagaaaaaagcatgagaaatataaaggcatgataatcaaaaaggttaaaaacaagatggagtaccgtgcactttggcaggggcatctgctcgaacaagtactgaaggaacattgtcatccgacgagtctactttctcctccaggatggctttccactttccttctataggggtggatggccgagcagatagaccgggctccctgatctggatcgaatgtttgatgggcctgtgcccggtcggaagtttcgtcttccttttgagcggtctttcttgctcctcctcaacctcatcctcctgctcagaatactcttgagcatgttgttcgggcccgactcctcccttcaacttagcctcgcggttaagttgaataagctccttctccttctcagaatgctcctgagcatactgcttggctcctacaccttccttcaacttagcctcacgcttcagttgaatgagctccttctcctgctcaactccctcagtccgactagcactagacttcctctttttccccttcacaggctgaggtacaaaatctgttggatgaagcacgtattccacaaagttggcctctgaggtcaacagagtaatattctgagcgtcatccgacagctgaacaatcctttgagctttatccctaagagccaacgtgaagggtggacggtaatatgtagggatcgactgaaactgagtgtaggtggtgcccatgccttctaccatgtaatagtcatcaaaaaaattccgaatttggctcacaaccttatccatggtgtccgtcaaccacttgaagtctggctaagagaagtagaagtaccatgacttgccttgcttggggtagacttcaggtgcaagaaccaactgacctcgtgtagagatggcacgacccacatctcgatggcgtagaggacaaacagggtagacaaatacttaatgcccttgggagtaaactgtttgaaatattttacca

SEQ ID NO: 395791 - DNA, 590 bp, Cannabis indica
agattctttaatggtggtcttgactactactagttttcaaagttgaagatgaagacattattataattttattaagttttgtgtgtttgtttgaattttaagtttatgtttatggtttttaagcttatgtttatgaattttaattataacattgaagggttttttattttacaatttatctaaatgactattaattatagaatgaatttaattgtatgttgttttaatttagtgtttgcaaatattagttttaaatacattaaaattattatattaattttgaatatattaaaattattagttttagcaattttgttaataaacgagtccccgttaaggtttcaattaccaacgggaaatccctgccccggtccccgtcagggagtatgcgaagatggtgcgggaatggggaaaaaatagggggcggggacgaggacggggcggggaatgcactccccgtaccgccccgtccccaatgtgcatccatacttgtgcgaccattctagtgcaatagaaaataattaccttttgagtttattaaattgtagaggagttttttttagtgtagcgtaatgatattttataatcaa

SEQ ID NO: 395792 - DNA, 1230 bp, Cannabis indica
aaaattaagtgtactataaacaataaatatatatagcttagttttgaatgacatattatacaatgtcatgtgtttgaatcccaaaatactctttttcaattatttttttatatttatatttccaagggccctaaaatctaattcaccttaggctcatatattctcagggctagccctggaaagtgagtattacacaagtgtttctaaatttacgaaccttatttcgtgccttagcctgtaagaaataaatgcttaaccctttgcatgaaggattatcattatatttataggcttagggttcttgtctgtaaacattgtccactaatggggtaaatacaaataacatatggactttgtgtccatctggtgcaattcggcccatgaggcattgattttctggtaacgtggatgccacatcatgttgatagttgtcaaaacgtgtcatatcttcatggattataaagacacataaatgcttgattgaaaattaccttatttttttattcaaactacttgattctcggatatgctcttgagaataaagtcctgatattgtgggatttaataataagtgagtgagatcccaagcttgacatttggaggctcattaattaccaattcaggaacactgcgttgtgctatccggaagcctgctttgctgggtctttatctcgcttggatgaggtgtttgtgcagcatccgagtgtcttgacttagataatgggtccggtcaataatcttgattgggcctacatttaggcttgtataagctgaattaaagtcttggaattacatgtgtgctccttccacaaatacggataatatttactgtaatatctcagaaaataaataatatttaaataggcatattttattaaatatgtaattatgttggtaatgaagtaagattatgatcttacttagggtaattattgagaatttactcaatgaaataaatagcgtaatttattaattacggagattattttgggatatgtgagtaccgaggatatcaattttgaaataaaatattttttattgggcccgacaattttggttagaaatgtcacgacatttatggaagaattattttgagaatattccggactaggttagaaattttagaatgtcggtttaatggaattagcaaaattacaaaaatgccctaggttattttaaagttttattttttttcattggggtaaattagtcttttgccctttttacttt

SEQ ID NO: 395793 - DNA, 642 bp, Cannabis indica
atggactatgatccttctaagttttgttctcttaacttttatttgttgtaaagtttttgttgaactataaaaaccgcaagaaatatccttagttccattatgttctttttttaaaataatttattgatataactctatcgtgacgttaatatagtccacttcaagaatccagataaaaaattaatacataaatagtagtctaatgataaattacgaaaatattattatgtatatatattcttagagctaatatttgtatgtttaatattaataaattgaatttcaattagcttaaagctgttaaaaaaaacaagcaaaatgcaactggagggggatatttgtaatgattagtatttttgatctcgcttttagacaatgagtcaattaaagtgattagaaataataaataataataattaagcaataagaacatgaatttgttatagaggtttgaccctgtgatggtgttaataacttactccccttttacttgtattaacttgtgagaaaagaagcaagaagttcttaatctttctcgaaagttttcataaagattttagctacgtaagtgctttattgaatgaatgatttcggatcccttaatagtaaaatagctctactatttatatggaagaattacat

SEQ ID NO: 395794 - DNA, 745 bp, Cannabis indica
agtattatgaattattagcaatagaatacacaaacatagaaaagaatagtaaattcatcaactatattttcaactaataacatgaatttgccttttagtgtagactttcattatgagttatatgagcagagaaacttattaatctattatgatgttttttaagtgttatagaaaagacaacatgttattatccataatataatagtattgataaagttatataaaagggtctcttatgggacttaataaggcattagagaagtgatatcatagggttgttcaccaagggagaagactattaacatgttcattgatgccaatggatactgaattttcttttgtttaagtctctaaatcatttcaaattttaatacattttaaatatatacttatgtgtttatataaaaaaaaaattatccaaactcaaaataataattaataaaatatgtttagagcaatgaataatattttataaatatagagcatgaataataaattttaaattaattttaaaataaaggaatttaaagcaccccaatcattgaggtaaagctgtttattcttcaaaaattcaaagaactggtgaaaaagctcattccataaagtgagtcaaaatatttttaaacaggttatttttcttatttaatattttcgactcagatcccaacttgaaccttgacacccagactcggaccccaaacctcgacccggactcagacccgaacctgtgttggaaattatttta

SEQ ID NO: 395795 - DNA, 833 bp, Cannabis indica
ttcaattcttccttcaacctcctctgaatttcatttgagttatcaataccacatttgttggaagtgactccctcaaagatctcttccgttatcttcgaaatatcaaactcatctgatagagtaacacatactcttagcccaaaatgcttttgtacttgattatcatcataaacaagttgagcaagagtagatttactcacacaacccatcccaacatggatgacagaaatcccattacattcttttagcaacatgtcgacaatgacttaaggagtaggtgtcctttgagaaggtttggattgagaaccttctctcaggctaagagcatctttttgatcaacaagaatcttaagcttacaaagaatctcatttccaccaagcttaacagatttattgaatttagacatgaaaattgacatagatttcaattggataaataccttggtaccaatactctagttaaaagtaaaattaaaaatttagccaaccaaagtaaaaagaactagcttttacttaaataagcaagcttatttggcatatagattatttggcacacaggattagactggactagactagattattcactagtctagtgtttggtcatgttagaggattgaataacatatacaattaatctcatttgtgtggaattatttatcctatctagcaatatggataaataaccctactagtagaattattttttttattatcaaaattttattttaaaattaataaaaatatacaattgagttaataaccctgctagcaaaattaataaaattttgtttatactataattatttattattaaaatatattttaaattt

SEQ ID NO: 395796 - DNA, 767 bp, Cannabis indica
aactaacagtaatacgatattcttgttaaataactaactcttgtaactagtgttaggaactggtctatgtcctataaatggacctgttctcattcattttaatctttagggcaacttcctttgctaaaaaatcttttcatctcaagatgcaattcagtagtgacggtgggtgctgagttttatgggaattgttctgcgagaaagccattttcatcattttaaacactaagctttaggtacatgtcatcattggagcaatggcattcaaggcaaactgaagaggcaataacgtataggaagttcaaaacacttatgcatatttcaattgtcacatattacttacatctcactatgtttcttctgtttttcattttagacttttttcaattaaagcttgtatctttttgttgctttatgtaagttattgatatgagagagctgcaaaagtggaaagccatatgaaatgcatataattaattattaagtagaataacatttgttatccaatcatagtcatatacttgtagagaaactcttgttggtcactaaaatcaactgaaagaatttataattaataacaatctttcctaattaattacttaatggtaagatttgcaatcatatggttaacaatttaacccaaatcttttttttagaaaggcatgaaagagtagctccacaacatgaaacaagcaatgttggggttggtgggtggtggatgtttttgggggtagtttctaggcagcgtgaagaagaagaagaagaag

SEQ ID NO: 395797 - DNA, 1036 bp, Cannabis indica
tatatatatagagagagaatataatgtataatttataacagttaaagtcgtattaaagtcattttcttttaggcacactatccgatattataaaacaagattcaaactcagcgttatgtaagtttcaattaaaaaaattattctgataattacctttttgaaaaataatttttaacgatatcataaatataatgttctaagatcaaatgtaaaaaatgagttatatttttttgtgatatttttatattaatttttattattatacttcaatatataattgtaaattttgatgacaaatttaatatgttatttaatatttacttaataatttattaaaaaatatagaataataataataatataaagttaaatgtaaaatttaataataaaataataataatataagtcatttaatgcaaatgagtatgttatagctaaaatttaataataaaatattaaaaagaacataatgcaggtaaatataaaagtatagcatttattgcgatgcaaattttttatcatgctatattgtaatgtaaatttggatcacttttgattatgtgagatttttgcatcataatttagcacactattagactagacttttaacaatgaaaactatattttatatttgcatcacttatttgtatctccattggagatgctgtaatggttctacaatgaacacattaattcaggtgcaaactcaggagcaattgccttaagagcactctcataagcttttctattctatttttaaaatacatcactattttttttttattttaaatcaaatttttacattaccccatatatcaatatctttaaattaatacttcaccaatatttattttttaaaagatttaatatattttatttatttcaaatatataatattaatatatacacatatcatcaccatgtaaaagaattactcaaacataaaataattaataaaatatatttagagggatgaataaaatatgctagtaatatagtattttataaaatatgtggcagacccagaatttaaagt

SEQ ID NO: 395798 - DNA, 946 bp, Cannabis indica
ttacaaaattatttttacttttttaagtttgaaaaagtaatataattacaaaaatatacgtttagtttctctttttttttgtaatccatggaaagaaagctcggccagccaaagatcttgctgtctttgctacagtttttttgcagaattatagtgcagcgcagaaatggaaacaacctgctgctggtgcttctgcaatcgtgaatcttggccagtcctctcacgcgacacctgctcctattccatggaccaaactgccggttggagctttcaaactcaacattgatgcaactgtcaatgcctcttcttatgttgctggtgtgggagctgtccttcgggattcaaatggacatattgctggcctttcaatgccgatcgttggtaactttaaatcccataaaatggaagctaaagctctctttcactgtctcaattgggccatacaaaacaacttcccgattcaacaaattgagacggatgcactcatggtggctaatactttacaagttcccttcaattcaaattctgaattttcagatttaatatttgatgttgttagtcttttatcctttttccaatataattgtttcatatgttaaacgttctgcaaataatgtggcccatggtctcgctaaatttgcattaggagtggatgagacttgtacatggttggagactatctctccacctatatactctgttgttgtaaacgaatctttatttgtttaataagaacaagtattttccctcaaaaaaaaaaagtttctcttttttttttcctattatgtcttccctcctttcaagtctcacgatttttctgttaaagccgatttctcaagctctaagccttacctttccaccattgtcattcaattgatatttgtaagatcatcttcttcttcttcttcttcttctttttcttcttcttcttgaaattacaagaata

SEQ ID NO: 395799 - DNA, 1182 bp, Cannabis indica
tagtaaaaaaaaaaatgaaatgatatatttaactcttgaagataatcagggtattgaatctttttgtaagttttatccttaagatgtggtggtagatctagaagagcacagtgtgtatttttttatcacaatcttaatagtgtacgctaattaggataaaactatatattgcattcttgagttttcctcaacacatgagcaagatcaatttttttctctgagtgaataataataataataacttaattgtttatagatttcctaaactataagtatatatagatttaggatatggcgatatataaatttaaactaataaaataataataaatatttatttaaattagatatttattattttaaatatttgtaaccgattctgttatagatatctattttgaattagatattttagtttaaattaaatatttaataattgattgaggggatctctcaaccacttgagagaatattttaaccacctagagagaatctctcaactactttgaaagaatatctcaaccactataaatatctgcaactactttttaaatttaaatttaaataaatttttatcttttgaattaattaattaatcaaaaacaaattgagtgggactcatcttatctgatagacgcaaatcattgtgtcattacaaaatgacacaatgaatggcgccaccattgtcctaaacagacaatagtgatgtctttgtcctgacaacactttgtcttccccaatttatttaaataataaatttaaaaactatttttaaataaataattactatttttctaattcaaaatagattttttgaacatcattatatagttttatccatactcttgacaatgttgcaatgtggcaatttggggaccatacacctataatgctaagctccaataaattagatcatttgttaaatctcatcaaccaaataatcttatttattaattccatgattactccactatacgtatggaattgaactgtcagtaattataaaattatatttactaagtttaattataatgttcattgatataatcaattccatttattagccttctttatgtcggttcataactagtttcggttaaattaccgttttattcttctaattacttctttatcctttagtaccattaattcactattgaaagtataattaagatccaaaaa

SEQ ID NO: 395800 - DNA, 858 bp, Cannabis indica
aaaaaaatagttaagtcttacttttgttaaagcatgaaaacctcttaacaagaaatctttaatatcacaatttttatattagagaaaaaagaagaaaacttaagctgttttcatatcttatctgccctcgaacaatgcagaagggatgagtgttagagtcaatatggttaagacaaacagaacaacaaggggttattgagaatttttctggtgaaaaggttaaacttagaaggaaggagatgatgaaaggctttttaaatgaagtgtttgatttttggaaggatattagaggaccaaaccgatttccaccaaagtgttaaaccaaatacttaattaatcagataatggctgcttaataaataaataccacctcaaaatgaaaatgtacaaatcacactatatatatctttaatacaaatacatacattttaacttggggccggttcaaacacaatactgcactcctattttttttaattttttttaattttttaagtgtcagcactaggacaacagtaactgaccatgaaatacttgtctaaagctaaaaatttataataatcaaatccaatattattacaacaatacaacctaccaactaaattaagtttaacaaaatattaattacatttaatgtccaaattaaaatagtttaaatgatactaatgtaggattggcaacatggaatagaaaccttgctagagaataaataaacaaagtaataataatggtaagactaatgatggttttgattgaaagaattagtgtataaggagctgtttttttgttttgttttatttttttttctaaagttcctatttactttcttttgttgtcattcttataatgaacttaatt

SEQ ID NO: 395801 - DNA, 1126 bp, Cannabis indica
aatttatactcatgtacagatccctcccgaagctaagggttcttacttcaaaaagaggaaacatgttgagaaagatcaggctctgtcggagagtgggaataccaagaagccttcttttgcaagaacctgcctcaatcaaaagttcaaaaactttcatcctgttgaagtaataactttgagctcgactgcccctgtttctactatatgcccactaggtctagtcaacccttcttctgggtttgcccctccttttccttattagacgatgtggatcaaattgtatataaccccaagtccattcaatctattctaatagactctatggctgttcatttttagagtcaaataaacattattgattatagaattgattcagcttcaacgacttctggagtagaggcgctttaaaaacatcttcacaatagagtaatgaagtcacccactttcttcctcttgatattgatgatatccctttagttcaatttttttacacaatatcctaataatccccacttctcaaatttttctatttttttggtcattctgaaactatatctgtctcattcgatgttaatagttcgcaacccttcattacctcttctagatctatcaccttttcttccatacccaccttacctcccatgcctccaaaatttaaaccttcaccctcaatacccacaaacaataccattgcccctagctcttctgttccccttaaaatttccacgactaatgtcgaattgatggtgaccactaattttgtccctttcaagatcttctcatgctctgagttcatcctgccccagaattttttctcattccttagagttacaacacactatttctgaccaacttgaggttgaaaataaaaaggtgtatcaactttgcaaagtgattgaacatggtgtttgtgctctattcgaccatagtttctcagccaactagaaattattttctttggttgctaatcctccttcaaattacaaagctcagtgtgatgcacttgttaggttgtttttagcattatttttaggttaatttttagtgtgtttttaatttagttctactcttgtttggagtaattttacgctttttattttttatttttgcagatttaaatagaaga

SEQ ID NO: 395802 - DNA, 701 bp, Cannabis indica
atttcatctcttccaataaatctcagagccatcttcgttagaagcccaccaaaaatttgccattattaatttgagttgattgtaaaaagtttttaataagcagaaacaactcatgacatatctcgatatcaattgcactgcaactttcaataggacctctttcctcctaatagaaaaaagttatcattctaagcatgtaacaatttccatatgtttttctttaatattattgaatgattctttttatttttttctgaataagatcggaggtcaatgtaagattcatggcagctcaaatcaacattcccaaaattttgttgaaaaatattttttcacctattattgtattagggagaaagacatgacaaattttttagtgttagagaaactgtctagaagctttatgatatacatttcacactcttttaattactaagttgagctccatgtgacttgataaaacaataggttatgtttaaattcctttagattgcttattgtttcttgagaagagagcctagaaagtaagggtgttcattcaatccaattcgcactgttttactcatagtacatctaatccgcactaagtgtggattttattttttgaatccaatccaattcgtacaatagctcaaatccaatccaattcaatctgtaaaagtacagattggatcggttattttagattggttactttttaa

SEQ ID NO: 395803 - DNA, 1176 bp, Cannabis indica
aaaaaacagtttatggggtaattctccttatttttattagctaatttatcatatttgactattttcttaatttttttaaaaaagacacatttactaacttagtttacaaatttaaggtaattttacatctcagaccatttatcaacattacactaattagaatttttactcccttaatttttattggtgccaaatcactttttcagaattttttttagctgctaaatattttcattgaactaatgagattgttagatttaatgacatttgtccaggttcattcaattttactaattatatgattgttcatataataaattatgctctctagactttaatatctaccaaattatgttcctgaaactttaacatgttttaaattaaaccactaaactttcattcatgttagactttccttattaacattagaaaaaaatatctttaaatctaataattttaatatttcagaaaaaattgttaacggccttaaaaattcataaatataatttagtacatgttaaaatttaaaattaagtgccaaaaattataattaacctaaaaatttattagtcaactcgaagagtattagagggaaaaactaaaaggcaaaacacgaatattcttgtggttgatttcatataagaaactgaagattaaattaaacaaataaaacataaatatatatcttatttgatgatataaatatatattaatttaaaacacacatatttgttttagttatgtgttggaatatatataagggagtttgggtgttgttgttggctgtgatttgccgcagacatattcgcaataaccctcgacacaattgcaaatgaggcatccattacaggcctcttcgtcgcaatccctagaatctctgcaagctactttcggttcactaataccatccacaccatatcctgcatatttttaatttttacaccattttatttatttctataatataattataatgaaatattaaaacacactttattaatttatttcatacgagaaaccacaattaatttataaaatatcacattggtttgaggttgccaaataacaagacttatatattatgctttactggttcattacaacaaaacaacaaataagaatatgagagagagagagagagagagagagagagagagagagagagagagtagtagt

SEQ ID NO: 395804 - DNA, 553 bp, Cannabis indica
atatacataaagtacaaaaaaaatatctaaaatataattttaggcatatattttttttgttcattttaaattctatactttaaatttttaacaaagtaaaaaatcacatacaatttttaatataatttatataattaaatatttttatgtattaatatttattttttaaaagataaattatatttcttaagtttttaaaataattaaaagtaatatatataaataaaaaaaaatctaaaatttaattttatacattaatttgtttttcttttttacatttaagactttaaaaaattattaaaaataaacataaaatatttagagaaaatgttattgtactcaagtgttgtcatacacatcccacatagattttactatataaaattatttatggttttgaaaaaaaaaaaattaacgattaaattacttaattcatttaaagaaaatatatttaattcaaaatttaataataaaaaataattaaattatgaaatgtacatatcataaagatatatatatatctattctatataaagtgtgtctatataacaga

SEQ ID NO: 395805 - DNA, 531 bp, Cannabis indica
gtcaatgaaatttcttctaatatttttgaaacccgtgtctcgcttaactttataatatacttaagaaaaagttttgcaagaattaatggaaacattgaattagatttttcacttttgttaaaactttctcttatttgacaacgttgataatataatatgcatgcatggatggagataattagtagatatatatacacataaatatctcgatatgaatatatgttatgcatgacgtacgtacacaaatgaaatgaactagaagcaagaggagtctctatcaaattgaatttataaccaatatgtcacaagctcaacttttaaattaatttcattgttaaacatgtggaaaatctcgtgaccatttctaaccttttaaatttcagttccctaaaatggagttcatcaagaaataaccatattgcccttaacatatgtgatctccacacatataaataattcacttgcataaatatttcacaaattattataataatttacgttatgagataactaatttattatataatatat

SEQ ID NO: 395806 - DNA, 505 bp, Cannabis indica
ggacaaaacaatatacaacttaaattttttttaaaaaaaaaaaaaaaaacctagcaatactaattaagttcatgctttataatcacaacacataggaagaatattgtagttcttaaactaattggttctatgtagaataattatttgatagacctttcacacaaaaaaaaaaattaatatgtatattgaataccaaaaaatccatcgaaaattttgtgagtaaactaatcgtttgaatgtagattatttatagataaaattaagattctaacttaaaacttattgacattatcatttcctctacgatagtatcacattatctaagagtagattaattatgaatagaactgaaatttcaacttaaaatcaatggttgctgagggaaataacactttccttataagagagtggcatatttttcatatagtttgaaaacatttaaagaattgaagttaggggccaccaactctcttcaaagctctattttgttgatcaaatacttaat

SEQ ID NO: 395807 - DNA, 1094 bp, Cannabis indica
tttgagttgaggatgaataaaaaataccaacaataacatttaacaaaaattaaaaaaaattaatttattttttgaataaaaaaaaaaacatttaacaaaatgtaattagttgattggttgtatatgaatcttcacatggatctttggatgaatgatcatgatgataagactacttcttgatgacttttgttttttgttttttgtaaggcactttctttaagactttgaattgcattatattctaaatattgaaaatgatttatacaataatatacatatagttatacatacaaaaaaaaaaaaataaatagcatatactttgtacaatatataagcacaatcaaaaggaaattacagctacccacattaagttagccattttaatttttacactctttttaatatttcatcttttttatctatttttatagttaatatccctataatattatttcttcaacccaggacttaattttcagtctttaatgttataggtgaatattaggcaatctcattaagtaaatataatttaaatgaatataggttgttagtgattttggttaactacacaaaaagcagatattcttcaagttatttccacaatcaatttgtctaagatccaattataatatgctcaaaattgttatattggatcataagagtaaatttacaaagggtttttttaacaaatacaatttttcttgatattttatttatgattttaaaatttaaaattttatttgcaaaaaatataattttgaaagtttaaattataaaaatacaactttaaaaaaatataatttccatctactacattgtatatgtataccataatgtagctgcacgtaattacaaatgaattgattaaaagtgggcactaattgcacacaaaattaaaaaaaaaagtaattaagtcgtaaagtctttcaatcttttagattacgaccagacccgaacccaaatcccctccctacggccctggcgctaactcggcttttgacttgaaaccgaattcgaccccggacctagacccaaattaaataaaatcaaaaaataaaataaaaatgaactttacagaacacacttttgttttc

SEQ ID NO: 395808 - DNA, 1725 bp, Cannabis indica
aacaaagttaatttattttactttttcatacattaacaaaaactctgtacaagatagatcaccaacccgtatctctacttagttgctttctcactttcactgaccttccattggatctttcaataggaatttgatcatccctcacgcttcaagtctgtagtaacttcagcagaagcccacgtaaatattagttcctgaagtgcttcctttttcacctagaacctggacacaaatatgagtcagtaatcatccacttgtaggtataatctaaaaaagacacaaagaataacagtggcaggacattgagcatgagttattatattatatgcatactaaaaaacaaatttaacaaagagtgtgcttggcttaaagcaagcgattcaataaagacaaaaattaaagcgttggtctaagaacacaagattaaaaatttaaaatcaaaatcaaaatttccaaactgaaaaatataaatctcaacatttgaatcggaaaaagattaaaaaaattaagaccaaatggcggtgagtgaaagaaaacggagttcagaatcgaatccctttctctgaaaagtgaaaatatccattccaatatattcttcatgaacaacctccattgtaagtgtcgctgataaatcgtttttcaacttcgtttctgactttgagtttgatcttgattaaagtttgtatcatttgcatctaattcgcaatttacgcttgtatttccccaaaagagcacaacgattgaccttgaaatcaaaatcaaatgtaattacaatggcgattgatttcctagacaaagaaccaaatcgttctgaagtgagggtgagtgagcttttttccataatgagaatgaagaaccaatacaagccaaccaaacactacgaaccttaaaccttttttttacttttggtatatatatcgactgatccttaaaaattaaatatgtatataaatccaagaatttgtaaaaataacccaataaacttaatgacataccatgggattttgagacgttctggaagaggccattgttgttcgagtggatcgactgggattttgagacgttctagaagaggccattgttgttcgagtggcttcatgggcatccaccaatgaattggattacaatttcgggtgtgttagtagggcttactatcgattgggagtgggaacgacttcgtgtggtggcgtagaatagagaaagctcgaatctatcgcagttattgctcttatatgcacgattgttttgataattaaatattaatgagatttgttttatttttattttattattttattatatataaataatattttatcattttattaaatataaataaaaagtcacctatgaatttctcataaactaaaaattcagttatataggcacactttatatagaatagatataaatatttaaatgtatcttatggtctcaagcgagtattaacccggcatatagctagatcgatgttaagtagttgcaactatttgtatgtacaaaaaatgtgtgatttagtattaaaaaaaatgttacatataacttttagaaatttttacatgaaaaatctattttacacaatttattacaaaattactcacacacgcctattattacatttttacttacaaagttgtttttattacacatttaccacttactcatcattccatgcatacacgtgtgctctccctatccatcatcaatcaaatcctactctcttcc

SEQ ID NO: 395809 - DNA, 559 bp, Cannabis indica
ttctactccctcacccgagaatatcaataagtctttggctaacatcggccttatagttagctctcaagacaccctcatgcttcaaaactaattcactaaggatgaaattcaaagagcttttttccaactcccccttgataaaagccccagggaaaaatgattttaacttaaacttttatcgaaaaaattgggggctggttaaatctgatattgtaaaggctgacctcaactttctcaacttcggagggaacgttactaacctaaacgaaacccttattactttgatccccaaagttaaaccatccagaactattaaagaaattaagcctattagtctttgtaacatcatttataaaatcatttcaaaggttattgccaataggcttaagactgttctcaataagctcattcgcctcaagcaaagcgtcttccttctgggtcgtcttatctagaataatattattgttgcctaggaggtagtccatgccataaaacaaaggaaaagaggaaaggcagacttgatggctattaaacttgacatggcaaaagcctttgatag

SEQ ID NO: 395810 - DNA, 914 bp, Cannabis indica
tgatacatgaatatatatcacttggaataaatatgaattgaatataaaactaagttacttgatatgaacctgttaaagtaaagccgagtagtgcaatgtcagaagccaaatcaacatcagcatcatcaaaaacaatgagaggtgacttgcctccaattctagggacacatgtttcaaattgcttgatgctgcagctttcattatctcacgtcccacttctgttgacccagtaaaactcacctatatattccaaaaactattattgattaataacttaactattttatgtctttaattcacaacaataataataataatgtataccatgtcaatatccatatgatggctaatggcagcaccagcagtatgtccaaatccagtaaccacattaagcactccatcagggacaccagcctatatataattgattagtcatggtcatatttaattatatatagctaagatttttttgttaattaatagatacataccagcttagcaagatgagcataatagagagctgagaggggagtttgctcggcgggtttgacgaccatggtgcagcctgcggctaaggcagggctgaccttagtgaaaaacaaggaagtgggaaaattccaaggaatgatgtgtcccacaactccaataggttccatcaatgtgtaagcttgaagtggtcgtgacattttcaaaacctgtccatggattttatcggctgcgccagcatagtaccggagaagttctgcggccccaggtatgtctgtggacttgcccacactaagcaatttcccagcatcaaggctgtccaaagtggctagttcttctatgttttgctcaattaactctgccaacttcatcataatctttcctctttcctgatatatgtgcacttatattattattaaacaaataca

SEQ ID NO: 395811 - DNA, 772 bp, Cannabis indica
tgaaatttaattaggtaaatattttggtagacgagggatacctcacaaaggacaaaatcaatcacttttttaatctgtcaaaaaatgtcatcgtcctctacaaaatcaccaccgtgaattccacgatgtcgtatcttatccgtcacatccccacatatatataatgagccttgttattgaaggatttttttttatttaaacgtttatatattatatcaacataacttcggactcgaacccaggacctccacttgaactagtcttgttattaaatattaataatacttaatactttctacacatgtcaccttattattagttaacgataatttataaaattattatattaaattatatgaaacccgatatttaattgtactaatatcgatattaacacgtaggaaggtgctacataccaataatgtgctttagcatttctcacatataatgagcattgcttacgcctaatattatagtaatgtgacacattatgagtgattagtaattttttatatttttttattaaatcaaaatatataagacttgatatttaaattgcactaataattctttcaaaaaaaaaaaaacttgcactaatagtaatatactacttctgcacaccacagattaacacataatatttttcatatttatcacagagaaatgctaagtccactctatattttactctcttttacattctcttttataaatgagtgacacgtgtaactttttaaagtatgtttaagtatagttacaattatactctttt

SEQ ID NO: 395812 - DNA, 721 bp, Cannabis indica
cagaacatatggtccaaaatagttattactcaaaaaatattgataatttaaacttattcacaatatatgtccatttacattatggataacaccaagacaaattaatgcactaatttgtaccatactatacattactatcatattatttcttgttattttgcagtgctagttgatagttcataagtgataggagtaacttgtagaacattttttctttgaagggttgcaccaaaagactcaatcatgtctaaatcttcatgtttcaatccattaggaagtatccaatcaaagtgatatagcaacaatgctagagaaagctcaacattgaggagcccaaaagacataccaacacacattctccttccaccaccaaacgggagatattcgaagttgttagaattgtatcatctaagaacctttcgggtttaaaaatctcaggttgaggccaatacgtaggatctcttccaattacccatgcattaactagtgtgttggttttagcaggtatctcataaccattaatcacacacttctcttgattttgtcttggcaataataatggtagagtaggatgaagtctcatggattctttgataactgattttaagtatttcatctcatcgagtgctctctcatttcccaactcttttctgtgaaagacttctctaacctcatcttgtgcctttttcattatctttggattcttcatcaattctgacat

SEQ ID NO: 395813 - DNA, 368 bp, Cannabis indica
atgaagcaagggagtatttcccttaatgtcttttctattcaaaaagcagtagtcattgccaattgactcatgttccaagagtagttttactgtattaacatcttgagttgtgacagcataatgtagagcgtttctacccttattatcaacaacttggcagctatctggacatctctcaacataattataggcattacactcctattgttattggcaattgcgatgtggaaaggtgtcataccatgtttatttttgatgtaggcactgctaccttcatctttttcaatcaacatctccgtaatatagaagaatgaatagttgccgcatggtgcagaagagtacaaccctcctcatcgccttggttgatc

SEQ ID NO: 395814 - DNA, 766 bp, Cannabis indica
aaaaaaattattatatgaaaaatcacatttaagataatatttttggtgatattagatactatatgtagaataacaaataacaatgaacatatttttttttggaagaaaactctaaataccaccttaagcttaaagagaagtgaaaaggaatttatctcatgtaaaataatgctactattacttcctcaatttttttttttggggggggggttaaaaaaattacttttttttgttagaaaaaaagaaattaataacaataaaagttagtctcaaacaaactttcaagaaaaatagtgtataaaaaaatacaaaaaaataatcaataaatgttgttgatcaggaggaattaggaatcaatagagaagaaacaagtgaagcccacaaagaccatagtgggccaatgaacccaaagccaccgagtcggcccaactcgcaccaagagcatcgaccactacaaggcctcgacagcccaggcaccaaggacaaatgagaaggtttaaattaaaatatggctattttcaaattttagaagaaaattaaaaaaaaaaagtgaactattgtacaagcaagggttaacaatattttccatagggttaatttaatttaatccaattagcatatgttcatttaatttgcaaaatataaatttatgtaagtgtaattggattgaattttctctacaaaatatatattcaatatgtttttcattttttcattgatgtcaagtttgaagagatcttttcttattgataatcttttaattttt

SEQ ID NO: 395815 - DNA, 727 bp, Cannabis indica
tttttttaacactatcaaaaatatgtttattttatctgtgttcctggcaagcgacacgtggaatccaagtcagcatcaaaggcccaccagtgggtctcaagaaagatagtgtgggccaaatccacattatctaggatcttccaaaaatatattttagctccatgaccaaatgatcttccgttagtgatagctcgtatccgaaaggagatccagtaccgtgataccagaagagtcaaacagtgtgttcttggaagatcagtctggtttctcttttattcctacgcacaaataagaaaataaatactcccagatctcgacagaagatcgtatcaagctaaaaggagaaacttcctaaacaaagatcaaacaattaattcacgattgattacccataattatagaacacgattttaactaattcaatcgtatctaatctacctagttagcatattatctccttcgtgggatggacttcacaagacagctcaagttatgtaattaagtattaactcccgaatagagtgaaaagagaaactaagtgtaatattataattactataaataccaaacgaattctacggattaagagttgaattctctggtaatatttgctcacggaaacttgagaacttatgctccttgtattcccaaaggcttttcaagctcaaagttacataataacactgactcgtggactaaggctagttaacaccccaaccacgtaaaa

SEQ ID NO: 395816 - DNA, 535 bp, Cannabis indica
atgtcttgtatcaagtttcaataaattactcgtactacgtattcaatattagtgtagtttggggtttggtttggttggtaatgttattaatttaccaatattggtagatttggatttttttttaacaatatcaattaaatgacaaaaatgaatgaactggcctgcttgggtgggaattacttattcttctttgttattatattttctatatatagtgtggtaggtgctatatttaagatctgtggagagtgaaagtaaaagagtatcaacaagaaattacaaaaataagctgtaaatgaattactcattggtgaagattgagactaagcttagctgttgaatgtatttacaacaaccaactcttacaccaatttccctagaattaggggttctgtgataaatatatacacgacaaacaattctaacacaatggcttacaagagcaagtatttttaattattactttgtttttgagacctcattaaaacatgcaaagcttaattttttatccttgtactatatgattaagattatt

SEQ ID NO: 395817 - DNA, 1191 bp, Cannabis indica
aaagctcctcttcccaactcttctctaaactcatttgtggcttcctcgagctcttgataagcaaagctacgcaaattcaagtcaggcatgtttttcagtgatgaaatctttttacttcttctactaccattcttttggcgtaaaaagaagaatcctacacaaactgtggctgccaataaaatattaacaaaaacagaagtacccaaaagagttgtaccaactctgatcaactcatcttggtttttcctcctctcttctacataaggaatcccaactaaggtgatattgtctttacgaactttgataaacgccctcgagttaagattctcatcgaccttgccattcgagagagggagcctcttcttccaacatgttccgtctctaaagatagcaacagcacacaaacaatctttcaaacaagaatctttacaatcatccccattaaaaggcttcaattcgacataatctgataagggccaatctacattgtgcagctcctcaacatcatagagatcttctatgttgggagtaagctcatcttcagcgcagccttgtataaaatcgggtttgcagcttccatatttgtcattgggatcaattaatgagtacttttttgggcattgacatgttggtcttgaatcttcattgagagtacaaatgctgttgtgtccacaaacaccaataccagcctggataacagagtcatggcatatgttttcgggtatggaccgaagaacaatccatttcccatccccattggatgtcttgggatgataatattgagtgaaaacaccatcaaagtcaagagtagctcttatatagttgtcccttgctgagactatgtcctcactagatagactgaatctttcattatttactcttaaaatatatagattgcctgatcatgaaacatgtttaaacaatattagtatttgtaattttcagtgactacttgctttaatcatttgatcatgttacaattcaaaactcaaatttataattatacaagaaaaaaacttaacacactaaaaactcaagatcttctgttttaatgtcgtgagatatgagtatttagacataaaatgatttaaaatcatttgttatttaacaccaatacataaactaaatgtgatactactaaaatactatatatttaggtgtctataaaaattaatactacatataatttta

SEQ ID NO: 395818 - DNA, 1429 bp, Cannabis indica
aaatttatatttaaattctttttcttctgattacttattggtcatacatatgtataaagtctcgttcagtggatatatcaaacggaaacatgctatgttacagtgtactattacattggtaaattttattgccaatggtttgaaaaagcagaacactgattatctaccaaaagttgacattactgagttgtttttaagatgagataagaagtttaatcattaataaaaccagtttaatctgagactgtatgcccgggaaaaatgctgattaagcgaagagtaatatagttttactgaacatgaactcagttgtacgacttaatgtgaatgccaaatcaaacaaacctatggcttcacattatttaacatatcaaagttggaccgattgtaatttgtaacaattcactactttgttgaataaggctttctttgtttcatgaccctaacattccctgttacttctctaaattttagatttgtcaaaagctcttctttggtgttttgatgacttttcaatagtgacatgtgcctttcaaaaaacatagtgacacaatgatcattatgtgcaatagacaataactacattttcatcctctctccaaatcaatattgttaatgtggttggccaaacatcaaatgacacttgtacctttaccgaacttaactaacttaaccaactgtcagttatgacagttggtgttcgggtactctgcaacaaggctacatcatcagtatttaaggggctttgtcattcaaaccaggaggtgacacacttggagaaataaaacaaagagaaaaagagagttcaggggattgagaggaagaaagggatagccttgagtgttgtaattggggtgacacattgtctgtgtttcaccaccattcgagaagcagattactgaagcattgcttctgagttttgtgtaatttgcacctgtgtaatctctcattttaagctcaatcaataaaactctcaaagccatagttgtggttgttttctggccgaggatgtaggcaagataatgttacattatcttgttcgaacctcgtaaaatactttgtgttctttatgttttctatgctagttattttttggtttaatctttactgcataattgtgattgttgttatttggtttcattgatctttcttgcattatttgtgttcttgccgaggtattgttttcacaacaattggcatcagagctcaggtttcttgctgcaagaacagaatcaagaaagtgatctatggcttccgcacgctttgaagtagataagttcaatggagccaatgattttgggctgtggagaatcaagatgaaagcatttctggttcatcaaggagtgtatcaagccattgataaagaagaattaaaggaattaggagatgacaagaagaaaatcaaagaaattgaaacaaaggctcatag

SEQ ID NO: 395819 - DNA, 1455 bp, Cannabis indica
ttctaagaatttttttctaatgtgtttcgaagtttttgagttgtaaattaaaaattatgcttattttttaattattaattttaaataatatttaatattgtatatccacaaaacttaacatttaaattttaaaatatatatacgaagtatcaccttaaaaacaaattaggtgagaagatgagaatctcaaattgattacaaaattcttgcctagtattttattattgaatatatcggtggtttatgaattaattgataaaaagtgctatatatttttacacttttcttgtctagaaaattctagtattaactatacaaagctaagaaaattagagaaaactagaattacctagaaattatatttgtaagctaagaaacttaaaaaattttagaatttcttagaaagttaaattgtaattcaaaataagaaaaatctagaaagttgtagtatcaactttagctccttataaatacgaagcttgggttgaggagctagtataacaaccaacatccaaactatcaataaagcttactaccttatataaccctttcttctaagccaaaccattctcatatactaaatcaacaactactcatcaacatcactacttcactacattaccacaaaaaccattaaccacattcctacctattctaaacaaaccaatacaaatttattcataaactattagtggtatcaaagccctgttcgattatatatcactgggcgtaatcttttccgctcatcaatatgagtttggagtccaactgctcttctctacctcttctaattttttatggagaaaactatgatttttggtccatcaaaatgaggagctattttttatcacaaaatatatggaaaactattgaagaaggaatcaatatttcggaagatattatatctcttttggaagatcaaaagaaggtactagaggataatcaataaaaggattctcatgcattatactgcttgcagcaagttatgacagacaatctttttccacgaattatggcgcagcaacggtaaaagaagcatggaacaggctgtaggaagagttccaagaaacagtcaaggtacgcacagttagactacaaaagcttagaagagattttgagaatcttaaaatgaaggataatgagactacaaaagattactattctagaattaaaaaaatagtaaatcacatgggagcctatggagaaataatttctaacagaatatagtacaaaaaatactaatttcttgtacaaaaaaatatgattcaatagtttctgtgatagagaaaattcaagatttaaaaactctatcaccaactgaactaatgggctcttttgaggcatatgaaagtagacaagaaaggcataaggaagatgaagctgaaaatgccttttaagtctaaaatcaatccactgtctcaaaaaccaaaagctgatggaaaaagacacaagaaa

SEQ ID NO: 395820 - DNA, 1543 bp, Cannabis indica
aaaaaatataacaaggtgacatgtagtggaaaaaaaaatatatttatgtgcagacattttttttgattgcatataagcatcatcctaaaataaattcatacatgctaattaaacatactaaataaatttcaatataaatattgtatctatataattatgttaatattacaaaataatatgcatttgtaggatactaatataattatgatcattaacaaaatattatattatattttagtgtaattagtattatttagatggggtttgtttgtttataccttttaaagtattttttttcatttatacgataaactgttattgattacaaatatacaatgttttactataaatgctctaatcgcaacccacacaatgctagacaccgcaacacgtgaaaacgtaattatattattattgtaaaaataattatactaagacttgaagactttttactagaccacaatacatcaaacacttatacacatattttaatactagacacctttacaacatttttgtatataactcacatttttgggacactctttgaaatacttaaattacacttacttatgcactagaattatcactcaactcacctcacaccaccaaaggaccaactcctctatttataccactcagaggatagtgcattattatgctagaatgttctagcaaattgtcattttattatagcttaaaattttcttaaaacttcttatgactattaactctctatgattctagatgattcaataatattaccaaaataatagaaaattctaaatacttgtaaaggaggtgttgatcttgcagcactccccctcaacaccgactcatcatactgagttgttctctgagtttttgaaatcttgtaatgttgagtcattttgttgtttgctacttggtcttcgctctttatttggtgcatcactagctcttgtcggagtactttctctttaagaaagtgataatgtacctctacatgctttgttcgtgcatgaaagactggattttcagctagacaaatagcagactgattattacaataaagaggcactgcataatctataggctggtgtggatccttcatcaactgtatcaaccacacactttcttgaactgccattgttgctgctctatactttgcttttgtagttgataaggacactgttagttgccttttactacaccaagatactattccagatccaaccatgaagacatatcaagttgttgatcgtcatgtgtcatgatctctagcataatcaacatcgcaatagccaatgatcttaacctcatcatttttcttataaaagagaccatagttaatggtatcttttacgtatctcagtattcgtcgtactatttcttctacaaattgtcttccatttctttagaatctggtaatgcttcctttttcggtgaccaccatgatgatgcctcatcgatgactacattccttgatgtataaaaactttttcattttgtagggtcgcaatatctccaccctttctgttggttgtcgtatcccacaaagata

SEQ ID NO: 395821 - DNA, 609 bp, Cannabis indica
atggagcactattagggcacgttaatttaatggtgtagtttaagagaaagcttgtcaaagagtggggtgtgtgaggtggaagagagagaaaaaaatttatgagattgtaaacactgttaggcagctacgtagtctctatttttttttattggtttaaaatattaagtgggtctaccataacaattataagagcagtttgcatttgtgatggccttatatgtattgttcccaagatcaatatcattatcgatcgagaagatgggtacaagactgaagaataaggaattgactcttacttttcaaagctaagactactctaacttctcctatacatcaaaaaaaaaataaataaataaataaataaataaaggttaattaagatttttgtcccttaaattttaacgtctacaaaattatgttttccgttaaaattttttaagattgttagatttaaggacttttgtctaattttatttaattttattattttagtattatttatgttttaaatcatgctccccagattttgatatttatcaaattatgctcatcgaacttttgcatgtactaaatcatgcttcctgaactttcatctatgttagacgtttt

SEQ ID NO: 395822 - DNA, 1018 bp, Cannabis indica
ttaattaagatttttgttatttgaattttaatatacacatatagagtcatacttttaattttttcaggttgttaatatcttttattgtgaattattaaaatttttgaatttaaagatttatgctgtctcatttttgagcgagttaaagtgcactcatcttattcattaaaattatttaattttattaacgtgacaattatccatatattaaattctttaatatctattctatataaaatgtgccaatataacagaattcttgatttatgagaaattattggaccactttttaattttttttttctctcttctctctgccaaagttaacgatttattcttaatttaaactaaataattttattttttctgcgcataaaacatctgtaactatcaaacctctgttattctctctgaggaagtaaaatccctaatatcctaattgtaattccacgatgaacacaactaatttagagaataagaatgctcctcccccagtacacttcctcaaccttcttcttcccctttcctctttcattgcagccgcgctgcgctcctcccccagtacatcatcatcaatatcaccataattaatattaatattaatattatactcactacttctggaagaaacgacagtaactgaatctccaggggaagtattcgtagtattggatttgataaggccattagaaaagagttcatcggcatgaacaaattttggggatggggcaataataattatatggagggttgaaatcgaaactctcatcaaattcaaggctgtttgctatagaagggactattacgttagataaccaactatcagagaaactctgaacggctaaagatcgagaatgagatgatgatgagactgcagtttcttcttccatggatataacaataactactgctactttttgttgtaagatataaatatatgtatatatttataatattacatatatatatatatttcaaaagaaacaaggacgtgactcattcttttatttgacttggt

SEQ ID NO: 395823 - DNA, 509 bp, Cannabis indica
ataacaaatacaatccaatcatatcttttaaaaggaaggaagcaaaaagaatctaagagtaaataacaagtctttcaagcgaagaacaataaaagagaaaagggcatccgtagtttccttagcaagagagtagtgtagtgaaactcaaagttccaaaatatattacccataaagaagacaaatgttgatcttcatcatcaaaatttcaataatttatttccatccaaaaaaaccaaacagccagctggaattaccttgcattctatatggaaagacaaattaacctgaccaacaaaaattaattgactgaaggaacttaggttgcgtttggttggcggtaataaaatggaaaagaatcaatttttattccattcttaaagtattggaatggaatgagtactcaattttgaatagaaggagagttcattgcaatgcaagatgagaaaaaatttaataatttttttatcaatttttttttttatgtattttaaattttattcaattccatt

SEQ ID NO: 395824 - DNA, 651 bp, Cannabis indica
atatatagtatatatatagtacatatcatcatcacctttgaatttaagtcttccaatgtacagaaatttatgaagtctaagcaaaacagaaaacattcagaaacttcatagaagtttatcaacaattaattaaagataataaaattctatcatatggcactagggttgacaataattaatatatacatatattatttatatataattaattagtattattattgttcttatttttcatatgaatattaatgttccatgatgagatgaaaccagccaaattagctagctagctagctatatagtcgattgacttttaaaagaatatacttaattattaaaaaaaaagtagttaagttgtctctaataattgtcctaaatatttatttcaatttataaatttggtaaatattcactcttaaaggttggacaataaatattttatttaaaatagttataaaaaaaattgattgaaaataatagttaataggggtgctttttaaaaaatttagggacaatattttgtcactcttaaaatttatttttcattgactatgattaattttttaacaatattcattattaattttcttaataattatactaatgagtaattacatggttaattcaaaacatatatactaatccttagat

SEQ ID NO: 395825 - DNA, 522 bp, Cannabis indica
cacataaagtcttgtggtacttttcagtcactctgagattgagaaggctctatagttctaggcatttagcagaggacatgtgaaaacattactttaaaagactacaagaaggggtgcttaggcatcctgtagatggtgaaaattggaagcagtttgacgtgctttatccgtcattcattgctgattctagaaatgtgagattggaattagctacggttggattcaatatgtttgtaatacgagaaactcatatagcatggctagttatattaaaaagaataatatattaaaaaaatataatttaaaacttaataatccaacatacataataaatattagtttaatccaacctaattctcatgatcccataataaaacttccaaaatcaagggcctttaatcaataaccaacaagcacaaggtttattggcagaattttctaaagtgaaaatcaagcaagtcgtgtttagcatccccaaaatcaaagccccgggacctgacagatacaacagctctttttttt

SEQ ID NO: 395826 - DNA, 871 bp, Cannabis indica
agagagagagagagagagctgtgcttctctgactttgaccaaaatgataaaaacatctaatgttttgttgcaggaaaacgaaagaaaaatgagcaataatgatacttgatgaggtatacccaaaagtaataacgtattaatggagttagaaaaaatgtcaaaaaggtcccgcaccttgttagtgtcatattgccatcaaatcttatataatagtatttttattccatgaattttaatatgtaccaaatcatgttttttgaacttttaaagttgttaaaaatatcctttgagattgttagatttaaggaattttgtctaatttcatttaattttactatttcagtaattatttatgtattaaagcaaactccccaaactttaatatctaccaaatcatgctctcgaactttgacatttactaaattatgtcccctgaactttcattcatgttaaatttttttactaaaattagaaaaagtctttaaatccaacaatctcaatagttcaggaggcttttttaatgaccttaaaagttcaaaggacatgatttggtacatgtcaaaatttaagaggcaaaaattctaattagtcttaatataataactcttaggctatatttgaaagttgaatttttatataaaaaaaaaatagcaaaaaaaatataagaaaaaagtgtggagaaaaaaaaaaattaaatttttaagattgatatggacaattttgttgaattaaatgtgtttttatacgatttttctttttatactaaatatgaaaatttataattttgcttttttttttttctatgtttttgtttgagtaatttgcggtataaatacctaagtttaactcctagttgtaaataaatacttaa

SEQ ID NO: 395827 - DNA, 1886 bp, Cannabis indica
atcaaacaaaaaaaaatgcttatgttcacttaaacaaatatatttctagagaaaaaaaattaagggtgttcataaaactaattgcaccacaccacatctcataaaacatgcggttgaaacacttcgaggtgtggttgtagtttgtatttttgtcgaaacgtgcaatttagtttggtttacgattttgaattttattatgttacatgaaagggtatagggactaattagtaattgttaatattgcccagttagtataaagggtatagggtatagagactaattagtaattggagtttgacactgactcgaagagtgcgtcccgatacaatttatattgtatcatattattgcggttcaaacgacactacactaatttttgtaaatttatacaataacttatatatttgtaaagtaaattttgatttaagtttgagaacatattgatctaagtcttgtataaatagttattgagtttatgtatattttttttcgaaggaacaacacagttcatagactaggaatcacagcgggaattccttccccttgaacaacaccagcatagtggctagaacattgaactctcttagccattgaatcagcaaaaacattaaaaattcgaggcatataaaagaaattacagcaagaaaacgagttcaagagctctaaaacattaaaagagacatgccaacagctccaaacgggagggcaatccgtttttgcaaaggctttgacagcaacttgcgcatcagataagatagaaatctgaccccaatgttcttccttagcccactgcaatgcaagggcaattgcctgaatctcagcttcaagagccgaacgaacagcactttgacgagaattcattgcccacacaccagtatctttttggatcataaccacagttaaaccagccttattaccagaccacgaagcatcagtcaatattagtaagaatcatcggattcgaagatgatattatgctcctgaaaatcgaagggccgctctccccataatcagtcgagaactcaacaaacttggaattgatcctcataacagatctcttgagcaaatcttgtttccctgtcaaccttaactgatttctctagaaccaaatttcttcaaatagacagccaatataaacaaggaacaaaaatctattctccccaggaaaagtgagtaaaatgttccacaggaactgtcccaaactttcacctggtacacaacgaactctgcaactgtataagccagcaaaccacatgctcaaggtaaaagggcaaatccctaaaaacggtgaagacaattttctatcgctgaatggcaaaaagaacaatcttgtcctcacaaaggtactttgctttggtgagagcatcatttaaactctccaaaaggtacactggacacccgaggatggagtgtaggatgccagatcaatttccaagtctgatgactaagccccaagccgatgatcttgatccctcaagtaagcttctttaacagagagaaccaaccgttttgagcgaatttccacaccaaacaatcaaattgggaatgagaaagacacggtatattgagtatacgattgcccattttccaactaagtatcagttcgatgtaataattttagagagtaccactacccaaacgcaaaacaacatgtttaagagatattaaacaccactaatatttaatagcaatattccaatgaaaagagtattaaaccccttttaagatgtctcattaaatatcatataagacacatgcacatttattacaaaaaaaattggtctaaatattacaagagaagaagtctaatgatatataatactggattaaatatattccaagcattgtcctatatagtcaacatcgtctaattaccaaaaacggtg

SEQ ID NO: 395828 - DNA, 636 bp, Cannabis indica
tgccctacaaaatgagtttttaaacatttttattattttctcaaaaaaaaaaatcatatattttgtggtcggtggtactgtgtaattgtcctaaattattatcctgttattatttggttgtttatttacttttgtttttactaaaacgaattattgtattgatgattttgcaggttatggtaagtgcatttacgcttgatgcaaaatttcccagaaagttagaaaagttttgctttaaaaaaaatgtaaggcaatttatgggttttcttgggttgtaatctcctttaagaacaactagtagtactatgaagattgtgtttagctgataaatttggtactgaactaattaagtgtcaatttactggcactgtacttatttccttctagactccaatagtcaatattgtctttctttcaaattcatggttatgttgttccaaatatttaataggagcggggctgcataattattatatcagtataaaaaaaatataggtattaacctacagataacagatgcactaataaaaattgaaattaactttgaagatagtcagatgtgtactaattaatagcaaaagaaggattacctatcaaatttgactatattgaaggttgatagacattttataaatg

SEQ ID NO: 395829 - DNA, 906 bp, Cannabis indica
tgccaacttttcttgaacaaatctacttgaaaacgccacttccattgtatattgcagaagaaaaaccatttaaaagtcgtgcccaatcagcttccttagaccttagccatatagaaaacccccaaaatggtattgtttctgcccttgtcgtaaacccagtgaccaccaaacactatgtggtttagttgaacgtcatagaaaatacaaacctctcatccacagaaaaaattcttcaagccaaagtggttatacttaccatcaaacccttttaacaccatcaatgtagtaataacacttgtgatagaaattaattgtttaatttgtatgatcagtagaaccattctcattaaaggataatgccaaatgtcactaactagccaaattgaagatagaaaattattagtagatggccctattccataagaaatacctggcggtcccaactgatatttctcatccttgctcttggtgacatttctgtcattgtcttgttctttgtgaagagtgattattttccctctatcaaaattccagcgagaaaatggcttccccaacttttcgtcaattaattctggccaactacgcacccctccgtccaccctcacggcgatccccatcatttgctcagtcgctggtggtggtggaccacaatcgacaagtcgacacttcgtgcgattaggagaagatgacaatatgaaaatatcccacgtgactattgtgtgacctaaactaaaccatgggctttgttttgttttttcttttcttaatgggccataaagggttaggtcaaagtacttgggcctcagctcacaagaattgagcccaaagccttctatgcagaacacgtcttctccaaagcgatgatcaccattgatgggcatgagaggaggtgttgggttttatgcc

SEQ ID NO: 395830 - DNA, 651 bp, Cannabis indica
aaaaaaaaaaaactaaaaaaaggaaataaaaatataatttttcagttaagatgattgtttctaaaataaaataacaattaaatacacaaaactcacaaaaaacataataaaccagaatagaaaactaacatctcttcctttaattaattagaaaaagataaaggaaaacaaaattaaaattttcaattaacacatgttttcaaaatatctcataaacatatgacaccccaagaattaaataaaaaaaaagaattaaaaaataaagcccctaataaaaaaacctatttttaatgattttcttataaagaaaaaaaaaatcaaaacactaatagatataagacaaccaatcaaagtcacactttatttttaaaaaaacaattaaacaaagtaaactttgatattgttgccaacaaaataaaataccatacccgctttgtctttgttcgtgatgaaaaactcactcataagaatgtacagaaattattttatcaagctcatagtctactgcaataagaccatacaagttacggagaaaaagaatttactcagtcaccaaaaatattgtacgaaattcaatcagtatgtaataactttataatactattttctatttggctaattaggatttttgccccctaaactttgacatgt

SEQ ID NO: 395831 - DNA, 1952 bp, Cannabis indica
cccaccatcttcctcaaactcatcttcacaatctaacactccatccataaactctgctagttcactttcagcatctatttcttcagcaaatagttcttcaacttcctccactcctctaatcatttcaatcaattcctaaacactaccacaaatcctattcccccttctgttgtgaaccatcatccaatgcaaaccagggctaaagcaggaatccacaaaccaaaggttctcactgcctcctttgtacctgctactgtcaagtttgcccttaaagatcccaaatggcacaatgccatgaacactgaatattatgctctaaagaagaacaacacatgaatattggttaggttaccccctggtagccagtgcataggctgcactattcttcgttttcatcagtccaacaagtctcatgtaatttaataaaataatttctataaaatattgttaaccaatcgaaagacgacacctataaatagtattaggcaccacttataccttgaagtaatattcttcttgaatatagaataaatagcattaacaaatcatggaatttgtaattcacagatagtttttatttttttagtaacaattttttcacctaaaatctgcattaaaatactacacataataattagcgataaaaattttacccataaaaatgttactttgaaacctatttatttatgagtaacttacccatattaagatagggtattacctgttaaagtaggatttagtgtggggtgaaactatgaaaacatgtacttgatgcctgcttgattttaggttaaatatttgatgataaatctcagctcatttaattctgagctagctgtattttatttataggagaaagagaaaatattacaaccactaatacaatgccaactagcttacacagaaaacaatgcataacaaatttataatagaattcgtacaatcactcccacacttctgcatattcttgaatccaatgatgagtagtaatcattattactacagagaaaatagtcacactataggtaggttcttaacaccaccctcaaataaaggggtgagacatctacactgagtttgtccacaagaacttgaaaccttgagtgagtgagagagagagagagagaaaaaaagactttgtaaggtaatctgtaacttgattagaagttgagaaatatctaatttctaattcttgcttgagcaccttgtctctaacaaaatgaacatcgattttgtctggcatgataaataggattagatgcaagtgcactgatactgaggttgtcacactaggttattgttttttttttttttttttgcagttgaaatttgaactctctttagagtgattctatcaaagtgatcatctcatatgcaacatgcgctaaggctctatactcagattttgtgcttgactttgagactataacttgttttttggatgatcaggatgttgggtttatgccctaaataaaactcatttcaatataatcagatttacttattaatatagatcagaaataacatttaatgttgcaaggttcacatgatttatttcatgattatttgtacataatgtataaattcatctgaaacccttttcacatacttgatcctgtttattgtgccgtcaacacattggaaagtaaacatgactatgtgaataaagttttcctagatttatcagacatagggttttactgatatgataatctacaacagagtttacttgcatttggagaagtgctatgttctttccagagcattggttaaagtaaagctcaggttggatgcatggagtatgcatcggaagggaccgatattgaactttgacttagatttattaaacttaccgtaatatctattcaagtcaatatcgcctagttgatcctagatcaaatgatcttaatcctgttatgattaggctcaatcttgaaaggctattcgtgttc

SEQ ID NO: 395832 - DNA, 842 bp, Cannabis indica
tagattggaagactgtgaaggatcacacacaaagagaaggagattcgggctcagatctgataatactctgcgacagaaaggatacaagggttagagatctgagtggaaggagacattaatttcgctgcatcaatgtaaggttttcttaacttttatatgtgtttattttatcgttttagaaagttcatatttagggtgttaaacaacatacttgtgagtagatctaagatcctggtaaaataaattccaacatcgaggtgtaccaccccaacccccacttggaggtgatgccttgacaatcgcaaaaaaaaataacgggggcatctcgggataccccccccccccacccccccaaagggagtgtctttgggtacccctgacgcccaaaggggtatctcgggtgtatgcacttagaaaagggaaaaaaatatatataaaatatctcttgttattcaggggtgtgtaccccctgaaccccaaagggggtgtcgcagggtacccccgacccctagtctcagggtgtatactccataacacatatatatatatatatgtaaataaaatagcacattacaatagtcaaaattggcatgatggggtttaaaagagacacatcaaaccaccttggtatgtgttcttttcttaaagaaaaaagaataaacaagagacacaagtctcggggtgagtagtaacatacatacagccttgacttttcttaaacatatatatatgtgtctttgggtgcttttacccttaaaataaaaataaacaaaacattattaagcacgtatttataagcttccaagagggtcaaaataggggtaccactgttgggttttatg

SEQ ID NO: 395833 - DNA, 1283 bp, Cannabis indica
tctttctttctttcttattctacctgtccctgtcacatataaaactttcaccttaaggtgcaaaaataatatatcaatctttgcagatttcatattttcatgattactttatggaaatgatacaagtaatttatattttatgaatcttttgtaagactaggttgctcagttttttcccattggtttgtttttatataggttttcctttattgcgtgaacttttttcttccctttttttgtattatactactatttttacaataatatttacatttcttatggccccccttcccccaaaaatgtatcttttgtagggaatctctatcaaaatggtggcggctggtgctgaacatactgcagctattacagaggatgggtcactgtatggatggggatggggccgctatggaaacttgggcttaggggacagaaatgaccgtttggttcctgagaaagtttcaactgttgatgtatgttcaaaatctggtattgcttgttcctttaatgtggaaaacaaacggctataccttgaaaaaattgttttgcaatgttgattctgtatggttaaagtaggtattgcattatttgtcataataggtttatagctaggtattagaaatttttacccatttctaccattctcaatttagtataaaatattctacacatttgtagaaaagcttaacctaaactttttagataattgaatactttagaattttctagacatgtgaaatatacaatagaacatcatagcatttctagaaaactttagtctagaattatgtatttatgcatgctaagtgtatggataaagtccttgaactagaaggatctagagcaaacaattctagtcagtagtcacacaaacttgaaggctagcaactataaatacccatcaaggattctaaattgtaaccaacatccaagatccaactaaactatatcaatagaacttttgattttctactaccctaaaacataaactcgtctaagccaaattattctcatttactaaaccaacatcaattcatcgtcatcactacactacttcgctactttatcagaaaaatcattaaacacttattacttcatatccacctattctaaactaaactaatacaaattaattctcaaactattagtagtatcaaagccttgttcgatggaggaggggggcgcctggtgtacactataggaggccgagggagtggtggaggtggtagaggtggtggaggtggtggaggtgtagacattgtgggggtgacgaccgaggcaggtga

SEQ ID NO: 395834 - DNA, 1170 bp, Cannabis indica
tagcatgtaagagctacgtagtcaatcatatacacaaaaatcacaaattgaatatatattataaagaaagaagaaaatagtaaagttaaaaaaaagaaataaaaatatccataataatttatctctagaaacatattaaaactaaaaattaaaatatgagtgaaacaaaataaagtagattagagttgtcttacttcaattttcatctcaaatcctctcctccttttcttttgttctccaatgtcttctatcgttaattgcttgaaaacccctctcaaatttgatctaattaatcttaaatttgtaactaaaaggtctagcccacacaaatccgcatttacgtgtaaaagtcctgcgctctcaattgcttgctatccagttatttttttgctccaatctctctcaataaaattcgtataatttttgcataattactccaaattagctgattcgagatgtatttaaaagatgagaaagatatctaaaacttttatgttttgatatttttcaatatataatcaaaacatagttaaatttaggtttgaaatttcaacttaatttttcttataaagttttcttaccaaaaacatcaaaataacaaattaatactaaaattaaacaaaatgaaaaaaacaaacaaaacataaaaaaaaaaaccctaaaagattctaaattaaatcaaattcaaaagattaatgatgaaaaataactcaatttcatagagttaacacatgtcaaattcatgtttagcgagtcatatcgtgtttaacccgtttttatttcgtgtcgatctgttttcgacctacatcatattttaccgaccctaacccgtaacattcgtgtcgtgttcgtgttcgtatactgtgtcgaaactcgtttttccattcctatagtggtgcctagcaccatctagaagtagtgccttacgattagttcacaatattccttaaaggttataatcgggacacaatacttaattgcgctaatagagatattacaccaagggggtgctagataccactggcgccttttagcacttttctttaataaataaaatgatgtgacatgtcagtatggtgttgggcaacttagagcactctcaacaacttttttattctatcatttaaaataggctaattaagatttttaccccctgaactttgacatgta

SEQ ID NO: 395835 - DNA, 575 bp, Cannabis indica
agagagagagagaggacccaaatttgggccccagacctagactccaaacccgactctaaaccccagactccggacgcagatcggcctatccactatcccatgtatgtgagagatgacaaaaaaaaaaaaatgttagacaaaaaattaaaaaaaaattatatttgaaaatattaaataatattttgatgttttctgttttttctttcttttttttttaaacttaattttcataaaatgtttttaaaaagtttggccaacacacccctattggttttaaaagcaattttatgttttaaaaagtgaaaataatttgtaagttatgaaactaaataccctttgttcttcaatttttggagtgaataaataggtttcatccccctcccccgagctatgaaccttagagttttaccccttgaacttttctctgttgcaaaaatttcccttaaattataaaaattgttgtaaatgtccccttgttgttgcattctggtcatttattaaaataaggctaattatgatttttaccccctgaactttgacatgtaccaaatgataccccttgaacttttaaggtc

SEQ ID NO: 395836 - DNA, 826 bp, Cannabis indica
ctctcattctgtactcgtaccattttttattacattactaatttatttattattttttttttctatttattattaatcatttttttttattttattcctttacatttttgaatggacttataaaggaggtaatttataataataataataataataataataataataataataataataataacttttttttttttttttcgttcaacagtaagcaatgctctttttttcattcttctattaatcatagtttaaattattgactttttaaagggttaagcaagaatgtgaattcaggtcaaaaaatggcaaatgatgtatgtttacaagaaacttatgcaatcaaaagtaattaaaaaaattgattaagtaactccaatttaatgtataacatttgacaatgaattaaattaaccttaattattggtttagcatttgatacatatgcagaacaacataagtacttattaggagttaattagttgtatgtgcagatctgcattgaattatattattaattagaaacaaaagattcgtaggtagggtaggtaaacataattcaaatttttagtacttgatactaattattttgagataaatctattttagatcttatattttgcaaatatcacaaattggactttttattttgttgaatgacaaaatagaccttgaactcaatttttgacaacttttttttaaggctaaatagtaatttttccccctgaactttgacatataccaaattatgcctcctgaactttttttgccgttaaaaattccccatgaactattgagattgttaaatttaaggacttttgtctaa

SEQ ID NO: 395837 - DNA, 1004 bp, Cannabis indica
atatattgtttattgattatcactttactttttatttacatctcaagatattaatgtacattgttgatttattgtgttgaatcatgcaatggagatggtcttgacgaaaaactgattatttcgtttttcctcaaccattttgttgcagtctatgtatcagcatatcattaccttgaatcggcattaagtaatctcgactcaagtgggtagctagcttatcaagttgttgggcgtgattgtacgggagtggctgaacggtcaaacaaaaaaattagcataaatcatttgttgcgaatatttacacatgtatcattcaagtagtaattcacacgagaggtcgaatctcaaaaaattgtaatttagtactaactaaattggattataatttctatttggtaaaaatgaaaattggtattggaaatgagaatgcagaaaaataaaataagcaataaaagaagagcaaatatcaataattaaaatttagggtaattaatatcaattggaccaattttgtatggtctaatgtaagtttaattcttgatagcggattaactacttatatctatattcttattaggatatataaaatccaaattatatgtaaaagtcctacaattctgtagtgaattacacataatttgcattaggctaattaagattttcttttttccgaactttgacatgtaccaaatcatgtcccttgaacttttttggatgttaaaaaattctccatgaactattgagattgttagatttaaggatttttgtctaatttttataaatttttttttaacatagatgaaagttcagggcatgatttagtacatatcaaagtttgaggagcatgatttggtagatatcaaagtttggggagcatggtttagtaaataaacaatcactgaaacaataaaattgaataaaattagacaaaattccttaaatctaataatctcaataattcaggagaaatatttagcagccaaaatgtaaagaccgcttagttt

SEQ ID NO: 395838 - DNA, 1345 bp, Cannabis indica
taagctaatttgggaatgtgaaccaaggtgaaactaagttttgattttttttctatattgttggagatgtactgggtagagatgaaatttatggtggaattgttaagtgggtttttttgtgtttggttgttgggaaatgagaagaaatgatctggtatttgggttattgtgttagagaatattcattgataactaaaaaggttagggtttttttagcagagaagaagaagaagaagaagaagaagaagaagaagaagaagaagaagaagaagaagggcgtgagggaatttagggttttttttaaattttatttttttaaaattgtttttttaatttttaaagaaaaataatttttttttattttttaattttaaaataattaattttttatttttttaaatatttatttacgtggactaataaaattgtgccacgtgtacactgtgtacacgtggacattccaacctagcacttaacagccaaaaatggatggaaatggctaactgctaacggactagtggtttaggtagtttttaccaccaaaattttagattaaagggttagttgcaaaaacctgtccactttaggaagttttgctgcaaattaccctaagaaagtgaggatttgtcataaatatgtggaaagaatttaagtttaagcacaaataaaaaatgtaaaaataaatatgggattgaaaataatcaaagttttgaatataggaaactaaacaaaagactataaatataattaataaactttttaccccttaaaaatgttgtcggaaaagtcaatgttacgggaagtcagcggaaagttactatcgttaaaaaagtttgcgaaaaagttatcgtcgccaaaagagtcactgaaaaaatcactagagttgtcatcgtcatctaaaaggtcattaaaatttctatcgtcactagagttagatgtctcagacataaactaaaatgaggaatgctaaggagactctcttttgtactctcttttgcactctctctataaattagtgacaaatgtcatcctttgaaattagtgtatttaaacttaatataattagacataatattattacattattatatatatgccattataataaaattattataaatatttacttagaactgaatataaatatatatctgttgaccgaggttttcggcaaccaatataataataataatttagagagctataaggaattaagagagagatttttacgtggttggggcgttaatgagccttagtccacgagtctgtgtatttatgatagtatttattacagagaatattcttggtggatttatcctcttctagttcttatgaaacccagaat

SEQ ID NO: 395839 - DNA, 803 bp, Cannabis indica
tttttttttttgatgaataagataagtgggtttaaattaagataatgatcatgtgtttaattagcttgcttacctgtaaatctgatcctaacagggacaaatgacagtaaagcttgtctttgaaatgtctaccactatgtatatttatctacctgctacttaatttacttttgacattttttattattaatttgtaaattaatctcggtaaaatataatttaattaattaacttgggtacgtacaattcatgattctttattctggtaaaacaaaattatttttcaactcaatcatgcccttaataattatttacctagctatttaattgattaactattgaccttttttctgctcttctctaattgaaattaagaaagtttaagaagtaggtctagcattatattatattagttttggaactacttagattgaaaataatgttgataagtcatttatatagttcaataaaatcacaacatagaaataagaggttattagatcaaatgtgttttattcttcaataagtttaaaacataaggactcaagtaagtgtgacctcaaacatcgggaagatgtagatacaacttccagtgtcaaaattgaagcaggaaataaattaagtttgctgagtttttggaagaacggtgagaagaaaagcaaaggctttgcttattttcaactccacaatgttttatatatagaacctctagtgatctagaaataagcaatcttggagcatgtttggtattgttttctgttttttgttttcaaaaaattatttttaaaaatgagaacaaaaaa

SEQ ID NO: 395840 - DNA, 943 bp, Cannabis indica
tttgagacagagagagagttagggcaaaactttgttgggagaagaacagtgagagagagaaagcgctctgtttaaaatcagaatataaagaggagcgtcttctcccaacggtcattatttttttgatcggacggttttggattgattcaaatttttcaacagttctatttttgtaatgcactcctttaaaaacaagggtgcagtaccaaacatttttagtctaatatttttatattggtttacttagatattctataaaatattaaaaaatttaaaatagtttacgatataaaaaatagtgttcaaacaatctatttcatatggtataaaataaaataataaatagatagattttaaatttttaagggagtgcattataattttttttttttgagaatatagaataattaattattttttttacactacatgatcttgcatcttaaaatatatgtttaaattttttactaaaatacaacagttacataattatatatattctgcttaagtttttttttttcgtaaaattattattttaccctgaaattgtaaaacatacaaaattttaccccatttgattagaaagagttaattgtaaaaactataattttctattaattctgaacaattttaaaaagattgataaaagtattaaataaataaaagataccgaaatagataagagtgcatcaatacacccattttaaggagatgtattgtagaattttctaaaaatatattaaatttacttaaaaaaaactcaaattattcaaatatatatatatattttcaaattttattttatttaaaaacaatcttaaaaaatgaaaccaaaattattgaaaatcaaataaataatttaaacaaactaaaattttgtgaagaaaaaataaaacttatttatatttataaactcatatcataaaaaaataaagaaaaaaaa

SEQ ID NO: 395841 - DNA, 1362 bp, Cannabis indica
catccctagttcatgtctccgctcatgaattagttgtgcatgcacttagggtggattgtgaacgagcttggattgatagtttttatcattttcgattgatgtattaaactctgattattgttaataagagtttaatttcaaaaaaaaaaaaaaaaaaaaaaaacttaggatccgagcccacaatgcatgatacagtttataaatagaatctcaccatggaaagggtccaaacatttatgacacgtttattaaactgtaactggaatcataataatcaatgggagaaatgaatcggtttaaaatagaaaataatcggaaataatattttattatgctatttactaaactatatatacagaaagaaaaccagaatcatattattttgtttacataattaggaaagataatcggaatactttaatttgacaaaattattattattagaatattaattattttttgttatatatttttaaagggcatatttatgttcttcatttttaattaataaaattaaaattaaaataaattaagtttttttttttttttaagaaaagcgtacttgttataagataataaatagttagacctcatggtcattacataaaaggttctccagaatataagagactgtgatatcaccaaatcttatgtgagcaagcgctcacttggccacattatggaccgcaaaattacatgttcaatattcaaaaaaatacaactaaaaaatgatggagaagaactaacacaaaaggagtgataattcttaagagcccaatgaggatccttcccattaagcgcattgatcatcacactcgagtcgttctccacaataacaaacttggcactgaggtctagtgtcaccataatagccgagcagcaggccgccgcttcttcacacaatgcattgaaaaaatccaaccgattcgtataaaagggaaatgtattcctataaaaattgaggaagaacctttctttttgttttctccctaatttgtgtgagtcccattattttttccctttccaaaatttaataaataattatatgagaatcaataacatactattaattgtcattccctttaagtaaacatgccaaactatgttcttgacaattacgtaaaaattttatattcatttaattttaaattaattttcgaaaatttaggtatattagaatttaaacttaataaatatgataagtatttaatattgaattaaatttatataattaaaaaaatataagagaattgaattagatttatttatttattattatttaatttatttttgatttcttcatatatatatatataataaaaaagaaagactaagattacattttaaattaagttttttttt

SEQ ID NO: 395842 - DNA, 1052 bp, Cannabis indica
tctatcaaatagatggattagtggaaattagataattttataccacttgttctactattacactttgaaataatataggagcttatattaatttattaattgtacaaatttgcttaaaaattatatgtaaggttattttcacaaaaggattattataaaattaagagtttttcatttgaaattttggcactgacttgaacactacttcctgatattgtattatgatcacgatagatcaatgtggtcggtgatgctgaagaatattcttttgtgatactgagtatgatgctctgacaccaaagaatgctgaacaaaaacaaaaagacgcaaaaatgacaagtaagttgctctcttctttttttaaaccttttaacttaacatgtcctaagaggaagaaagatgtgttaaaaattcttaagaaagtttggagtacttaattagcaaattagaatggaaagttgaatcttgaaaagtacaaatggcaaagactaacatctaggaactaactcataaaggttgcaagattcttccaactgatttgacagtgagctactacgtactatctttctccacaattgaaacaaacaatgtttttcttattattctatattctcaaatagcattattatttggcaccttaaggtgtccggtgtgacaccttattgtttttatattcttattatttcacactaatacaccttatgattagttatcgatttttaatattattagaatagacaactactcaaaaaatggttagttaagagctataacagttaattagtttgttaagttattttcctttttcttttatcaatatagttataccgtttctactcttgttttctttgtgtattgtttttaagtataaataaaacaaagcaatcaagatttgattgagcaactcatttccatctaatcgcttctctctcttgtatttccttaaagttcaaacacaactctagctagttttacagagttcttcatggtatcagagccatgtcgggtcaaagagtaaatctgcagagcaagaaagtgttgggtttatgccc

SEQ ID NO: 395843 - DNA, 1569 bp, Cannabis indica
gtatggggatttaaaaatagtagacatgactgaaataaacaaagtaatataatgattatgcatgaataataaatatcattttaaaattactgtaaacgtgatacatgagtgcatacaaataaaacacataaaatcttgtttaagttattccacaataaaactttttgacaattgattgccgtcttagggtcggtgttgagtcaatttcattaagattatgagaaaattctcatctttattattttgaaaccaaaatatctcatatttctttttcaaaatataaagtacaattttttgaccaagttaataattaaccataatgaagtttagttgcaatttgtgagtgtaacccattattttagatttcatgacttaacttagtgtgttgccttaagagttgatgtaacattaaaatacatcacttcctcttatcttagtcaagagatcaaccttgagcaacagtttagacacataccttttttaggatgacaaaaacaaagccgtttcgaggccaatttatactctctcggtgttgatcaataatgaaggtcgtaggttacattgatatgcactccttcttccacagactattttaagttaatatgtttgttttattaattcccagaataatacatattaaccactttaataattatgattaatttatttataataaaaacctcaattataaataaatttcctgtcataatcattaaatttgaattaagtctttaattcataatttaaaattaatagggtaattataattaccaagttaattttaaattaatcttagacagtttacatgttttggtttaaaaaacgataaacacttaaacacataaatacataggacaatattaatatatcgtgtttctactatgagatgcatggtaatataactatatgagatttctatgtgtgacatgttattcattaatgcataagcatgttattaatcaactattaatgaacatttatttaaaaacaataaataaacaatgatgatgtaccgtgtataaattggatatttctaattttacaacctttgaaataagaaaataaattacaaaactaatctccattgcaacaggatattttcataattttgtagaatcatcgtaattctcaaaattaattaacacaattttaaataattattatttaattgaattttaatttaatacaccttttaaacctttctaattaattaaaaataattttaattaattaatttttaaataaactctttatttaaaacaatataattatctgtaagttttgtcttaaaataataacatttattatttatttttgggctaagacaatttttgtcttaatttagttttaggtttgagtttgaattttaaacctaaaattaattatatttatttattttaaatataaatttaaaaaataaatattccacaaaactttattattttgacttatgttaacgtagattttcgttaactaaattaaagcctaaaataaatcgtgatggatttgcacagaaaataatagcagtaaaagaaaaaataagaacacaaagcttttttacgtggtttt

SEQ ID NO: 395844 - DNA, 492 bp, Cannabis indica
tatgttttcatatggacttagctctggtccaccctagaatggcataagtaacagtttctttctagtcattgcaaagaaagcaaaaggggtgaggttaactttttttttttttttgaaaagattggtattacaggggaagcacatattggtaagcttccaaataaaatgcttaattttggaaggtgttttcatagtcttaacaaactttcaccaggttttataagctgcaaggttaaaggaagagggagagggtgaagagaccagagatttagctagatgatagactaacttaacagtaaagttccccgagtgacaatctcaaatgagagtgtcctccatagaagggcaagtagggatcgaccttgaggatatcttctacaattttagtatcgaagtgatctttaaggcgaccagtgttctaagatccattatccagaatgaagtgtgagaccaaagggttatgaggtggggtgcctgttgggttttatgccc

SEQ ID NO: 395845 - DNA, 1265 bp, Cannabis indica
aatttaatataatctaaaaataacatattaattaactaatgttaacttgactattcaaccaatctagatgagatagttcattccttagtgattttacctcttcattgttcttcacattcgaaacccatagtgaatgagtgccatgcccacacatagtaagtcaagtactcaattatagtgagtaagacggtggtaaccaaacccaaataagagaaatagatccaggtttagatcttgataatgctctgctacagaaaggaatcaagggctagagatcttgaatggaaaaaatacataagggtttaacaaaaccttatgtgtttattctgctgcaatcaatgtaaggttttcttaaacccttatgtgtttattgccctttccaccacggaagcagaatttatggcgaccacaaaaacattcaatgaagcgttatggcttcaaggaattttgtttgaattaaaataataaaaggtgaagtgactgtgtactcagatagtcagtcctctatccacctctgtaagaatctggttcatcatgaaaagagcaaacatatagacataagactttaatggactagagagaaaatatatagaagaatgacttgtttagagaagatcagaacggaacataatcctgatatgatgttgggactaaggtctaaacagtacacaagttcaagcattgcttgaacttgatcaatatcagaagttagtaaatcgagatttctggaacaccaaccatggtggctgcattctttcttcatccctatcaatattttaatttgaagtaactaggtgaatttgtggtatagttcctccaaatgaaaagatctccataagactgtccaagtaatggaaagttagttatcttccaaagtatgttctcggatagctaacttgtctatccagaaggagtctcgtggaatgatagttgccattcgaccaaagggcgttcccggaggactatcatgtccactacgggtgtagccttcaagaaagctagtcctcctccgtaaaggagttttgaatggatagttgttccttctgaatggtgttctagatagttgactccaacttgattttttcctatccagaagccccttaagcattcgcttctgccctttattcaaatagtatatgtctcatccgaaagcaccttgtctagtgatgacgtggagattctgttacgaggagtttgttaagtttgttacatcgtaactaacttaacaacttcgcatgtgcagccaccgactttaggatccatat

SEQ ID NO: 395846 - DNA, 967 bp, Cannabis indica
tttaacttgttcgttacagcttaattaccccgtaggcataatactacatcttaggaacttggtagtggaactgagtgggagagttaatcgagagatatatagacatgtataacttctatgtttattagaattgaaacgatagtttcgttagagtttggcttaacatgataaatgatagaacgctcattttgataattatattattagtttctcgaaatatcatttacaagtagttaagtacttaaggacgaaatacattgaagggtaaaacaacaattttgtccctactcaatgtaaaccgtctatagaggatcaatgattgttgtgattgaagcaataaataattcatctcgaatctatatatagtatataaagcgttctatgtaatcaagagtgcaattccgaatctatagtgaaatttaaatgaattaataagttaagaaatttactggataaatttcaagatctgcttattagaagcttggttacataggcgcatgatccccacactagctaaaataatattgttttgtagtctcaattgattggtttatttaattaggattctaaatctaactatgtcttatttatgaattttattagataaatttactatttttcgatggatttactatttttcacagagtagtgagctcagggatcgcgatcctatatttatataggtgataccttccatcaaggtctctgctacaattaattgtaagaatattttgataattaattcaaaaaattaaattgggtaatgaatattagtaaagcgtaatctaactatatatagaatatcaaccaataaccaaatataatgaatataaaacattcattctcttacacacatataaaatcaattcattgatttttatacttaatatagataatattctaatataccacttgaatccaacatttctcattacataataaacatatgaatcataatgataggtct

SEQ ID NO: 395847 - DNA, 544 bp, Cannabis indica
tttggcagtttgaaccgaccaaattgcgatttatattggccgttctaagaagtttcttataaacaaaccgaccgatgcccagtacatacaactgtattcgtagcaaatttttagtggtccgcataatattaattattaaaaaaaattttaaatcaatttcaaaattaaaaaaatagttaaagttaaaattttgtaggtcaagtaagacctttaaaaattaaaatagaccacaattttttttaagagtaaattaccacaaaatttctaaaactttcgtttcgatagctattaaccttcaaaatttcttatacattaaccaaatttacatctaaataaattttaagttaaatatattttattttatgggtattgtactaaaattattttcatattctcacataattaagacataattttaaatataataaatttcgtactttggagatgaatgtgtaggtttgtagaaaagttgattgtaaaattttagttagagaaaaatgaagattatcgtgaaataataaaaataaaagggaaaaaaacaaaa

SEQ ID NO: 395848 - DNA, 1435 bp, Cannabis indica
atgtattggtgtttgcaccatctcaatttttgtgcatcactccctctagcatactgtttgatgtgatgtgagttttctttaattgcacagtttctctcttgatctgaactgtaagatgtcccagttagaaaggctaccctcccttgatgcaatgggaagagcttcctttgtaccactgaatatctttgaagagtttgctccttctcactatattctttgagaaagattcataaggagacggctacatctccagggaggagtgaaagccataactggttggcaaaataacttgagtggtataaaaaataaatgaataaatcaaaaaatcatccactcgcaagtattttcctatatcaaatgtcaagaagatgtcctaattgttcaagttgagagagtgagctgtccatctaaaccttggagggctcacatgaggacaattacacacacatatgacatctgttctgttcagatcatcagtaggaattgtcttttaaattagtactcacacttccttgtttatcaattgagggtctggtgtgatattattttaacattcgtgttcgagtttgcatctatagtttttatttttgtttttctctctccttagttgagcttatgtggaatacatgtttctgttctttttcaataagttttgtctcaattaggtgtttcattttttttctgtatgctttggtttgggttgaatgttgtgtgggcctgttttgttgggctagtgggccttgtaccaatcagaaatatacgactactatttgttcagctgggcccagcagctatttggtataagtttgcatctcttcctccccagtcatcactgaacacttcaccttcgactcttcatcatttgctgtttggggaagcgtgcacactggttctgaagaagtgtttgggtctccattcacggttcgtctcacctctctgcccttccaatttgtcaggtatgtcgtctaaacgtttcactcgttcatcactatctttcccgtccatctccccagttccacctgtgtcgactgtccctcctgggtcctcttcacccaattcgtcctctgagtccccacctgttccccttaagaacttaggtccatcgtcgagtgaaagaaaagttattcaggggtaaagagtctgagtccaaaaaacgtaagggtactgtctttgagtctgacccctctcctggtttacccttctactcccatgacaaacttcttcgttttcaagagaatgtttgttctcgtcctctgtggcccgagtatagggttaagttgaagcattttgctagggttcgtgagattgttcagtctcgaaagtgggagtgcacagtcactcaccttcaatcgcccaatgtcaaccttctccgtaagttttatgctaacctagatgaaagtattgtcaatgaaaaaagtcaacacaaatatcaggc

SEQ ID NO: 395849 - DNA, 699 bp, Cannabis indica
atttacacaatcgaaacttgtgaggttcacattttagattgtctgcgtgaatgtagcttgttatttgttgatttattagtagaatcatgtagaatttacttatcttttctatatataaaattttaggctcttactttcttctctcttcctttattttatttttttatatataataatggaatagccatgattcgttgagtggatgtccatgttataatttgtatttcaattccatgtgaaataatagctctgtcataaaaattagctaaaaaaattagtcattttcctcttgtcaatttgcaaggatggatggtgcaatgggcttcaacattatgctgccctatgtaataaaaggctggatctatctttgtaattggtgaattcttcattagagtctacctatttgtatttgtagcacgttcttttaatttttcagctaatgcatttaaaaattttatttcacataattacaattttattcatataaattaataattacttaaatattttatttttaaaactataactaatatttttttagaataaataccattttgaatttattattttacaaaagttttcaattggacatttatttagttaaatgacaaagtgggccctgtattttttcaaaatggtacaaaatagtaccatgaattgattttttttgttcaaaataaaagttaataataactcgat

SEQ ID NO: 395850 - DNA, 1007 bp, Cannabis indica
aaaaaatatattaatataaaaaatgtaatagtaaaagtaaaaaaaaaaaaaaaaccattaggtcatgaattttatttataaaagatgggttgagtttgaaatttttattccaagggagcctaacctcatgtcaaacccatgataattgtgccaaagaaaaggtaaaaatatgtgcgagagtttatttttatttttgtgaataaatatgatttttactattgaattatgtggaatttttcctttaattttattttaagataatattatggactctatattttgtataagttattggactctctattttgtcaaataataattcatatcttgtgtttttcaaatgctacaaaatagactatgaacctaattttcatcaaattaaaacttaataataacttaacgtagatgtgttatgatcagactgattatattttttgcatatgctcgtgctagaaaatagtttcagtttaattatattaaaaaaacaaataacgaaaagtgtctatgttgtactattttgcaaaacataaggtctaaattattatttaacaaaataaatggttcaatcaataacttttgtaaaatacagtatccaaaattataattatcctctattttaatattattattattattttttaaaaaaaaaaatcctacttcactgcttgcacaaccattgtaatatatttcataatcctctttcccacaactgaaattctcaatcctactctcaaaataatatgaattactaaattctttttctcttttttttttttttgaaatactaaatttattatgttaagaaaacataaaggttaatatatttgtggagcccaataaataaaaagattaactaaagacgcaagatcggtaaagtatatgaggcccaaagcaaaattaaattttagagcctctatatatatggtttaattattgtagaaattacactaagaaaaaaatttaagagaacttttttatgacataattaaataatagctttggggtat

SEQ ID NO: 395851 - DNA, 1247 bp, Cannabis indica
ttccaggaggatgccctggtttgatgggacatgatgtctctgactcgaaatgttactactgttacctaaaagagttccaggagttgttcaatacaaagtattacaacgagacggtcagaagtgcgaaaagaaaagaatttacccaactaacccagaaggagaatatgagtgttactgaatacacaactcagttcgatcgattggctaggttggcctcaggaatcgtgccaattaatttcaacaagaaagaaaaatacctggatggattgaatccaaaaataaaacaagaccttatgattaccagtgaagacaacaccacctatgctgatatggtgggaaaggcactgtgagttaagggcacagttgggtgcacccaagagtctcgagggactcaggttactggtggagtccctactcctcccacctctagtcatggtaggggcggtagtgactcgatcaccaaccagaaatgaaaggcaccatttgcacctagtagcttaggtcagagtaagaggtttcgagggaaccagagtcgaggcaaccgtcagggtggttccaaaacccaatacacttacccgaaatgtcctaattgtaagaagcatcatctgggtgagtgtagagagtgaggatgtttcgagtgtgggttgccaagatactataagagagattgcccgcggcttaagaaagaggaatagaaaataatagcaaaacccgctctaacaagggtatttgctttaactcaggctgatgcataagctagcccctcagttgttacaggttagctctcggtcaacaactcttactactctgtattgtttgactttggggccattcactcttatgtggcggccataatttttgataaattaggtagaacgcatgatagttatgataaagggtttggaaccctactgcctggcagagaactagttatctccaaaatatgggttaggtctatgccgatcataattgaggatagagagttgagtgctgatttcatagaattgggtttagttgattttgatattatgcttagaatggatttctcatccaagtactcggccagtattgactgtaaaatgaaagatgatgatcttccaactcgagggcgaggaaccgtttgtacttgtgggatcggttcagggatcccggattccaataatctcagtattaactgtaggaaatattttaccaggatctagatttactaccatgtatgtttaactaactgttggatatattttacc

SEQ ID NO: 395852 - DNA, 818 bp, Cannabis indica
caatgatgttaattttcatgcaatcatattattattgttaatttgtaactgtagttggtcttgtaaattttgttactggtttcattgttgtgttgtgaacatgtataaactttgttactggtttctattgagttgtttcatagaaaaattaaacacaatgaatcagatatctcaaatagtcaaatctttttgctatattctttttttttttttggcaaataataaacatgccattaactttttcaatgaacattcttcaatgttatcaactaagtttgttctagtaaatgagaacagagtgattcatgcatttagaaaatgcaggttataatcacctcattgacaatttatgagttacttcctatccattctttctacttaaaaaaaaaaccaacataaactatacattcaattctttattttgtatatgttcaatcatgaatttaattgttaaaaaggagtgatccttaacccttttcctttaagcattcacttatgactattagtgaacctagtcctgtctagcggtttagttattcaagcctatagctaaggggtattcattggatcacatctaatatttttgggcctatccagatccgatccaatcatatattggatgttagattttaccatctgatccgatccaattaatttcgtcatccaattgatccaacatccattggatgttggattggatcggttctatccattggatgtatttcatatatatttatttgtttaatttgagtttatctaatattttagacctagtattttttggattggatcgggttcatccaatattttaaatccag

SEQ ID NO: 395853 - DNA, 796 bp, Cannabis indica
tattgtgtaacaattcacaaataattgtattgttccaaacattttccatagtattaaggagaaaagagaagagacctgcgaggagagtagggatgaaaacctgctccttccaattccaaccgccggaagaagaagaagaagaagaagaaggtggattctctggttctagggttttgggtgtagctgaattcatcttctaatcatgaaaattattaggggagaaatctgaagaaatgggatcggttctttctatatgctttgctcgccgagatcaacctttgtttcacactccattagagactttttttttgcctaaattataatgtgttttttcttttatttatttattttatttatttttgtagtaagttttttttttatttatttttttattaaggttataatgtgttttttaattaattattttcttaattattaaaaaataaataaaattttaattctgaaaatccttagcatttcgctgtacgtggctcacacaggttggtcggcacatccaaatccttgtggcggatgtgtcagtgaactgatcaaacctgaatgtaccacgtgaattgtgtcgttcaagattttgagtataaataagtacactaacaattaataaagtaaatatttgagaattaaaagaaataaaaacattgaaatatttgctataagcataatatatgctagctctataaaaaaaattaggctaattagtatttttctcccaaactttgacatgtaccaaatcatgtcccttgaactttttttttccgttaaaaattccctctgaact

SEQ ID NO: 395854 - DNA, 1120 bp, Cannabis indica
cctatcatcaatagcttagccaacaaatccttcaggaccttcactctctacactcttcttttgtccatcagctgcaaatctctccggtcatccctctaattttatccttttttgccatgttttttcacttttattctaaaaacccagcaactcatctctcgctctatatatttctcaaatcctttaattttttattttttgttgttttattttcttttctttttaaagataaatcaagctatttgtcttctttttatttttcagaacaagagctatttatcaccattttctgattctcaagtgtaaaaagcttgatgatttttttaatttctaatatttgtgagaaaaacatagaaagagaacatggatatccataagacatgtaatatgcgcattatctaaattttattttaattaattacttttttttttttttttttttttttttttgcaatatgtcattacttgttgtgcactcaagcacaaccaagaactcaatgcaagaaaggaaataggcttagaacattaaaccagaaattataaactagaaaagtaaattgatagcaagaaataacgaggttcagtcgcaagttttggataggacctaatccctgggtagaaataactctattggttgtgatgattttattattgaatggaaaagattacaactgacaataatggagaatcaagaacacaaagcacactaatggtgattcacaccagttacaaaataagctcactaaaggcagtcgaaatcttgaaccagaacagccttgtaacaccccaaacttgaagagaattcatctcaataaagctctcattcttctttgtgtatcatgttgggttttgtgccctaaataaaacttatttcaatataatcaaatttaattaataaagatcataatcacattttatgttgcatggttcacatgatttatttcatgattgtatttaatgtataaattctattaagtccagaacatatgtatttgttcatgattatagtgttgtcaacacattggaatataatcatgattatatgttcaaaaagtttaattccttgatttgtcagttcactagatttagactgacatgataatcagcgataggtatactt

SEQ ID NO: 395855 - DNA, 576 bp, Cannabis indica
tattgaccaaccatgatatacacatctgacatctcattgtaagtttcctctaattctgtttgaccccaccaacttttgctatataaggtctaacccaacggcattttcctatataaagtgtgaaattttttttttttactccactgcaattgtcactctattttcaaggggatatacactgttacactattaatagtggagcatgtattttttctttttagtttttaatgattaaataatatttactaatataatttattagatttaataaatatttagctttaaaatattcttattatattgataaaataatagaataataaagaatataaaatttggtgtaatttttagtgttgtaattggaattaaaaaaaaattagtgctaaaatagtaactttttggtattaatttaataaaaatttaaattttactattggagatggcggaagtatttgctgtatgctctaatggcacgtttactatacagtaatcagaatcgaaataaattaatggagaaatgtaacggaataaatgaaaaataatcggaatcaatatttgtaatatgttgtttactaa

SEQ ID NO: 395856 - DNA, 621 bp, Cannabis indica
gtcaaaaaaaagagagacaaaatattttacatgatagatccaaacacattaaaatagatattaattatgttcaggacatggtaatgaacaaggtaatacgtgttcatcatgttcctgctgaaggccaacttgcagatctacttactaaacatatttccagttctaggttccctagtttaagagacaaactcaatgtagtctattctaccaccttaagtttgaaggaggctgttaagggtacttagtttatcactggtttagttagttaaaacaattacaagtagttagctttttctgttttgattttcagttagtgtcaactaactttctgttagttgttgatgagttttcagctcattcattgtgtataaatagctttgtatttcattgcctggatactaatgaaaaacagagcattctttcaattgttctttgctttagacattaacagacttaacctataattattttaaatttcatttttatatatagatacccattacaataatatttttaaccactaattcataatctaacaatttaggtgatgtttggtttagtaatagtaatgaaatacccaatgttactaccactttcgttagctcataacaattttcacat

SEQ ID NO: 395857 - DNA, 737 bp, Cannabis indica
tatatggaacactttttaatgggcaatacctcttaatggtaactaaaaaaatttatgatgtgacaatctaataacttgctatggcaggtaactaataataatttttaaaattacattatttttttaatgaaattgggaacaataattccaactcatattattaaagaattagaagttatttttagaaactaacctattttgttgaaattactactttatctttataaaactaattaataaacattaaataaatagtaatcattatcaattttcacgatttaataaatcctggaaaaaaatatataattagtttatatatagttgaagagaaagggtttaaactttgatttcattcataacattttatattactctaaaattagcataattaattatatgttatatgctgctcagtgacatttcttttgtaaggattacatctataaattataatgtggattaaggcgatttatgaattttttgagtgaaattgaatttttttttttgtttttattttttctagtaataaataatttcttagtgaatcttatttactctatatatacccgtgggaactgatgctatatatactcgaattttagttttttttttaatttaatttaatttatttaaattatatattttttatatattattttattttatttaaatttaaattatatatttattttttaaaaggtaaattaaatattatttaaattaattttaggattggc

SEQ ID NO: 395858 - DNA, 692 bp, Cannabis indica
attttgagtaatgtataaatattgaaactatatccaaatttaaaatatttttaaaaatagaaacttttgccaaaagtagcacttatatttttttattttttattattattttaagagaattatttattcaacaaaaacactaaaaagtctcaatgctagtacagtgctaattgagataatttttttttttttaatttaaacgatcatctattaattgaaaaattagaccaaatggtcattacaaagtaaatctttcaggaggtaagaaacaggaaaacacctatagtatcgatagtgggcgaaggcccaccaagccacattatgaccgacaaaattacatgatctgggaatacaaaaaaaatacaaccgataaaactactagagagctcaaaacaaaaattagagcagtgctcaatctgccaatacaacgagacgcggttgatagagttgatgacgaccctcgagtcactctccacgatgacaaaattatgaccattgagctttgcggtttccagggctaagcaacatgctgccacctcaccataaagagcatctgcaaagtccagtctagccaaacgaacctagaccacctcccctaaatgaatattatttgacattattttatagttttgatatgatttattttctctcactttccatgtattctatttcattcgtacttaattactttt

SEQ ID NO: 395859 - DNA, 860 bp, Cannabis indica
acaaccgtggaacaactaaaaaacaagtggaacaattgtgaaaacttaacacaatacacgatataaaacttacacaatattttttaaaaaaataacacaatatttaaaaaaaaaaaaattactgtcccatagtaaaaaagtaaaaaagttgaaaaatttcagtatgtggttttaaaaccccacaaaaatatactctaaagtttttgtttacaaaaatattaaagtttaaaaattataaaaaatacactattttagcaaaaagtaataaaagtataaataaactataaagtaaatagaaaaataatctcatgaggtttataatataactataaaacaattaaaaaataatttattatttttaatcaatatgcatttttgtacaatagtcctcacattacattttatttaattttataatcaaatgagtgatatggtggataacatttaataaaagaatgaaattaaaaattctttatcctttaaaatattttttaatattataatttatatttatattttttaattgtttaatctttaatgtaaaattagtgaaaaacatttattttatatccatttatcaattatcccttgtgttactcgtttcaccataaaattaaataaaatatgataaaagaaccatattattgtaaaagttatatttcaagaatattattaacgagttgtatattataggagacacaaaactatactctaattaaaaaaattataaatacactataaaacaaataaaaaaataatctcatgacaattataatacaaatataaataaattataaaataattaaaaatgattattatttttactaaaaatgtatttttgtagataaaaaagttcaaag

SEQ ID NO: 395860 - DNA, 1318 bp, Cannabis indica
  modified_base (92)..(92): a, c, t, g, unknown or other
attaggttgtattactaattaaaatatatatatatagtatattatataatgaaaaaaaacataaattttaaaactataaatccaacatatanaataaaatataaataaaataattaaatatataaaattataaatattaaatatgattggatggacattggatgatattagattggatcagttcggttattcattagatcggatgtctcatccaatatccgatccgataccaattgtaattttaaaatttacatccgatctgatccaattatgattggatattcgattctattgaatcgactggaattggatcaaatgacttctgcacaccctaattatttcgataagtttgataagataaatcatttgcatgatatattttaatcaataatatagctagttgtttgcaaataataataataataataataataataataataataataataataataataataataataatatagcttgttgttgtgtaaaaaaaatcattattaaagtatgtagaaataatttttaatagttttaggttattatatttacaccacaaaagattacgaaaataattttataaatttaatcataatattttaataataaaaactttctttcacattcttttatgttacatattaatataatttttattttatttttttaaaaaaaaagtatctcttattttatttttacactgcatagataatttgatttaagagctctttccaaaaagcatgaatgtaaatataaaatattttcgggatataagcttcgcggaccttatttttctttattttaatatttaaaatatatttcattttatatatgtacctttttttaaatgtgataaggaataaaataaaatattaattaaaatatatattttcctccattagtatattgtttagcataaactcaaattagatgacaaaatattttgaatatcaaaagaaatattattccctataaaaatatacagtcaaaaataaaatgagatacgtttgttataaattatgtgcaaccctattggcatactatttaacgaaaaataaatacatattaaatagatattgtaacaacatcttacaatcttcaactaaccaccacaataaaaggacattcgaccctactctcatgtagacggttggtgtcgaagtgcttgcactactaaaagatagtcctataacgccccagtattttgccttattttacaaaaatactattttcatgcataatttgaaaagataaaaaaataatttaaatacaacagtggattttaaaaaaaaatcaaaatgcaacagagaaggatcct

SEQ ID NO: 395861 - DNA, 1046 bp, Cannabis indica
atatatataataatattacattgttagaagtaattaaaagtatatatagtaagttctcaaccaaatgacatacatacaaataaatgaaatctagctcttacatgatttcattggttgagaaaccaaaaccaatgatctatagataatagtagtcactcatcataccatgcattaataaatgtgagagagatgttttaacgaaaagcatggtcatagtcatgaaaatggaagatcttgtggatgaaatgagacaaccactttgaagctacaaagcaaagcaatgccatagaaaccataccaatcttcaatgtttggctttgtttattggttacaccaacatatccaataagagctatggacatcacttgtagcattacttctaacactttcaaacccttgtgtgcagcactgcagctactacaattcactacatggctccaatacctaaaaaaatatacattaacattattacataagatgtccaaaagggtcttcaaaattaatattgaaatattgtgataattttgttgcattatatatagaacctgtccatgagttgttctctaggaggggttggaggaagagcaccagagaatttgccaccccaatcaacttggccaccaccatacttgttaagccattttctaaaagcaaccacatgaacatctgattttgttggcacaaaacatgccttattccatttcccaactccagcatccatcattttgcgctcctacattcaacaacaaataattaactacaagtatttatcagtattggttacgggtatcacttttctcaatattttttttcttaattaatggtagggacccgatcaaggagaactaagcccgtgtctacggtctacccagactcgtggcccccaatatttgtttcaattatatatatgagcttgaaaaaaaggttatttagtttgttttgtgaaaaactttcggtaacaattatataattaattttttgattaattaatcaaaaaccgtgaaaaaattacaagattttgttaagtgatttttaaaaaaataaaa

SEQ ID NO: 395862 - DNA, 1256 bp, Cannabis indica
tttaataataataagtattttaaaggtaatttactcatgtagtattaaaaaaacaaagaaatttataaatatatatatataagtaaaattaaaattaaggaagatatgtgttgtccgtatttttttttaagacacgtgttatcttagtttaagccctaaagcgatatggatttgagtcaaatatagtccgtagatttgtatctcaaatctacagtagaacctctatccaagaatatacttgggactaagtaaattatattttaattgaaaggttataactaaatagaattgcattcaaaatacaaaaacatatcaatgtaacaacaataacattaaataattcttaattatatcataatataactatttttgagtaaatataatatttatacatgtattaaaatttagaataaaattattaattctatataaataaatttataaaatatatgtatgtattttattaagatgtaattattcttatatagatgtatactttgttaatacaggacttagaaaatgtataactaattacaatttagaagttattcttatttataattggcccaaattgggatttaattttttttttataacaaattagagattattcttgaatagagtattcttagagtattcttatatagaggttatattgtatatatactactttcggatggttttgttggataacataataagcggatctttattactttcaaataattgactcatttcgttcattgatttaactcttatatcctatctgttacagaacatgattaatcttaaaactagaacaaaagtaacatttcttcacaatgttctacagtgcttaaggtgttgcaatacctaagtgtgggctattgctcaacactatgaggcacgaaaataaaggaagagagagctataggggtggcggctagggtttttagtgagaggagggtgtttctttcttgtcaatttattacaaaattacttgggttgagacaagaatgatctccatcactttagtataattttttttttttgtatacgcaactaattagcccattttctaaccattaattaaataaaataaataagagaaagaaaaagaaaaaaaaatcctatagtggaaccacttgttgggcttcgactatatagatttttcctttattcgtgggctatttacaaaaatatgagaaaatgatgataagttttgataaatatggcataaatacttaattatactaaatatgacatttttaaaaaaa

SEQ ID NO: 395863 - DNA, 1062 bp, Cannabis indica
gaccaatctcttttcctataggttttgtccctatttataagggctttaggaatgacagttattctcttttgatcttatttaggtaatcgttcacgaaacatgaacaatctccacgtttcatatttacaacatgtggataaaataatgtaactattgagaactgctttttgttcttatcaagaagtagtttttctttgtcaagataacatactccaactatggcttgcattcttcaacgatgttcacgaattactggttgtattccgcgagatgctagttaagatgtttgtcatcataatttttttacggtaattctcaaactagtctttagaaattctgagataagttgtactttgtttatttctcttaatattttaacatactcatgggtatatgggtcaatgagttacaagctcttaaagatctcgttatctaccctttctacctaactcactctttcatgctattcaattgcctcgttcatcttagtcaaattctttggatttagcttataatcttgttatcctcttaaatcattatattgatagtaccatgcgatgtcattatatcttttaactgaagtttatcccgaggcaggaaatttattcattcctcgcatttattattctcttcattcttttaggtctacatggagacgtgtcatgttcatatttcgcgctcaaaatatgggcataacaataataattaatacaatgcattgttatatccaaacatagtgttatttattatttaaatcaatacgacccttatacgacctaccaaacgagccctaaaatagtaaaataaaagtctagagacaaattcaatttttaatggaaatgtgatacattttattaccatgaaaggaattaaaaaacaagtattcatacaaataatagtttacaacaaagagttaaaggtagtttacagaaaagtaatttgtttaaaaaaactataagccaactaactcgattggaagaggtgcgaccattccaactagtgagtcagttcaagcattggatcaatatttttaccttggcacattgcagtgaatactttgtc

SEQ ID NO: 395864 - DNA, 919 bp, Cannabis indica
aagatttttgagtaacctccacctgcttacccatgtcttcggttattatgaagacataggtatcccgacccgtatgtcttcacttaagacataggtgtttgttttctaaaaaaattgatattttaaccctaagtcaaagccaccgtttaacaccgacactgccgagccctaaataccacaacaccctaaaatcaaactattattttttgaacattaaactcacttaatcctacatttatatataatattaatagggttcaaacaaaaaaaaaaaaaatcaatcaataacattattttcgatttaaattaaaggttagaaatatacttgatttttaaataactaccaccaaatttttgagtaccgatattgattttccaataacaaacgtggattttcttaccaccaccgcgggtatcctaaccctatcacacacgcttaaaaaaaatacacacacaaaaaaatgtaattaaagctaaaagacatatattaaagtgatttatacctcaatacaagtaaaaaggcaatataaaaaccctcaaaattgctgctattagtcgaccgccgttctccaaaaattttaaaaaattgttggcctagtgttaggaaaaatatatttaactacacaagggtacgtaatcaagtagtactcacataggtgaggtcgatcccacaggaaattgaactgaataccattaaataaaacttatgtttctatttggctaaccaataatttttatgacaataaaattaagaaatacaataaaataaaattcaggaataaaaagatttaatcaaagatgacaaattagggaaaagaatcatgttgatttaattacccaattgttaatgctaattactactctctttcttaatgtgaatgacacattataagaattaacctaactcttttcagatctt

SEQ ID NO: 395865 - DNA, 1039 bp, Cannabis indica
tttttttttttaaaaaagataatctatttttgttggaaatttgaggataatattcattactgggattttcttccctaaaatatatatgacagctttcaagatacatttcatattttttgtattctttatttagacaattatatatttatttatctttaagaaaaatatattaattaatatcatatttataaattaagattagcaaatatagatttcccatcaaaaaaataaatttaaattaaaacacctaaacaaaaagaaaaagaagaagataaaattaaagaggagaaggaccaccattcctttacttaattgtccataaaagagagatataagattttcttcaacaataaaataatccaaagaaaacaactccatgccattgccaacacatcatttagctataaacattaattttcaacacacatttcaaccctaaattatgcaaataaaatggtagaataattatattggaaatttgaaaattatataagtcatgtaaataagtaaaatctttaaagcacaaatatatatcttcaatttcatcaagtagctttagtcgtaaaagacaattaattatagaaacaattttgtaatcacaataaataagtgcaataaacattatagtttccattagatgagatcacatataacaaaataaaaaaccttacattatatacctatcaatttcagataaggacggattatactctctattaagaaaatttaatgtcttctaattatttatgattaattaattaataataataataataatttttgtatttaataacaattaggtgacatcagccaatcggatccttgtatttaaaaaataaataaataaataaaggttacatccttaaatgccaaattttgagttggcccttgtatttctcaaaaatccttactccttttcataataaaacaatttattattactctctaacattaaaaattaaaggctaattagtaatttttcccctcgaacttttacatgtactaaatcgtgccccctgaacttttttggccgttagaa

SEQ ID NO: 395866 - DNA, 1261 bp, Cannabis indica
gaataagataaactttcattgaagaaaaaaaaaagctattcccaaaatagaggagtacagtccgattttgggttaggaaactcttggagtgatttaatttttcgttctagtttatttatttatttcttaagatggagagaaaaagaaaaataaaactacaacaagagatgggcactgataatcctcaataaaacaaaaaataaccaaatcacaattatagttccattagtttgagaaaaaaaataaaacgagatcaatatcgttgatgaggttgaacaagatcttgttcgttgaagagatcgtacatcttattggtcaatagaagctagatctgagagaaagggacgtgaggatccacggttgatggaatgccagatttggattaaaatgtcataactgttttttgatatagtgtaaaaagggatttttttaattaagtagttaaattaagtatagaaatccaaatttgtgattttattattcgttattagatcaaaattcgatggtttgatatttttaaaattaatatttgtagttaaatttgtttagtaaccattcatgggtaatccccattaagaagtgttccccatatgggtgatattaataggatgtatacatatttggtaccctatgttttatttaaatacaagtttggtaccctgtattttcaataatatttatttgatacactatattttaaaaacatacatatttggtaccctaaactcaaaattttttgataaaattttatcaatataattaaattatcttcaattttacaaattctagattcaaatttaattatttaattatatataactgacaaccgtttggccaaattagtaaaattatattgattaaatttactttagagtaccaaatatgtattatttcaaaatataaggtactaaataagtattattgaaaacacaaggtaccaaatgtgttttaagagaaaagatagggtactaaatgagtatattcccatattaattgttcacctttattttagttttcattattattagaaatttttacatgaaaaatcctttttagacactttattacaaaattaccctcacacgcctattactacatttctacttacaaagttatttttattacacatttaccacttactcatcataccatgcatacacgtgtgctctccccatgcatcatcaatcaaatcatactctcttccctctcttttttcattttcttttcatttcattttcgattcttcatttctgttctctaa

SEQ ID NO: 395867 - DNA, 977 bp, Cannabis indica
ttggatgtggcccaaattaagaaggtatattttgtagatttgtggtcgtaaattaatttccacgtattgaatgaaatgcttcaaaaatacacaacatgcaacgtggatagatatcttatttattcacaacatataatatttattattaatgaaatctatacactgagattcatcgatctataaatataaatatatatatataatggtgttgtttgtatacgttaaagaaaaatcacaagccccacgtactacactcagaaaaaacactaaaaaaattactatttattagcccataatgaatttattcataataatacaaaaaatttggcactaaactcaaattaagctctttcaaaaaaaaaaaaaaactcaaattaagccatttaattttattttattttttctccattactattaatttctgtttaagaaaaaataaaaaagaggagacaaaattttgttagacacaagattcctgggaagcctaaaaatcgccgtttatgaatttaattatgagatctaatgctaatctcatttggagtttctgtatatatatataatatagtacaattgatctgatactgatcaacactttaataataataattaaaaaaaaatggatatggtttacacgtggagacaaagatcatctttggattattattcacgatccttgattcactactaattaattgatataatatctcttttgttaattaataatttaaacaggtatgtaataatgctcattgggtgtataagaattaagaacgaagtaatgaactgacccaaatgtattgtacttaatttttatattattatagttgtttgttttggggtcattcaaaacgacacacttaatttttttaaggccttaattaatttttcactgaaggttaattgatgggtattttcaatttttttttatgagaagagtgtgaaatgttagataaattaacaattaacccaagatctat

SEQ ID NO: 395868 - DNA, 1921 bp, Cannabis indica
aaattactaaaaccaaacgaagcgaacaaagatgtaattaattacaaaataaggatcataactcagggaaaagaaaagaccagaaagaaaggaatgaatcacttactgtttgaagatgggttttcgcacgacgaaaagctttgcaactgaaattgagatgagtaacgtgatatattctgagaactcctgaggttgaagaatatatctaaagaaattttctagaaatacgtcaatgacaaagagggtatgcaaatttttgaaaaattggaaatagttttttgcaagaaaagcttgagtttttgaaaagcataaatggtgaaataatggtttcttttcagttttataccatgagaatgatcacctttagattaaaagaatagagatctaatggataggaacaagagagaattggaaaagatggcatttaatgctaatgatgtgcctcaaaatcataaaccgtaaaaattcaaaagcatgcaatttttcaaattgggttaagatagatatacccttgtaatcatttaaaaatctctctttatcaaaaaagaactttttaaggggcaattgttatacttaaaattcggctacactttagaaggtgacacgtgtcaattagtggaatatgaaccgtttggtataataaccttatatcatttaatgcaaacaggaataactcattaaatatagaattaatagagtacattcataactcactgactgtatagtcttatgcgagacaaggatacaaaactattagtgcctatatggacgagacatcaacctgcttcggaatacgtagatccaaggacaagattcatttatttaaaaagaataagtgaggttactcaaatcaaccacggacaatatatagcaaggcatcaatatttctatacataagaaatattgacgaggccaatcagttgttaaacacttagcatattttccacattacaataactaagtgtaacaactgggaaatatgcatgacacaattgcccagtctgcgagaccttatggtcaaagagcagttcttaagtttactcagtacattggtgctcatgctattgctggaaggcatataattgtctaagttagcattgaccatctacaggcaaagagagatgttgttgttcaattcaacatcaaccgtctttaaagataagaatgataaccagttatgcggttatcaattgttatccacacgtgtttaattgaaacctaatcgatttccacgtttcatgaaacgattatgtatttcaaatttaaatgtaaataatttccaacctatattcctataaataggggcagattctacaaaaaaaaggatgaaaatctttgaaagaaaaactatcaattgtatattgtattaaatactcagaaatatattgaataagatagactcgtggcgtagatttaactgtaaaatcaagtaaaatacctggtgctattattatatttgttatactttattaatcttttataaattatgtgacaaatttattacgaaaaaagcttattattggttaacgaaaatctatgttaacattggcccatactcttcatcttctataaaagcatattctaatggtggcgtatcaacaaactcttcttcatcttcagaatctacctcgccattttcacgtatcaccataactctcttattcgggcattggctagctatgtgtccttgcccctgacatttaaaacactttagctcactagaacgagatgaaataagggttgtttttccttgaggggttgtagttgtagtggctggtttgggtgtagaggatgaactaggttgatcctctttctttgggaagtttgacctccaaggtgttgtatttagattgtgtggactttgcattggctttgagctcgaattacccttcttgagttgcctttcaactttgattgccat

SEQ ID NO: 395869 - DNA, 688 bp, Cannabis indica
gccatagcatacgcagggatagcatgaataacaactttcagaagaacctctttcccagccttagaaaaacacttagaagaccatcctctaaggacagaagcaaccttatcacaaagaaaagtaaaagaatgatatttacaccgagaaagacattgaggaagacttaaatacttataaccaaaaggcctatattctagattaaaagtttgaaaaaacaaagcacgaatttcctgagcagtgttgggagaaaaaatgaaagaagatttagagaaattaataacctgccccgaagccctaggatagatatttaaaaccttctcgagagctaagcaagaatttctatcagcagaataaaacataaggctatcatcagcaaaaaataaatgagagatagaaggagcatgcctagagatagcaattcctttaagagactgagcatcttgcctaacctgaagtaaagaagacaacccttccgcacagagaataaaaagatagggagacaaaggatcccctgcctaaggcccttagagggcctaagagaacctctaacagcaccattaataagaaaagacaacctgatagtagaaataaatttcatgattagattaacaaacttaattggaaaattaaaatggaatattaagctttccaaaaaatgccattcaacacgatcaaaggccttagccat

SEQ ID NO: 395870 - DNA, 1052 bp, Cannabis indica
acattttatatgtattaaagcttaaagcttaatttttttttttttgttctcaataatgcaatttagaattctagtttgaagaaattttataaaaagataaatagacactttttttttttctttttaatctttaaaatgatttttattaatattattttatttaagtttttttgaatttgtctttaccatatgaattatataaaactaatattttaattcgatttcattatacataactaaatagatatagtttggaattcttaccttgctctttaataaattcattatttaattttaattaattcaaataatattattttttaaaaaaaattagttaaaataaaattttctttgagctgatattattaaaacaaatttagttaaaaattagagattttctaccattaaaaggtggattggtttgtgactcaaataataataagtacaaagtgatgttagtattttatcatatataatagccttattatactttgactgtttgacatttagattgtgctgcggcctttcatttcaacttatgtatttataacattaattatttaattattgtaacatttttttaaaaaaaagaatatatatataatctaatataaaactaaatattcgtgctttgcacaaaattattatttagtatgtataaaaatataaggcttttgatatttttttaatttattttttacttaaaaaacatctttcaatatttttattatgttcaattcttatatataaatgattaatttggtaagagtactatctgttagagatattattacaatggaagaaaatcaaaatattataactctattgtaatacaatacaaggaccaacaaagagattaaataaatgttacaacaatataatatacaatatatatatatatacactatatatattatatataagaaatatagaagaagatatatagattacacaatattatataacatatatataatatgaagaagaaaagatcactcactcagaaccttgagtgtagaatagtgtggatcaccatgacttgaacaaggtat

SEQ ID NO: 395871 - DNA, 842 bp, Cannabis indica
accactcctaacaataacccacacgcctctcaagttacatcttcaacacctgatcttatcacacatcttacaccagcacaatgccaacagctaatatcaatgttagcacaacaactacaaccaacagatgcctctgcatctgacaaagccgtgataaacaattttttaggtattattgaccccttcttgtggattatggatagtggtgcaacacatcatgtgtgttgccaccttgaatgtttttcttctattgaatctattcctactgatctttctgtccacttacctattggttcaaaagcaaaaattcacaaaattggtaatgtggtccttaaccctcatatcactcttaaaaatgtcttgtttgtacccaattttaagtaaaatttgatttctgttagtgcactcacacacaacacaaacattgctgctattttccaatgtaacagctgctatatccaggaacctacaatgacatcgaggattgggatagctaagagagttggcaacctatactacctacaacaatcagacattgaggacaaacatttagtacaaacttgtaatactcagttgaataatatccaatggcatacacgccttggacatccatctgtaatggtctctaataaaatcaacaaacagttacagattcctcatattccaagttcttttaattttcctacttgtcacattgccaagcaaaagaaattacctttccaatcaaataataacattactttggcaaacttcgatcttgtccatatggacatttggggaccatattcccttccttccattgaaggcgacaaatattttttaaccatagtggatgatcactc

SEQ ID NO: 395872 - DNA, 791 bp, Cannabis indica
acactatgagtgttcttttgcatttctcttttgaaaaaaaaaatattagtatgaatcactaagattctctataatctttattaaattaaaatatatagaactcgatattaaattgcaccaataataatattacatgttatgagaatgtcttttaagtattttacttttgaaaaaaaacattgctatggggcaaatataattttgaaaatggatgacgtctaatttatatttatcacattcttcatcctcttcatttttatgtttcttgctttttcaagattcatttttcaagccaaagttttaagttgcttcatcggtacatcaacgtttagaaaagtaggcctgtgaaggaatgaaataacagcaagaaaacgaaataaactgattctcattaattgtgaacaaagaggttacagccttttatatacacagtaaatgaacaaagacaaaagacaatactacccttagaatataacaaacataactaaaaaatagttaaggcagttaatacagttattgtatattgtctttaactttccccctcaaactcaaggtggagagagactcgactttgagtttgcttctgagaaacacaaatctggtgttggataatgcctttgtgagaatatctgctgtttggtcgtaagatggagtgtgtttcactgtgagagttttagctaaaaccttttctctgacaaagtgtaagtccaactctatatgtttggttctagcatgttgtacagggttggctgccatctgaacagtacttaaattatcacaccatatgattg

SEQ ID NO: 395873 - DNA, 1106 bp, Cannabis indica
taaatttcagggtcggccctgcgtttaacggtgttatatatttgtcgataagatgtcgataggttatcgataagttgtcaacaattgttcatcgacattgtattaattaactttttttgcacatattcgtcgatatgttgtcgacaggttgtcgacaattgttcacccaaaagtctaacatgaatgaaaattcagggagcataatttagtacatgtcaaagttcgaggggcatgatttggtatatatcaaagtctgaggagcatgatttagtacataaacaatcactgaaatagtaaaattaaatgaaattagacaaaagtccttaaatccaacaatctcaatagttcatggaacatttttaacgatcttaaaaattcagggtgcatgatttggtacatgtcaaaattcaataagcaaaagtcataattagcctaaaataatagtactatatatgttcatgtggctaaattatataaccacacttccacaattccaaaaccaaatctcaaataaataagtttaattgagacttaagttatatgtaagtagtaagatttaagtgaatggtcatgtgacagtttttaattggtttaagtcattaaattttaaatttttatttaaaaattaacttaaagatactaaaaaaataacatgtggataatgacttgacatttaacggtcaggttttcaaaaatataactaagtattattaacgtcaaaaattaaacttaaatatttatgtgcaaacaaaaattaaatttaaatatttacgccacaaattactcttacctttgctctttagttttttttttttttcttgaaaaagaacgtttattgataaataaatttataccttacggtcattacaaaataagtcctgcggaatagaagagataatcaagttaccaaattgtctgtgggtagaggcccatttgaccatattatgggcagaaaaattataaaatatgggaatacaagtaaaaatgcaaccatcaaaacatttagagagtttccaacaaaaagaaaaatagttctcaacctataaataaaagggcattttacaattttgtatacattattttaattaattacaaaatatgtgcaa

SEQ ID NO: 395874 - DNA, 621 bp, Cannabis indica
ttcgataagtcatccactgagaaaggtatactgtgaaaagttggtatatatttttaacaaatatatataaatgagagaattttactttgtttcttgagaaaaatagcatgaatgaaaatatgtatatttatatacctggaatcatggtctaagaggaaagaattactgacggtgttgttggagtcttcggtcattaaaaccctcatgttggatataacctaaagcatagttgctgggcaagatgagtgttatatataaaaatggagttctatatcattatatgtaaaactcgaagataagtacgatttgagtagtacaggttcacactatgataaacgacagtatttagaaaaacgacattgattagaagcaaaattaccgaggagaaaacaacaataagttgaggaacgacaatgattagtaaaaacgacaagaatcatttggaaaaacttacatctgtggagacactgtgggtgccatatttgtcatcccagtacattgtactgatcgtgaacgacatttaacaaagttggggctttgagtagccctggtggtttgaattatccatcgttttcggttgttttcgattcacatcaagggaatattattattattattatt

SEQ ID NO: 395875 - DNA, 636 bp, Cannabis indica
taataacaaagctgtgaagaaatgtattcataaattttaactacaaaaacagcatatccactaataaatctaataatttaaatatttatatcacaaatatttaatttatgtatttataatttcaaaagatttaaattataacattgttaaaacaaataaataactatctctaaaataaacaaaattattaaataaacaatgtggtaccttatttacttaccaactataccactttagtttgaagactgttatgagtaataaattttagtgaaagtattccttcaaatgcaatgtcatcttcactcttcaatccattatcataaaaattatcaccagttgaaccacaaaatcaatatccaatttttcccatctattatatcaataaatataatcaacataaatattatggaacacttcttaatagatattacccatgaatggttgctaaacaaatttaactataaatattaattttaaaaatatcaaaccatcgaattttgatataataacgaataattaaattacgaacttgaatttcttgttaggatttataaaacacttaagaaatatataaatcacagatctaaacatattcctaaaagtactttaatatagaaaaccctaaatcataaatct

SEQ ID NO: 395876 - DNA, 970 bp, Cannabis indica
tatgaggtgaatcatcactgctgcgtattacgagcaggtataaaatctttattgcgagatgttgaatatttatgaaaataacatcccgacaatgctgaaatatttcacttcatgaatcttgtcatccttatttagatgagatcacctcacaggttgagtcttgagtttttttgacctgtccgacagtgtatttattgtgagaatttattatttatctgccatggcattcaattcaactttttcattaattagtcccaaaaatggacatttatgctttgataagtcaagtttgtgtacatactcccacgaatctagttgtagtacacattcccagtacacctggtcttaaataaccgatccttggtaagcaaaactgaagaattgtcatttgaaatcaaagaactttccgagttaaatgaaaaatttgaaaaaagaaatagtttcaaaaatgataaaattagtaagttgtcagaggatttaaatgcaattgaaaaaaaatataagaatgcttaatcctggttcttctatttggaggagatacagaattcaggtcaaaggaatcatgtggaacttggaacatcaaaatctcgaagttcaaagaaaactacttttgtttttggtggaattttgccttctggtatgtctgttccaacttctctgaaagttgttgcgtcaactggctctgttgagttaacagatcagttacaactagcaggtaaaacagtgcaccattggagatgctcttaaatgttataaatattgcagggtttttttttataatataataatctattaatatttataaacctaataaaatattaaaaaaatgcgagaattaaggagtggatacatagaactatttagagtgactttagagtatcatgtcagcttcttatacttcaattttatattgatatattgatgattttgagtttatataattttttttttttttgataaatcagaagtt

SEQ ID NO: 395877 - DNA, 557 bp, Cannabis indica
ttttttttaaaagcactatattaacatacacatgatacatagacacatatcatgtattattttctcgtgcactaggttaaattattttatcattaaatattaaaacttaaaatattcatctcaattcaataaatttaacataatctactctatatattttattatactaaataagattgagttgtacaagaaaaaaaatttgaatggtttataattttttcaaaccgtaattattaaattggcacattaaaatacatctaactcagtccttgtacatccctatagttcaatatgtattattttatttataatgtattaaatttgtgtgaattttatattttgaatttaattcaagttaatttatacaacaattcaaattcaacaccaataatgccaattggattaggtatatatatatttttgaacgattattattttaatataattatttaaaattcgttttgcatcaccaaatcaattaaatattaaacataaaatatcattctcaaataatataattatgggaaattttatttacaccccaaaaatttctaaag

SEQ ID NO: 395878 - DNA, 943 bp, Cannabis indica
tctaaaatgattagattttcagtaatgaaataaaatatttaaccaataaaaataacaaaccgaaatgattattttaatagtttgtgttagagagttccacgttgataatatgtgggaatagagtaccataaataagaagcatgagctactcctcttattgccaattaattttaagaaattaagatagaatctcatgcatcttaccatacacttattctacatttgtccaccacactaccaaatttcaaccagtccaaaaacatgagccaaaggaattgcttgtgattcggggatagtaaaccaagaatatccattgtgccaaaagtgtcgccgatcaaaaaagcaagattggcaaagcaaaaaaaaaaaaattgacaccatcttgaaagtggggtgttaaagagtaccatatgcatgcgttatacctctctatgccaattaattttgagatagaaacccccataaatcttacctacacttcacatcattttactttctaacaacactttttcattcttaaaatggtattagaaaaattcaaagttttcacggtcttagcctttaactttcatgtgggactttcgaccaatgtgtgctagttttagtgttgatgtctttaacttattttaaaaattaccacaaatttttaatgtgtatacccacaaatttcttaatttggtcttgtgagattcttttaaatatcatattcagccttatattttcttaaagatcatttattatattcatactcttatacttaaacttgaggaaggtgaattagatatagtttcatatatatatatatatatatatattgaaaatatatgagaaacattataacttaatggataattagtaattttttccctcgaactttgacatgtactaaatcgtgccccctgaacttttttggccgttaaaaattccccttaaactattgaga

SEQ ID NO: 395879 - DNA, 1006 bp, Cannabis indica
aagaaacaaagtaaactttatgattagaggttacttacataataagcagtaacagttccagcagagttgccagcgacaagcttgagttgcatatcgatttggccatacatgaactcgttcctagactcaaaaccagagccagaagctttgtcaagagacaaagtaagaagctctccattgttgagcatcttagctctaccatcaccccatgtgatctcaaaatctttgttgagatcaccagctgatgcagccaatgccaaagacccaaaaacagcaaacaacactagacaagccatggttgagtttgaatgatagaaaaagattgtaattgtattgatgggttagggtggtgaatgttggagctatatatacacttttttgttagattataggtatgttatatgggtttaatgataagtaaggtggaagtagtatgggaaggttcattgttattagtttaatgtgctgtggccagttagtgaataatatttgatttgtttattaattatatataatagtgattacataattttgcattgtttgcggttagttttaataatgtctaaataatacagagcaatcctctgtttccatacacaattattccaatttcaattatcatcaatatatgctaatctttggttgttaattgttttatgtttatttttatttttatttttatgtatagccttttaataagcagcatcaccgatatatcatgtatatatgttagggtaaatattattttggaccttgtattttgtaaaagttactaattagattttctgttttgttaaataacaacgtggattctatattttttaaaatggtacaaataggtccattaattgattttttatcaaaataaaatttaataataatacgatctaaaggtgttatgacaaaactgtttacattttctgtatctctttgtgttgggcattgtcttcaaattggttatattaaaaagagttgtcgaaaattaagctcagaaacctatttttac

SEQ ID NO: 395880 - DNA, 901 bp, Cannabis indica
ttagttacacttgtgtattatatttgggccaaccgaaataacaaattttgaaatggcttgatggaaaataatgatagaatagtgtacaaaattaaagatgtaatcaaaaataaaatttcttgtatttggcttaaacatgtaactaaaagtgaaaagaattagttttatatattgtaaagtttttatagattttttaggtcctctttaatttggaggatgctactaggctgtacaaattattttttagaataataatatacttgttgattcattaaaaaaaagttagttagaaatttagaattaattagttgagcccaattatataatgttaattatttaaaggttgttgtaacttagtacattgttcagttatatatagtgttagtaacaaaattagaattagtaactattagttattgattgcaatcagtataaatatactttgtaatgttcttactgtcaaattaatgaaagcatttctttccttcttattaatcttgagctctcagaactaataaatatgtcttatttgtttaaggatgttggcggcaaaactacttaattttttttttttttaactatctaattttgacggcaaaacctattaaactcccatttcgttttgctcttacacttttattcaaaaatctcagttaagtgccacagtaaactgtccacgtaatattaattattaaaatattataaaaaataaaacaataataaaaaatattttattttatttttcttttctttctctttttttttcttctaccctaattccatctcgttactcctctttctctctcctgacatcactatcttgcctccatacttccttccatgacaaaaaaaatcttttttttttctttttgatattctgttcttcactctaacttgtgaa

SEQ ID NO: 395881 - DNA, 956 bp, Cannabis indica
tatgaattataaagttgatagatcgattacaaaacaaaaatttattaaaaaacattaaacttaacaacataagtgtattaatataaatataatcaaagaaaatttgtaaaaataaaaataataacactccacgcaataatttataaccagttaattaaatttctcacgtgaattaattatatgcatgtagtcaatatttatttgccaccaaataatatatattagaaaaagtacgtgaatgaagtgatgactagctagctaggaaattaattaagattatcatttcttattattttgaaatggagagagatgatttgtcatttgctatatcaaatttatataaaattatattcattcaaaaatatatacatatataaatatatacattatatataaagaaattaaaacaaaaaaatacttaccacaaacttttttacttttaatcacaacaaaacttgtgactaaaagtaaaaagttataactattgtaaattattattcttatgttgtaactaattaaaaggtccgtggctaaagtattagtcataaaattacaatttgttgtgactaaaactaaattaataacaatttgtgtctaaatactatgttttagtcacaaataatttttagttgtgactaaaagtcatatttagtcacaaaaaatttatgttgtgactaaaagttatcactaaagtaacagttttttgtagtgacttatcctttcgaggtgcgctcctataatgttggtcctcctaaactatggtggcgtgttgcttatttctggtagaaatgctaaaaggcactagtggtgcctagcaccctcttatgtgtcatatcgctatggtccaactaagtatcgagtctcatataatttaatataatagctttttagggagcatcgctagccaatcgcaatgcgaaatgtcgagaaagtgctaggcactactagtacctaat

SEQ ID NO: 395882 - DNA, 1071 bp, Cannabis indica
ataaaaatcgaaaattcgaaatcaactatcaaactgactagatcgtaactaaattttggttccacgtcatcattgaatttggtggtcggtttgagttacgatttttttaacatggcggtcggtttcgagtttttaaattaaaaaaatagttaaaccaaaaaactgttaaaaccgccaaaaacaccaaaaatcgtccaaaaccgccaaactgaaaaactactataaactgtacgctcggttttatacgattataatttctaaatagtcagttaccgtttttgtaaaataaaaaccgtaaccgatcagtcaactataaaattgtaaaaaactgactataacccaccaattttcaccactactacgaatcttaatagagtatcttaaatctttataattgtttgggcgtcaaaaaaacacccttattaagaaaaattttatttttctctctttttcttaatttttacaaaagaatatgcctatgagtctacatgcagtatagaaataacctaacatgtgcaatgaagggttgattggcaaatgaaaagttgccacgtcaaaagtaaaaatcaaaacaaatagaaggccacgtctgctaggtctctttaccctcgttctcttcattattgttttgcccttttcagtaaccgaacgaagcggacagaaaagccctaatctctacaattcttccggttgctctctctcactacactgccgaccaaccatttaccaagatcaaaaagatcaggtccgttcatttcattctttacccaacatcaaattcttctcctttgcttaaacttttctttcacaattctaacttatttccggtaaaaggaacatttttgtttaattgacctttttttttttttaataatttgagataaacccagttgaaatttttgcttccattgctcattgctacaccgtaaagtttttttactttttcattaaaatagttctgtattggttgagttgttggttgtggttgattcagttggagtttaaagtcttcaattatattattagctcggtttttaatttcaatataagtcaatgaatgttatgtaaatt

SEQ ID NO: 395883 - DNA, 809 bp, Cannabis indica
cgacatgccatagcatgttcatacgcagacgtttctctacttcgtttcttgggtaaccgcggcggaaagaggggcaacatcagcctcggcattgcgatggccgacatagtgatggttgcgttgctttctcaagcaacggggcggccgtgagcatcgggctgatgggttaccaagggaactcacatgtgcaatggaagaaggtttgtaatgtatttggcaagttttgtcaccaagcagcggctgcttttgtggtgtctgcacttggagctattgccttcctattgcttattgtttttgccctcaaacgtctccacaaaaaattataatgatccaatttatatagttttttttggcttcataaataattgtgttaattaattaggttttttattttgtttattttttttttttaattattgccactttgtagaaattaaatgttgggttatcaattaatgttgtggttatggggtttgtatcaactctaaataattaagagcgtttttttaaaaaaagaaaagaaatattatagtaatactttatatttttattacattaaaaagtgaaactggatacctatataaatacttgttattagtattttcggatagctagtaagtggactacaacaaaagcccatgggaacaaggcccattcgatgagctcagatgaattattcagacagcttgcttatggagagaacaaagctagaagagaaattatattgtatacccattttgttttatttgttttatttgttttaatttttacttctatttttataattttttagatgtatccacttttat

SEQ ID NO: 395884 - DNA, 581 bp, Cannabis indica
atatatatattaccgataataatgagcctctctacgaaagatcaccaaaaaggaggaagagctccacgaaatttcggcaatgagactaaaaaagtcaataatatataaagtttcaataactatttaaataaaaataaataatactaaaaaaaattccataaaaatttaataaaaaaaaattaaaagaaagttaaactaatagctaaataattaatataatttaaattaaatattttttattacctaacaataaataattcaaataatatttttaatacataaaaacaaataatctaaactaaatatttttaaaaatacctaagttaaaagctaaataattaatctaaactaaatattttttaatacccaatataaaaaaaataattaaacaattcatttaattaaataaagaggtataaacatatatatattgtagaatcatatatacggtatatactaaatatataaaaattaatattatatatggtgtttacccaaattttaacgacgatgacgtgtcaagagtagcaacacatggcataaaaatactgagactaaattaatgaaaaatatgtaaagtc

SEQ ID NO: 395885 - DNA, 1590 bp, Cannabis indica
gagtagttttagcttcacttagactttggtttagtttacaacatctcaaaacaaaatataatttaattaaataagtaaatgaggtgtaagtgttgtacaccttggtgttgtgtcgattatggattgttttctttatgaatgtacaattcaccatgaaataatataagttggagaaacattctatatagaatgacatatgaatgatttcaacacttgaacacttggctatgtaaaagcatataaatcaaaacatggtgactcgagaaggttgccaagctggtgatcaatccatgaggaccacatctttatatgccttgtttttaattatttatgtatttgtttttttgtcttgaaacaatctattaaatttaagtatttcttgccaacattgttaggaaactttgtccatttctaaatgaatatttctgtagtttactggccctcccataatggagctagaaaaaaatatcatttaggggctaatattcattttagtatgtttggggagctttatcataaatttccctaatcttgagttatcacaatatactttttcagttcagtttacatatgaaatatttaagaaaaaacaaattaagctctgccattggctgtaaggaataacattggttcttaatttatacgagcatacgcagtgtaagcaaccaccaaagttatttgtttgaccccacacataattacatttaggggtgacgatctaatctgcaaagtgtggatactcgcacttgtgcggattagattggattagaaaatttaaatgcggattgaatgttgattgacatgtaaaagtaaccgatccaatccaatccacatatctttataaaaaaattaaaaaattatatatagaaataatattttaatgtaaaaaaaatagtaatttaaaagtttaataaatataataaaacaattttttaaaacttaataaagcaaatgtatattctattcttatatattcgaaaaaaatgatcctagaatttaaacccttaccacaactatatattaggaacttaactattaagccaaacatttttatttatttcttttaactttaaattatatttaatactagataattagtttgtgttaatttttataattattttaacatattatattataaaaaatatccacccctcaactaaatcctagatacactactacttgctcccaagagatgcaaactttctctataaggatggggtcgtgcggggactcacttttatattggggttgtaattccccgtctaaataagaaaatagatagggagtcaaggacgagaattattttttgtccacaaaatattaaacgaggtggagacggagatctttcgtcgcgaaggggatttgattaatattttttgtattttttttattatattagtaattttttcacaaatttttaagatttattttggatatagtaattattatattgaataataaatgtgtaatgttttaatgtttttttatatatatacttttaaaataaattttagagaaattatatttgcacttataaaattatagatgcactctaatattaaaaaataattaacttaaattaatttt

SEQ ID NO: 395886 - DNA, 621 bp, Cannabis indica
acaaaattgtaaaatacccttaaaatatttggaaagcatattaatttaaaaaaattcccaacaactaatctctactctattatttaaaatgcatcacaaaaatttaattttctctattttacagcacacaccatataggattgaccctaggttaaagcggggcccactcctattaggggccaaataaaaaaaaaattaataaatatacatatttttttaataatttttataaatactatttatttttataaaaaggaccccaaaaaaattatcttttctaaatcctatgtttactcagagggccctgacaccatacaacaatttctttaaaatacactaaaacttaaaacaataaataaaatattaaatttatagtattctataaatataaagtaagaataataaattttaaaatgatgaacaactttagagcattgatgtaagttatttttagtttattttcttttaaatattttagagaatctttattttatagtaggggtgttcatcaaactgcccgcaccgcaccgtaaaaaaaatgcggtttgaatttttcttaaaccgcacggtgcgatgcggtttgcagttttgaattgttaatatacggttcaaactgcaccg

SEQ ID NO: 395887 - DNA, 624 bp, Cannabis indica
ataaaaaatgtaacttttcctattaacgttgctctagtttaattatttctaaaatatgattcttttcaagttttcttttcacatgttttctcgtatttttttaacactctttctctattttacaaaaaaaaataaaagcattcctcatgtatctttctctcttttacatgattaataaaagtaataaaaatagtattttgaatattttgtagtttactcagagttgatttatgaatggattttacatattttaacaaggttgatgtcttgttatttttctattgatatatagttgtctttttgtttatatatagttgttttatagttattttatgttgttctttaagtgctttataattatttttatgtgttttttttaaaattcacaatgcatgtgccgcagtaaatgttgacatattaattatatattacccattatattatatatctcgttttaaaattataatattttattatttctattattaatgtaatttgtatttaacttttaaaaaataaattatcatttttactgtcattaactcgaaaagagaaaaaaaaattgaaagtatgaagttttaaacaacaaattctagtacaaaaagataaattaagttatcaaaa

SEQ ID NO: 395888 - DNA, 764 bp, Cannabis indica
aaaaaaatctatatattttaaatagtccatacacatttacataaataatgtctgtttgtagtagtaaattgattttaatggaaaaagttttcattactaacaaatatttaattggtaaaaaaaatgtaaagaaagtaattaaatagtggtgagatggatcccactattattatataagaatggtgtggattctatggaactttcaatccctccctttctctatctctctctctcattttcttaatttctttctaactcttttttattatgtctctatctctctcttctttctatctctagaatggtttacatttcttatatatagatataattttttgaaataagtttaatattcttatttacttacttttctttgatttcaatgacctttttataggctttgttctatcaattagtacaaagataatgggtgtgtctatgatgaaaagatatattaaacaaggaaaattttcattttaatggtttttatgacaaaattaataatatatagatttaaaaaaaaataaaaaccaacaaaaaaaataaataataaaaaaaataactggtcacttgcaccagttaccaaaaattatttttcctattttttttttttttcttttttgttaggacaacatgttgcttgactctcttgagtgaaaacttataatctacataattaattaaaatcaagtaaatcaagcgacaagtcagtcattctatgaggcgctatgtcgcttaacctgttgtcctaagtcaaaaataat

SEQ ID NO: 395889 - DNA, 1038 bp, Cannabis indica
aaatacctcttgaagcctattagagtgtccatggttcttttcgtaaattttatccttccagattgattagaaactctcaccgtagtctttcagattgattcaccacacacaaggactagtgtgtgctattacgataaagtgtatataaagttcttgttgaattctcaacatatgagtaagaatagtttgagagagatttttttttgttttctccttgttaatttcgaattctatagtgtagagcatcatctgatttctcaaactagacttatatttacagtatttaatttctaattaattaaatcatatttaattatttaaacaaatatctataaccgaattctgctatagatatttcagatgagggaatctctaaactatttgagagcacatctaaaccatcttgaaatatttttaactactttttaaaatcaaatatttatgtaattgaagtaattaattaattaattaattaaccaaaaaacaaaaatcaataggaacaccctaccttgtcttaattaagacacggatggtgtcttttgtcttgataaattgtcttaataatttttttcttgacaaattttgtcttaacaacttttgtctttttttttctatttaattaatttaaaaaattatttattacaaaaaacaaataattataattttgctaattcaaaatagattttctaaactttcatatacaatttttatctcacccttcgatagtattttacggtagcgatccaaggaccatggacctataattctaagctctaataaactacatttatttattcagtctcatcaatcaaataatttttgtttattaattccatgaatactccactataaatatgaaattaaactcttagtaattataaaattatatttacttagttttattacattttctattgatttaatcaattctagtgattagtcctcattgtgttggttcgtaattagttttggtcaaattatcattttacccttctaattacttctttatcctttagtaccattaattcactagtagaa

SEQ ID NO: 395890 - DNA, 788 bp, Cannabis indica
ccttaaaaaactaaaaaaaaaaataaaaaaaaaaaaaaaactagatttataatgacaaaacagtacactactcatatgaccaggaaaatgatttaactaatttggttgcttatataatatattttctgaatatatattaccttatttttggggccctgagcctagaagtgaaatcaattaatataatatgaaacaaaagctggtaagttaaaaaaaataaaagaaaaaaacaaccatattgaggtttagtagtagcatgcattcacgtgattaggttcagggcactgccatttatacaattattatcattattatataataaaaataacatatttttctttatattctacatgccacactatactgcaaagcttttatttacccagttaaagtcttttggaatttgtctaaagtaaattactacgtttcaaaaaaattactaccaaaaaaattaaaagaaaaaaaaaataaaagctttccaaaagctcaaatagctcatatcatacttttactttttaaaaaaatatataaaaaaaaatgctagctagaataaaaagtgttctaatataattcagattgtctttttcataataactcagaatacatacaaatgtacattacatacagtgacagacttaggaattttctcttctaggagcttaattattatataaaataaattatgtaaagcccgcttagtttaatttagaaattagcagttaatcttgattaattatgaaattatttatagctaattaaataatttattatactgttatttattgaat

SEQ ID NO: 395891 - DNA, 595 bp, Cannabis indica
acatcacaattaactttaagaatgcttaattctatttcatccaccgctcaaaagacacaacaatagaaactgttgcaacatattcattcaaccttgtagtttaagcacttaactattatgtaaggtacgtaagtgcactactaacaacctgttcaatcacagagaacttgttatctaaccactaacaataatgtgatggtgagccattaaagaaaaaccaataacgaaacaaaataaaatcaagtgatacgaacaagactaaaacactctaaatcatgttagagagacaagattaaaacgctcaaaactatgtcacatagataaaaataaaacactcaaaactatatgacaaagataagactaattacaatagcaaaattcgaattgcaataagaaaatacaagcccgattaaactgtacctaaactaagtcgacaggccaatgaaatttctcttttgtaaagctttttaagaaaaaaaaaatgacttgaagcattaattaaatataaaaatgaagtagaaaaaagaaaattaccaatatattattttttaacttttgtttttttaaatatatttggattactttggtagttgct

SEQ ID NO: 395892 - DNA, 1208 bp, Cannabis indica
aaaatcccttaaacactcattggaatgttgtaaaaaggattctcagatacataaagggtactcagaacttcggattacatctgcagtaatcttcttcccttgatattgtgggattctatgatgctgactgggcatcgaaccctgatgatagaagatctacatcagggcatactgtgttctttggagacaatcttatggcatggtcttgcaaaaagcagcatactgtttcgaggtcaagcatagagggagagtatagaagcttggctaacattactgctgaattatcatggatgcattcactgttttcagaacttaaagttcatttgacaaggccccctgttatttggtgtgacaaccttagcacaattctactcaccttggaccccgtgctccatgctagaaccaaacatattgagttgcatttgtattttctgagagaaaaagtgcaacagggcttcgtagaagtgaaacatgttctagcagtagatcaacttgcagacgatctgattaaagctagttcaagcacacgctttgctgatttttaaaccaaactcaaaattgaggatgttacaattatgagtttgagggacgggtattgagacagctaatgatggtagttagagtcgttagtctgttagtttgttacaggttgttataatctgttggttgctaatgtatgcatctgatgttgtataaataaatactgtttacagtactaacaattcaatgaaatcattcttttcaatttcaatctttctctattctttttcactctttctctgttctttctatctctttccttctctctgttcttgtcttctatacaatgtagaatagacttaacaagtaaggatgtcaaaaataatatggaagaaaaataaagttcaatagtatatctttgaatgatgtgaagatatttaaaacttttaaagaatgccacaattgaaaatactcttattatgcacttctttcaacctatttgatatactagtaatgttccatcaagatatcgtatgttatacacgtagcggacccagatagaaaccaagagaacacgcccttatatttgtaaagagaattactaaaaagcactataggttcctagcatcctcctcgatgtcatatcgttattattgtaattaagtatcgagtcttacataacttaaaaaataaattttagaaaacatcgctaaccaattgtaagacgt

SEQ ID NO: 395893 - DNA, 995 bp, Cannabis indica
acttctctctctctctcaaaatggtatgaatattaatattaaagttgtttgtttaattttatttaattttactaatttagtaattatttatgtgttcaattatattttctaaatttttatatttatttaattatagttttcaaacttttacatgtactaaattatgtttcttaaattttgattcatgttagattttattttttattaagattagataaaagtctttaaataagagtttttaacggtcttaattaatcatattaatactatatattacacttggaaaaaactcaaaatggacaggaaactatttctaaagtagtcttcaacttaagatacaagtaaaaaagagctttggcttaactcagtgtcactgcctactatccatattatatcatcagtttccactacttacatatacaaaagtatattatacataattatttcaattgcataatagagtagcataaatccattaataatcatcagcaaatttaaatcaaaaatttaaataagtaccttagagaggaaaccattgaaaataagcaagttcttagttactatcttcgtgatcctttggctggcacaactctcctgcacccaaaaatatatgccacttacatcataacattgtttctaaaatttctttccatgattttgttctaagaaatgacttgtaataaattcaaaaacccaattttgtatcttcttcttcagttgccattaaattgtaactaatatgaaaacgtgaaatcaaaatcaaaagagtgttgttttttttcctttgagctagggttgaaaaattgtgttttttgcaaatgttaatatattttttaaattccaaaattaaaaatatagctgttacgatctgcagtaacagaataaaaatttgttggtgtagaatacagatttatagtaacataacagatataaatagtgcagaaattaaaaacttgactcaaaaaaattatacgtggtattagtgttctttcaaa

SEQ ID NO: 395894 - DNA, 805 bp, Cannabis indica
atatgtaatttttccttttatttaatacaaaagcattgtaactttattaaaagaaagcattgaaactgtgtaagcactgtttggttagatcatctccaataaagatgcaaatgattgatacaaatacaaaatatggttcatttagttaaaattctactctaatggtgtgttaaattataatgtaaatatatcacataataaaaagtaatccaaatttaaatcagtacatagcataatgtaaaatttgcatcacgataaatgatatgtttttatatttactattatgttatttttaatattttattattaattttagtttaacaaactcctttacaatgtattataattaaatttatatttatctttgtattattagtattattttatatttttttaataaattattaattgaatattagatgacatataagatttgtaattatgtattagagtacaataataaaagttgatgtaaaaaaattcaatgctctttctccattgattgcttacagcagataaagatctggctgggttggcagaccaaagcaatatctttggctgacttggttcgtatcatagagaagaagaagataactgtgtttcgaaggcatatattatctgcggcgtgtgcaatgttagtgtaccagctatggagagctcgaaatgcaaaattttggcagcaaacaaatgatagggttcgaatgttattgtacagaaagttaaaaatgtatgtaagactagaatccaaagtgtatgacctagcaaagtatcatagaagattcattatggtttagtgaattgtaaa

SEQ ID NO: 395895 - DNA, 1022 bp, Cannabis indica
taaaaaataaacaaaaaagaaaagtggaaaaaatgatggtatattattggagaaattaagttagtaattatctagctatacaaatattactagatgctcaattatttcactgtataatacttcatatacaaaaatgttaattaattagcaatcgatcaagaactctacaattgtagtatagttcctctaaatgaaaaaaatctccaaaaaaaaatatgtagtggaaagctagatgttatccaaaaaccaattctagaagtaaaagtgttatatatataattgagatttagagagagattaaaaaaaaagacaaaagttcaattttcttttaaaacaaattgagatttataaaacacaaaaaaaatattaaaaaaagaaaaattcagatttatatatataaagagattaaaaaattgagattcattcaaaaaaaaacaaataaaatgagattaaaaaacttgagatttttttaaaaaagataaaaatgagatttgtcccaaattctgcacagggtgacgtgacatccttcttattgacacgtggagtattttaagacttggacgggcagtaatatccttgtcatgtcattcatggttgattattccacagaaaataactcagttgaagaatgagaaaaaaggtccaagcaaggtaagtctcactatgtaacaagctttgattttacaacaacacgaatatattttattttagggtaaatgcatcttaaatatctactgaggcactttccttttctatttatcaattactttcctatttttgtgagactttcccacatgattattgtaaaataggaaagtaagcaagttttcctttttattctttatgtatttcgggacaccaaattaatgtattatcttccctagttataaatagtggagtcattttactattcagaaatccaaaatctattttttgagagagcacttatgcaatcaaacatctataataaattatatgtattctttttttttgtgaaagaagtgttctttattaaatcgagc

SEQ ID NO: 395896 - DNA, 1011 bp, Cannabis indica
caagacttttacttggtcagtggcataagcacttcattttgaaaatctatggcgaaactttctcagagctttctgttgaaaaataatcaattgtttagattatggtacagccctttatactgcctaagagcatctgtagtgtagcgatgctatagtattttataaatagaaaatgctgctatggtggtgtgctaactaaatttgatacatgttcaaagttgtatcaaatttgtcataataataaatgagctttataataacaatactgacattgtagaataaaaaaatagaaaaaacaatagaaaagaagttttttttttttttttattttaataactataaatttatgtatgtatgctgaagatgactgctttatgactcaaataatctcaggttgttggagatcgtaaaggtgcagtttttggtggcttggtcgaggcacccttaaacccaaccaacaagaaaaaatatcaggtactactgaaagacgtactttattcaagctcgttcagtgactcttttcttttctctgtaagtgactttgaactatgaacagggatcaaacacgacttttgttttcacagatagacctggtcatcctgttatctttcaccctacaggtatctgtatttcagaaaatagtagagaactgcaaaatgttatgaaatccctacatagatcctacttgctattttagacatttatttctttgagagagaactaattgcagtaaacaaacaggcgcgaatcgctatttcactttgtgctcccttgactttttagcaattggcgggggtggtcactttgcactatacttggacaatgatctgtaagtagtttccgccccctatattcttttattctgaaataaataagaagaaaaaataagaaaggatgtactcctcttttctttataccttctattgaagattaaaatttggtgaatggtgaattgcagatgtaatttcattgtcttttcaatgctttttttatttatttatgttaaattat

SEQ ID NO: 395897 - DNA, 937 bp, Cannabis indica
acagccttagcaaaatcaaccccaagagttgaccaattcttttgataaaaataagcattcaacccgtcaagaccaggggccttatccccagaaagattgaaaagggctctcctaacttctttagtagaaaagggctcatccagaaaagcaacatccgagtcctccaggaggacccaagcaatcaaggataaggctggtggcatcagcatcactaccattagaaccaaacaaatcagagaaataagaaactaccaaatttcccatggcattatgatcagagacaatattctcatgatcatccttgagaaacttgatagtgttattcttcttacgctgagaagcaaagtgatggaaattttttgtatttatatcgccagccttaagccactgagttcgagccctttgcctccaatagacttcttccttataaggagagcgtctagttcagaccaaaggcattgaagatgaaatcggctctcatgatcacaaatagaatcatcctgaatcctagcaatttcattttgaaggtcagaaatacgagatttggtggatagattagccgttttattccaagacttaagagcagaaatacacaactcctgtttggacagaaaagaatgaaaaggactcaatgaactctgattgtaaagaccactatcccaagtagtcttgacaatggagaaaaaattagggctctcaagccatacattctcaaaatgaaaccttcttccagacctaggaagagaattaaaacaaacatcattaagaataagctttaaagcacgatgatcacatccaaaaaaagagagatgatgcaaaacatgttgggttttatgccctaaataaaactccatgtcaatgtaatccggattattcaaaatcaataaagaaacagaagtatttttcattcatttgtgtatgttttggttcaccttat

SEQ ID NO: 395898 - DNA, 715 bp, Cannabis indica
aaattagaaattgtattgccacacaaacttttattatgaactagacagcaccaataaaaaaagatggcttgagttttttacctactgatatactatacatgacatatatcttatacaatttgtctatccatgctaaatcatgatgttttacttttttggtaaaatgaaagacatcacttctttttatatcatgttttatacactttattttaaaacatagatggttactgcatgtaaaatatataatgtagataaaaaaactgagggaagagtacattaaaatagacaagatgatgtattattttgaaaactatacgagttcaacgccacttcaatttactgttttgaaatatttttttatactattgtgttattttccaatattcactttcttttctaattcatcgcttaatttttatttattttttgtctcataaataaaatatcaatttcataaatcaatatatataaaaatataaattattatttattcttattttcttttaaatttttacattgttatctaatattttataatacatatgttgcaataaatacaatagagatttttgtattttcattttacataatttcttagattttttgaattttagaaaaattttaactaaatatacttccatctattctcttcttaattctcttatttttgttacttttttttattacttattaaaagtaaaaaaaacctccaaat

SEQ ID NO: 395899 - DNA, 661 bp, Cannabis indica
atatatcggccgcaaagcgtaagatgtttactagtttaataatagagtgacaccaaatttagtgtcaaaattggagatgctcttaatagattaaactaatcaaatcatgccactaagattttttaaagtagataaaaaaaaatagtacataaaaaaggaaaataaaaaaaaaaaaaatagataaaaaaaagagaataaacaaatgacaaaataaataaataaacttcatcgtggccaaaattatataatatataaataaaataaaaaataaagtaagaaattgtaaatttaacaaagaaaggtggaagtgtgaccagttttttttttggttaaaacagtttccccttccccttccatttcagctcatctctcaaaagtccccaccttccttccactatcatttgttgttgcatttttattttcaattagagaaatgcaactattgggcctaaaactcaagaaatactaaaaggtcacagtttatccttctatatattaatattgctattaaaataattagatgcttgatacttaataggctaattaacaatttttccccccaaactttgacatataccaaatcatgcctcctaaagttttttggctgttaaaaattccccttgaactattgagattgttaaatttaaggacttttgtctaa

SEQ ID NO: 395900 - DNA, 1105 bp, Cannabis indica
atcgtgcggattggattggatcggatactttgtgaacacccctagtaaatcacactaatggatcatatatccactaagttaatataaacatcaactaattacaaacttgtgaatttttgttacttatatgaatttgtgatttatcatttaattctttgttccctgattctaattgtacttgaagtagctactaaaataatttattaataattaatgtgaaaatgaaggtatttatgattttgaaaaataaaatataataacaacaacagataaattactagaataattagagtggaaatagtggcatgagttttagttacatgaacttcattttattaacaattaattaataacaattttaatataaatttatgacttcgtttttgtatctagtaatctataatttcttcactttcttcctagttttttttttttttttaaattgaatacacttgctagttagttcagcccaattttctttctcttttcttcttcacaaaacaaaaagattttttaaaaaaaaaagttatgtgaatcaattgaccatttttttttttttttgaaaaaatcaattgaccatttaagagtacgtacgatatctctttgtacttaattttcttaaatgatgacacgtacgtatatttgccagctatataacttgagtacgatgctcacagcctcagtttaatgtctgtaagaagcagttaaatcgaattacgtaatcctataattagtaaataaattgaccaacatgcacagtaaaattaaattgaatgttattacttattactaccaaattcaattacgtaattgtataattagtaaaaattgaccaacccacgcccttggtaaaacaatacttcattagtaagtaaattgaatcacgaatccatataaatagaggtgttcattcaatccaattctgttacttctttttcttttaatttaatccaatccacacaatagctcaaatccaatccaatccaattcaatccgcaaaaatacgaattagaacagttattttttattggttacttttagtattaaattatttaatatttataaaaaaaatattttttttcttcacataactagtaacaaaata

SEQ ID NO: 395901 - DNA, 1211 bp, Cannabis indica
tttacatttttatttttacttttttctattcaaggaaaatgattagtgctcaaaaagtagcacctaatcattgatcaactcttattataggcttagtatatatcgaatactcgtgcacatgctgctatactatttattctgaatccctaaattatctctttttactggcatttcttcctaatcacgggtgcaaatttctttcctacccttttactagctcaaacaatttcgggaccacgtatcaattataagtttctttcttatatctcctccaaattgaaaaagtgatgcaccagttcaacccgtataagataatgggctgacccaattataaataacgggtcggcccgagtaaagcatgccacgagtccaagcacagcacaaaatatgaactacgagccatgtcagatttactttttaaaatattgacacagaattattgcaggctttttaaaatatgagccagcacggtataatccctaccactacaacacaagtttgtttcttcaatataatgttgtgcaatgctttttccattataaaacagaataataatcataatatctttttacagtctgacctattaaataatatacaaactcggttacaataaataatctaatcacaagccctattagccctattatttagatcattttcatcatcaacatccttcgtcagaagttaacaagtccaataattatgtatgcttcaataatttactattgggacaaattacacaatggagacacgtacctgatactgatagcagctatacataacaatagaggttgatttaaatttgcttttgtacggatcatgtttcagtaaccagtttccactcacatgaaaagcacatggccactacatgagtggactctcttctcaaacaagtaggccaatcccacttctcaactgtctcataaaatttcattgaaactggttcctcttttagttttgccaaaatcaaatgcaccttactcactctaacattaaaaatgccattttcttactgtgatcatgtttgtgaaaactactaaaactggcctagttaaaagctgaaacttactggcggcgtgacctatatatcttaggactaaaaatacaataaaagctttccattccaatagtaatcccattagaaaaaatagttgattatgattatggtatctatcttatacatagaagacaattctatatattctcatgtt

SEQ ID NO: 395902 - DNA, 645 bp, Cannabis indica
gccagtccttgtggtatttatggaagatggtttaggagggatgaaaccatctgttgtgagatgtgaggaagtaggtgctggtgtgagtccagcaggtggtggaacgggtgtgatctgtgctgatgcatcaggtggtagtgcagcaggttgtggtgtgcaaccatctgctggggttgatgttgcatctgaatttgatgtgcaaccatcggctgggtgttgttttggaaccagggctggtgataaaacagctgctggaacatgtgttgttggtaaatctggtgttaaaaaaccagtgggagtgacacggggaagtgtaggtggcatgccaacagtgtggtgttgttgtgaaatggaatttttagtagaaaaaggtaacaccacatcagtaggagcatgaatgtgttgagtgactggtttcatggtgggaaggacattatcagaaaggattttgttaacttcagatggggatgtgagtgaaaacaatggaaatattgtttcataaaaaatcacatctcgtgaagtgtagatttgtttactttcaatgtcaagaagggtataggctttcatgccttgagggtagccaatgaaaacggaggctcgacttcttggtgtgaatttatgccttttagaaggaagggtagaacc

SEQ ID NO: 395903 - DNA, 1198 bp, Cannabis indica
tcattttagatctccttcaaccttcagccgggttgaaacttgcttaaagaagctggccgaccagcctctacacaacacgtggtcagccagccaggaaaggatctggtaggattttttgtacaattttacacgtggactgcgaattgggccctaacagcccaataaagtagctaaaaaatatctaagtttaagggcattttagtcttttgtaattaattaatttaatatacaaatatctacggatttcaattgtaaattagggttaagctctactatataaaaggcattaattctaatctaaaagacctaagtctaatcctagcctccaagtcattaagcgctaaggcctcattctaagcctaaatctataatatctcttcctcactctcactctctcacacgcctatacaagcattctcaacacttgagatttttttatcttaattcccattttgtattcataagggagctatatcaaatcccacctatagtgatctgaatagtattttccctcgatattaatacaattaaaagaggagtaggtcattacccattaactaaggaggtcgaacctctataaaattttgtgtattctttactttctaattctaattgtgtaacacgtggtaaatatcatcggatcaatggataagtattattacaacaacattgcgatcattcataaaattaggactataagaccatttctaataggagatatagaaattgatctatatttggtataaaatatagttctgtgatatttttgcatcaatttttattatgcatctctgatggagatgcaaaaataaaatatagctcattttgttaaaaatctactccaatagtgtgctaaattatggtacaaaaatctcacataatcaaaaataattcaaatttgcatcccaaaattgcatgatgcaaaatttacatcacaataaaatgttatgtttctatatctactattataccattttgaatattttattattaaaatttagttagcatgctaatttacattaaataattttcttaattattattattttatttattaaaatttacatacatttattttttgtaattattattatatatttttaattagagtattagatgaatattaaatgatatattaaattttgtcatttaagatttataattatacattggagcataataataaaagttgatgcaa

SEQ ID NO: 395904 - DNA, 557 bp, Cannabis indica
agaaccattcgaattccttataacggctcatattccaatcgtctgagaaagattatttattgttgcatcaacatttaatttcaaaaagcctgcaagtggagatgaccatgtagcagtggaattatagcctttttttcaagggagaagtagacagatttccaacatataccaaaagcacaaatacaaaataaccagtactaaaaataattcattacttacgctaaggcttgaaattataaaatataaatgacgtaactatacaaaatattttaaattaaaactttcaaatttgaacacatcacaatttaaactcacgcttataagaagcaaaattagttgaatgacgtggaaataatttttcttatgagtatattgtttgaattgtatttagtgtataattaacacaagtttcaccaaataaaataagaaatataaagtcttacattaattacaccttaaaatttgctcaaattgtgttgtttataactttatccgtgttataaaataatataaaataatataaagtagatgagaagaaagaagaagaagatgaagag

SEQ ID NO: 395905 - DNA, 863 bp, Cannabis indica
gatgttacttaaaaaaaaatcaagaatatgtgaagttaaaaaaaatgactttatataaatattttatgtaaataaaaatattatttcaatgacaaaagaaaaaaaatcataaatgagtacaatcatttcaaacttaaatatttataactgttaataatttaattgaaagcaaatttaaataatttgaagagatatttgcagcgaaactattttagcatttatagttgttatacatataattttaataaaaaaaaagtggttgtaaagtattttattgcagccgtatcattaaaaaccaactaaacccattaaataccacttcagaaacacatgataatatatattggaccatgtattaaataaataaaaaaacttttatatttttctctataaaaaacttttttttaattaattaaagaaaaattgatttaattttttatttaaatttgtatatttttaattaaaagataaaataaataataattatttaatatgtgatctaatattatgtcatcgtgtatttttgagttgacacttaataaatttaagttggtacataagagtacaactgtaattaaaaaattatacttttgctactatttttttattaggatcactgtaaatattaatgtggtttcaccactgctaacatctattattttagagtgcatattcaagtttatatagctatttaagagctcgtttggtacgctgcattgtaatatattgtattgtgttagattgtgttgtattgtattagtattatctaatacaacacaatgtttggtattgacttgtattaattgattgtgtaaagttataatatatttttaatacactcgatcccaacaccaactacgggt

SEQ ID NO: 395906 - DNA, 897 bp, Cannabis indica
acttgtaatatgtatagcatagataaccaaagaattcagacttgtttggtgctatagtcatgtgcatatatatatacagttttggaaggagtataatttctcgttacaattaaaaacaaattaatttttaccaaaaaaaaattgaatgctttagttgaaatatataactttgtcgatgtatggaactagaaaaacaacaataatttattattattattattattattattattattattattattattattattattattattattacatatctagaatatgaatttggaccacttaattgatcaccattaatggagctacatatgttagagtaaataatttctatctagacaatgccagttaattaattagccataaatttagtgaagacatgtacctaatattatttttatttaatataataattaattaatttttgagagtcaaacgatacattaattaattgattattaaacaataaaaaaattttgttttccatttgtagtgcatatcttactaactaatgtgttgccgtagtaccattttgcattatatgtaaaagagatacacccgaaaagacatataataaggatttaatagatctagaaaaacaacttcaatcagaaacactctcagaaaatgaattgacagaatcgacaattcagcatcactctctacaatggaaacgaaaaaactcaacaatgaacaactctcggtaggagagaaattagcagcacaaatgtgacaatcttgtacttgtgagaattgactctcttaaagagaaaatattttaattgaaaataaacaaaaaatacattagtaaaaaaaaataaaaaataataattataacaaataaaaaaaatttattacaaagtttataataaattttcactgcaa

SEQ ID NO: 395907 - DNA, 1299 bp, Cannabis indica
catattaattatatattacctatatattatataccccaatttgacaatataagattttattatttctattattaatgtaattttttttaacttttaaaaaataaatatcattttaactatcaataactcaaaaccgaaaagagaaaaaagagttgaaagaataatgttataccaacaaatttcatacaaaagaaaaataatattttagtactaaaagataaatcaagttgtcaaaataaagtaaaaagaaatcgtaatgcaaaaacatattcaggagttgatattgttttgcttattgcaattaggtcaatattttgttatttttcggttattttatagttatcttctggttgttttatatttattttcatgttgtttgttaagttgttctagggttgttttttatttgtttttgaattattttttagtttacttaaacaaaatatttttataattttaaaaccttaacacaatatttttgtaaatttggtagagtaaaaaatgtaaaaatctttgtgtcccagtatttttgtaatctttttcccgttttacagtatttttgtaagttcctttttttttcttcatatgcaatgtctgacccaatctcagttactgaataatagtaaaatgagaatcatatcttgttgttgttaactgtgggccggcagtatgctaattttagctttaggcaaaactaaaatttgggactagtgaaaaagttaagttgttaagattggaactctaaacatcttagttattaggaaaattgtaggaaatgacccaaaatcatagaactatgttagtaaatattctcatttcaaaatttatagagaaatgaccattttagactatttattatttatatagtcttttaccacataaaaaaaattaacaatttttttttcttcatatttttgttagaattagaagcaaattacttaaaaattatgatgtatttatattaattttctcaaaatcttttttatttgaaagtattgtcgattttttcaaatttttatgagttgttgtgggttgttggtatatagattttgttgaacagtatatttctattttactgtatggtatattattattcttagatgatatttattttttattttgctttgtataatagtgatatataattttgttagcataatacaaatattttaatgtatgtatataattttattggcatactatatatatttaattatatttttatatattttaattgtatgatatattaataattttaaataatatttaattagtttctattttattatatacaatggt

SEQ ID NO: 395908 - DNA, 952 bp, Cannabis indica
cttagcatgattagacacaaggcgcaccccacctattagcagacatggccctgagctgctgtgatcgtttttcccatgcaaacttcagacttttcaagattaatttgttgccccaagagtcttgagtatctttgcaaaataagcttcatggtgtcacatccattctcctttgcattgaggaacacaaagctatcatccgcaaagaataagtgagaaactttgaccctatctcttccaaattgtaccccatttatgttaccagccctctatgcttcatgaataaggcaagataatctctccgagcaaagtaaaaagagataagggaatagagagtcagctgagcttctccccattgataagaactgagaaagacacacttgtcacgcacctcataattttctcaatccaattctcctaatacccgagatccctcatcatagtgactaaaaagttccactcaactctatcataagcctttgacatgtccaatttcagagcgattctcttaccattgccgaacctttttgtctttatgcagtgtaggctttcgaattcaattatggcattatcttgtatgagtcttcccccacaaatgcactttgctcctccgatattacttgacgaaggctttgtttcattcgaccagctacatttggccacaattttatacaacacattgcaaagacttattggtctaaaatctgtcattcttgttggcttggggattttcggaataaggcaaattagagtatcattaatgtccttcacctgcatcccttcatttagaattcccagacacacttttgagatctccggacctatcgttgaccaatgtttcctatagaatagactgggcaacccgtcactaccaggggcttttttggggagtacgtcgcgcattactttgaagacatcctctgttgtgaaaggttccaagagcttttcattggta

SEQ ID NO: 395909 - DNA, 911 bp, Cannabis indica
ccatagcatttctataaaataatgcccaaaatgaaattcaggaacaataatgaagatgagaaaagccaatggataatttagttgggattggaatagtgaacaaaaaagaaaagcaattatctcattctcatccatatatttttctattatatgaatgtagaagccaaataaatgttttacaagtgcaaaatctgcatgtaacagcatacataatacaattttacagtgaggtttttcatggtgttcatatttttaatagaattttatgaactcacaagtttagtagccctgcatgatgagtgagaatagcagcgaccgaagaggaggagaaaacttctcttgaaccgcgatgagaggacaaagcctatacatttgttggggcagtggaaattgagggctgaaatgcaaaataataatgttaaagacactcagtttcttctgtcataatcacagaaggagaagacttgaaaaaagatgaagttaacctaagttttcttacaggtcctcctgtatatcgagccacattttcgaacttcttatgtgaagattccaacagaagaccgaatcccccaccgtaagaaaatctaaggacaggcattggtcaaggttccagttatcatgacagatgaaaaaacaataatgttggatttttgttgagaaaagaaaatctctaatgtaaagatatatgatagatatatctcagaaagctttcatgaaaccagcttaataacattcctaatacacaaatagtttgtttggtacgatgtattaaaccatattgcattgtatagtattatagtaaattgtgttttatatcatatttttacataatagttatatatagttatattttgatttatgtcaaaagattatatatttatatgcatgtacaaatcaataccaaacatgct

SEQ ID NO: 395910 - DNA, 532 bp, Cannabis indica
tgtgggacaatgtccacaatacaatattctgacacgtaacttttggcaatggagaaattgcatttttttttgcaaattttcccattgtactttgaaattattttttttctgttttttaagtatataataactagaaacgataactgtgtaacaataacaataattaaaaataataacaactatgtataaatataacaataacaatatatacaatgactaaaaatgataacattgatcatcgcattcactattgggaatagtattttttgtagaagcactactacaatattattaattagactttaattatggatttttttaattaaaaaaaataaagacatagtctattctagtagtatctctcggacactctatggccgaagccataaggtattaagtgtaccctatgcatgccttcggttattttcaaataatcgaaattatagtgcatgcatttttaaataggccgaagctgataaaaccctaacacgtactcagtggccacccctcatttcttcatctctctctctct

SEQ ID NO: 395911 - DNA, 638 bp, Cannabis indica
tatgggctgcacacgttgattctttatagatggtacctgtccatccaattggaattggcttgttcaggataattgcgattgcagcatttgaaaatcaacggcaaagtcatctgttattgctttaatctacttttgattagtgaattatatatcagcattttcgggaaattgttatccatagaatttgtgttttgctctttttcttattgatacttgtatatgctaaatcaaagaattagacgtaacgtcgaatgtggtctaactgtaagcatattatgcttgtttcattttcagaataaaatcaacagcattgtgtgattaatgtaaaattatttgattagatttggacaaatatatttagcgttaggaggaatgaaaagatagaaataaaaatgagaaaagaaatagaaataggaatggaatttaagatgtttaaaaaaatttgataaaacaattatttttttttttttctcatcttgtattgaaatacttttctttcattttcaatttgaaatagttattctaccaaatgatgaaaaaattattacattggaataacatttatggctcgtttggaacgccgtattaagtcgtattgttttgtattgtattatattgaattggattatatatcatat

SEQ ID NO: 395912 - DNA, 683 bp, Cannabis indica
aaaaaaagggacatatgtgggtcctaggcattaactaatatgggttttgagcacgtggcaatggtgaggtaacattttcatattaaagtttgtaaccgaccgttggtgagtctttcgggtgttgagctttttttttttctttttagaaacatgtaataacttcattaagatacaagttacaagccaagtcttattagtgtgaaattttaccattctatactacctctttatctagtcttaaagttctctttcctaagccatgaataattacttacaaaaccgaaataattacaaatttggccgtagaccaatactaataaagactctaaataatttcagctacaataaaaataccaaaaacaattttacaatagaaaagataataaacagattatagctcaatctgaattcagaccaagtttgaatcacctgacccagcgtgagaacatgagcgtcaccgagtatactactcagtttgaccggttggcgaggttagcctcgggaattgtgccgaccgacttcagcaagaaagagaagtatcttgatggtttaaatgcgaagatcaaacacgatttgatgatcaccactgtaaagcccgcttagttaatttggaaattagcagttatttatattaatcaggaaattatttatagctatttaaataatttatcattgttatttat

SEQ ID NO: 395913 - DNA, 572 bp, Cannabis indica
caaaaatcatattagccaattaaaaatgagtaatttgtggcataatctcctaagtggctaggttttgcaactaacccacaattctaaaattttagtggtatactttgttcacttgtttatttcatgattatatgtttaatatataagttctattaaatcccgaactgaacatatagttactcactaattatagtaatcatcatagtgaaagataattgtaattatatacttcaaattatttagtctcgtaaattatcagtgcactaaatttacactgacgtaataattagcgatattgtttacttgcacttggataagtagaatgtttattccaggacattaagtaaacttatatcagatttattgtctaaatatgggactagagtaatattgacactaaaaaacatatcataaatataccattatggactcgtttggaatgccgtattaggtcgtattgtattgtattgtattatattgaattggattatacattatatttttatataatactatgtcaaactttaagttatactaaaatattatatatttaggtgtccataaaagttaat

SEQ ID NO: 395914 - DNA, 580 bp, Cannabis indica
tatattggggtcgaagtgacagcatatacaggacttgaaacccagaaacatgaaactaacttgttgatatgatgatagagcgatcatcatatcaaaatacagaatcattattcacagcatgtaatcagaagcaatctaggctctagtataattgaaaaaaaaaaaaaaaaatcatgcaccctgttaataatactttatatatttttatagttaagtgcacacaagtacaaatgaatcaatgtcacaaccagaacatgacttaaatacatgtacacaaatagaattgtgcatttaaaaaaaaactcattatgcagataataagatcaagacaattcatatcattaaatccaacagttcttcgtcaatatacagtatgaaaccaattttttttttttaaaaaaaaaaacaataaccactctagatattcagattttacaaatgaaaaagataatgttcccaaatattatcagcttaattagcaaaattataggtggaccacataaataatagcactaataactctcatgtaaggttttcctttttctagagacccaactaatgaaaaagaaaaaaaaaggaa

SEQ ID NO: 395915 - DNA, 840 bp, Cannabis indica
agagagagagagagaaagaaaatcaaaataacttatcaatcaaaaagttgtgactcgaaatctgttgaaaactttgtaatacctgtttggattagtaagaatcaagcgctttcacggagacgtagcccatcattttgaggtgaactctgagatcaaactgcggtctttagatttactcaatttctgtttgtttctcttaaatccctaactccaatctttcatttgtgtgtgtgcgcttgtgttcttgattttttgtgtttaatatctatgattgcgtgagagtgatcgatcctcgagattgtgtgcttgaaaccctagctttctcttggagaagacgaagaagctttgagtttgtgtctcgagttgttctgaggtgttaatctcaattttagggttttaagtcttgttattgggttggatcgagttctgtttggactctgtggttttttatttttttaccaatttttgttgtggacgcataacttgaattgcaaaaatactatgaaatatttttgtgtattaattgtgtatcttgaagtgttaggagctacagattttaatagtaaacctattaatattataacgtcctcgcttccagcttccattgggcccttacacccacagaatgatgactcttatacacgagtacgtcactatgactacttcatggactaacgactggcactacagaccaacacgagtgtttccacctcactcgtacacttctagaaaaacttccgaggaggtcacccatcctaaaattaccccaggtcaagcacgcttaattgtggagttctttcgtgatgggctaccaaaaaacaagatgcaccttgttgatat

SEQ ID NO: 395916 - DNA, 681 bp, Cannabis indica
tacatttatgaaaaaagctcttagttttttaatatgataataaacaattcttcatgtggttacacccaattctcgaatctctatatcataggcagtggctattgtattcttgaattttcactaatatattttttcctttttactttagttatttgatttcatcgaatatagtttgaactctagcattgtgtaagaataaattttgaccagaaccaagtatgctattgttttttttttattattttgatatgagttgctttgcaattttttgtgtttattgattttagtggtctcgattttttttttcttttcttctaattgttgttttcaaaggaatttttaatggttgggtttgaaattgttgaaggaggcgaagaagttgccatgggaggttcatctctttcataagaacatgaaggttccaaattaagctaatatcgacttggccacttccaggtaatctcttttaattttctaaaaagaaaaaactatgcttagcaacaatctattaacgttttatatatattgtgctgcagtataaagaaatagttgaataattattattgatattccgtattttaatattctcactttaattatttaattaagtgattaattaaatgcggaatactgaaactggtactgaaaatagttttttcgtagttacagaatacaactctg

SEQ ID NO: 395917 - DNA, 1253 bp, Cannabis indica
tttattttttttttttttgtcaatgggtcagtcgaaggagaagctcgaagggttttttcaacaacagatggctcgtttttgtggccgcaatgtggttgcaatcgacggctgggattggatatttattcggcagcatatctccggtcataaagagctctttgaattacaatcagagacagctcgcaaggttaggtgtggctaaggatcttggagactcggttgggttctttgctgggagcttgagtgagattctgcccatgtgggctgctctactcgttggggctttcaagaatttatttgggtatggttgggtttggctgattgttactgggaaagctccagttttgcctttgtgggctgtgagtatttactttcctatttagctcttttcactttatttccatgtgtttggttttatgtttagttaaaataatcacatttgacacacattacatcaaatatgcagatatgcatacttatatttattgggacaaatggtgagacctatttcaatacagcttctctggtttcctgtgttcaaaactttccaaaaagtaggggccctgtggttggtattttgaagggatttgcaggcttaagtggtgcaattttgactcaaatatatactatgatccactcaccagacaaagcatctattgttttcatggttgcagttgctccaaccatggtgactattgctttaatgtttattgttagacctgttggaggtcataaacaggttagagcatcggatggcaccagctttacattaatctacagtgtatgcatactattagctgcttatttgttaggggtcatgctagtacaagatttagttgatattagtcatactgttataataatttttacagcaatcttgttcataattctcttagtccctattgttattcctgtgtcattgagtttgtcttcggaaaaagatcctgaagaagaggcattcctagctcagccacagaaagaggaacctgaagcaggttctactagtgatagtgaggtgatattgagtgaacttgaagatgagaagcctaaggaagttgacttgcttccaagatcagaaagacaaaagagaatagcgcaattgcaaacgaaattactacaagcagccgctgaaggagcggtgaggatcaagaggagagggccgcgcagaggggaaaatttcaccttgatgcaggctttgattaaagctgacttttggcttattttgtgtcacttatgttaggttctggaactgg

SEQ ID NO: 395918 - DNA, 524 bp, Cannabis indica
gaaaataaaattagtcgatattgctttataattttgattaattgagttgtgaggtgcaaatagagctctttaaaattttataagatctaaataattataacatatatgcatgaacatcaaaaaaaaaaatgacttaaaatttatttcgaatacagaaacaaataagagtatatggatgcatcattttgaagagattatttataagaagttgcattgtataattttatataaatacgctcacctctggtagtgttaattcatggatatatttacaagtctaatattctttacacgtacacacaatataataatgtattatttgataaatattaattaattatatcctcaaaactatattggatgtttaaatttggatatttatatatgtttgattttcgattgtgaagttttaaccaaccttgcaaagtcactatataatttttcgaacattcagtctttcttttgattccatgttttttttcttattaaagacttattctttcttttctttttttcctttcaaa

SEQ ID NO: 395919 - DNA, 573 bp, Cannabis indica
tttttccactcgaagtactaaatctatattataatgcaaattgtttctaactactttatataataataatattaatgagtaaattatctgtgaaataggtcgataggtatagacacaacacaacagtcagaaaaataatcaaatctaatgtggggggctgggtatccatgtacatcgatttcaattctatgattatacatcactcctttgacaaatatatccatggtataatggccactaccaattaataaatatatattttatttaaatgatgattcttttttttcctttttttttttttgtttttgaaaccaatgatgattcgtttaaacgataataattacactaatgacaacaggaataatgtgcgtaaacgataagataagatttatttcacaaatacatacaaattacaaaaatatagttgtacagaattttaaatatttttacaatttttatgattttattataaaaaatatatttttttatattataatcttgttaatttgttgttaattttttgttatatgtatgttattttttattatatgtatgttattttttgttattgtt

SEQ ID NO: 395920 - DNA, 1011 bp, Cannabis indica
ccacagaaaaaacagaaatcaggaagcctttcctacttaaaatctatccacttaatgaactccctacccatacgaatgaacctaatgttcatacctctacgaatgggaagatttacatccagcaaaatcctcattcttaagtaagggcatgtaccctccttaacagtatccttatcaacctctatgagatcaccaatttcagaggcaatgaaccgagccaagtcatatgacttacacataaatggtatgccataaacttggacccagaaagggacataatggaggttttcagaggtaagagggaaggagctatctagcgtagcaaaaacagtaatgctttgggcaaaatgccaaggctggccctctaaaattctgcccttatccccatcacaaccaaatgtaaccaggaataagccatcagcatgttctgtgacagtcacagggaaacgacattgtgatgaccaaatgccagaaagggttttcataagagatggtcgattgtaaggtcggatagtatgaagtttgagaagaaggctaataacggcaaaggaagaagtagaggaactaacatcataagtgaatatggtattttcatcagaaggaaatactaaagcattcgacacagtattaaggaattcatccattttcaagacagaaaaaacccacacacacacagagaatagagaaagaaaacaaaggaagggataagaaaaccaatacctcaatcgcactatataaatgtaaaaccaaagccctctcaactgccttctcaaaagatccgtggtcacatccctagcctccaccatagtagcagcagtgatgaaggacctaataacttcaggtacccaagcgttcgcctccactttacaatctccaagggtgatatgatgtcgggggattgagaaatcaaaattaattgcaaagaaacagaattgagggtcagaataaacggagaacaaagaaatatgagagagagagagagagagagagagagagagagagagagagaga

SEQ ID NO: 395921 - DNA, 859 bp, Cannabis indica
aataataataataaatatgaaaatggtattaaaaaattggcaaggaaaactacctagccacacacaaaattattctttccattttgtagttttaggtttagcttacttttattttattttttttttaagaaaatatttcattaaaacaatataatatgttacaaaagttagaatagcatcattatcaaaaccactttgctaattcttgatctaagccacttcattgttgcagtagattccacaacaaaattatccaaactaagttcatgagcaaaattgagaggttcaaaggcaagaagacattttttgttgcaaggatttcaccccattttttgctctaaaacctagctctcaagtctaacattagcacaacggggtgccatgtctctcactgcccttaatttgattagttaaagttttgagtatagcttaagagtcagccaaaacctatgacaccatcgaacatgagcattcgtgtggtagttagagttcagtgattcgcaggggaaaaattgggtaagttctgcaattttatattatttggagaatgtcaagtgtaataattttaaagttgtttacgtatgggactacatactggaagaggtcttaaccatgtgtgagattataattataatatttttaaaaagtgttatactattggagtatttttagaagtaagagtgccaaaaataatgtagaataaaaataaaatataatattatatctttggatggtgtgaagatatatagcacttttaaaaaatgctactattggagatgctctaagggtgtgtttgaaaataattgactgtgtaatttaggcatgtcaaaaagatccatttagttggagcgagttggag

SEQ ID NO: 395922 - DNA, 728 bp, Cannabis indica
tctagtaatcccagtttagcggggttaggttatattactggttatcatagtatgcctaattctaattacggcgttacaactacacatggtaactgatcaggcactaggcaaacacagagcatggagggctcccaaagggaaaatacctttaatcaagagctcagaaggactcgagctcgacgacgccaaccaatggggcatccccctgatgttaaacgacctcagaataatgagagaaccaccgtgactcctccaccatgtcctcctcaacattcttaagaaatcaggcctcgagactctgcaaagagaaatggacctgctactcatcttgaatggggaagtgagaataaaagtagaaaaattagattcacaaattatttatgttatgttttttaacaaaattgactcaaaaacaaaaagaaatattttattttatttacaaatagaaaatataattaaaatgtttgctaatattgaaagattttcttttaattttaaaatttaataacaccaatagattgtttgacttcataacttaaaaattgttttcagttttaaaaatagaaacaattttaaaactaatagggtcatttggtaaaaatttcaaaatagtttttaaaaattacgagttttaaaaactaagtaaaacaagtaaaacaatcaaaatgttagttttctagttttctaaaataattttttaattctaactatattatatttttattttt

SEQ ID NO: 395923 - DNA, 918 bp, Cannabis indica
aaaatagtcttttgccaataaattttaaaaatttattagttattctttttattatataagaataagttttaagaattaattatgtttaaattattctttttccttaagttagtaaactgtagaagaaatagaaaaatgccaagataaacaaaagtctcctactctcttatctctctattggcttggacaagaacatgggaaactaagagtttaagaacagaatttaacgagttctcagctagtgattcaagaggaattgaagctaaattaaggtaaagctccgaagaccctagttcctttgaattttgatgaaaaaagtatagattttacttttaagttttgagttcttaattcaatgatatatggatgagttaggagctgttttgtgacatgctcttaagttggatttcaatttgaattaaaagtaatagcaactaccctaggttgaagtcaaggtttgagtttaagaagtcaaccttaaactttaatggtggatttttgtattggtagctattagtaatcttgagctttgaattatgttttgattaccctattatgtttttctagaagttttaagctagtttggataggtattgaaggattagaactcaaaactctcgagttgcagaaattattgcaaaaatagaaccaatcaaccaattgggtctgctagaaatggtagaccgattagtaaatctagttgaccggttggagtttcccgagagtaccttgatttttgtcttttctcaatatttaggatatttttatactttttatcgataggaaagcttcatattatgaatttaagttcccaaaagtattttagcgtgacacttactgcgacctctgatcgaagagcagattttcctctcaggttgacagacacacttgattacgaaattaaggtaagaatagtat

SEQ ID NO: 395924 - DNA, 532 bp, Cannabis indica
aaccttagaaaattaaattataaacaaataaaactataaaagtctgtacttaaataatataagcatataaaagaataaattaaaaatacaaaaaagttaattgttaagagattaatgtaataaaaataaattatacctactacactaaagttattcacaaaatttagacttccataaaatagacccatatttaggctcatatattctggtccattttaaataatctatacttggatacgtcaaaaatttatgtgttttaatttataccaactgtgtaaatatatatatgggtgcacttttaaaaggtaaaattagaaaattttgaattttcatgcttaatttttatatctgattaaaaaaatctctcatttttaaatcaaatgggttgttccatcggtaaaaattaaaaatttgaaaagaaaaaattgagtttgagttaaatatttttgtatgaatatatttttgatatagtgtaaaaagaaatattttttgatattttttttaattaagtagtgaaattaagcatagaaat

SEQ ID NO: 395925 - DNA, 1080 bp, Cannabis indica
aaaaaagtaaagaaaaaaaaaattggctaatcttcacataatagaaaaagaaaatatcaaagaaaaagactgacatgccaaagaaaaaaaattaaaatatgcacatgtattattttatattaagtataaaattatacataatatttatatttaaaattttatcggtatgtgtataaataattttagtattacgtatataattgaaagttctccttatctttatagaaaggtccaaaattttcttttgcgtatggcccatttcaactcagggccgaccctgaccactaccattaaatgacctaataggttattaatttaagtatttctaatttagctccttagtaaattagaaatatctcttaatgtatttacacatttagcacatgatactttaatactcaataatttacaattactaaaattatcaatttatttaggtcaaattttatatagcaatatacacaaatacatatgagcccgcattaaaaattttaatctaacaagatatattacctggattgatgcttggaaatggctgaaaaaacaaggtatttgtattggagaggaatgtttgatttgtgatcaagagaaagacacacatgaacatctttttttagatgtgtgtatagtagagttcataatatacttaactgggtaggtaatatgatcgaatcagtatagatttgaaagagtgttgaattagataagaagataggcaagtatagagtacgaaaagaattaataatcaatgcatgtgtttatgcaattcgaaaggtaagaagtagaagtctatggaaccatgaacttccaacaatcacacattttgtcaattttgtaaaaaaaatgtaatagctcaaagattgagtaatatagatacagggaagattcggagaaaagatagggattggtttgaaaagatttgtaaagtgaagtaattgagtttaatggttagttctgatttagattgttaatttactcaaaaatatataggggaattacctcatatatcccatagtagcgttatccaccatagttaaattcaacgaatttagttttcttgcctagttgatttgtcaacta

SEQ ID NO: 395926 - DNA, 683 bp, Cannabis indica
tagttgtatcaagtggtatcaaaatcatgcacccttaagtgggaccaatatcgcagaaaggggttcttatggaaggggcgacctgtggattaggccagagtaggccaccgtgcacgtcagttctaaaatggggtacactgtgaggatcccacattgatcaagtatgacattagttagtagaatataattacgtggccaccgtagagtgggccgtcgtggacatcggctctgaaagggggtgcattgtgagaatcccacattgatcaagtatgggattagttagtagaatataactactcgggcaccttcttctcttaggttaacttttgcgagtgaattctacctgtaagtagttgtatcagaaatttactaacctttagtagttttttcgccacaagtttaactgtacaaataacccttaatcacatctaattaagacaaacaataactgtacaagtataaaaaataagaaaaagtgggcagatcatgagttgttatgttgtgttgtgtttaacacattcattcccaatatgttaatctctattgccagcagtatagaaagaatagctaacctttttgaattattattattattatgcttatgtgggagagacacttggcccatatatgttaaggagactaagactataccccagccctggaccatttacaactaagctttt

SEQ ID NO: 395927 - DNA, 1935 bp, Cannabis indica
ctggttccccattctttagtctcaggtgcttgaatcttggaccgaatcccagattttggaacaaattttcttcgctttcccgctgccttttctgctgattgtttttccctgcatcaaaggtcacggggacatcaaagaggattccattcgatcccaaatccgcaattccaatctcattggttcgggctttgcaagacctattcccgtttggactcttggttgcctcatactccatagcttctcccattcttttccggatacccatttcagtctgtgtctggttgatattcagggcttcttggatacaatcctcatcccgattatcataaggaggaatagagttaatggttagaatagttccacctttgtgtgtaatagattgttgataattattaatgtaaggagtttgaagggggttacctttcatttggtttgcttgctggagtgaatcctctccctctttggaactttgttctatcacctgagatgggggtatgatgtttattccctagctatcgtgttgattagtctggtatggctctcttttgttatttgattctattctccccgtcttatctaccttgagccacgcaccataagccagagccacttctccattttctttaatcacattagcccaaatttcagaacattggcacaattcatgcccaatcttcccacaattgaagcacatataaggcagccgatcatattggtattgaagccatctacgtcgtccttcatgaggaaacaaatatcatgggaaaagtttggattgaatggagctctttactgtgaatttaaagaatccgttaattgtaatacgattgatatccgggtcttggatgtctataacctctcctgccataccagccaatcgaagcatattgttttcgtaattgctttaattggcaggttcaaaactcgcccagagatggtgaaagaagtcaatgttgtctcccactccgtgggtattccattcattctttctaagataaggaaccctacattcaatacccatggagttcttcccaaaatcctttcgagtgtattgttctgtttgaaagaaagaatcaagaacagagctttgtatgttattttcttgattttcagatcccaatcaagttcccccaaattccgtagcctgcatagtatgttctttagtaaagaacgggtaaatagtttcaaagtgcagagtcgctcaatgatacacgatttgccaatgtcctcagccccatcttcgttgatttcccatccttcctcatctgtgaccgttagtttgcttgttcgagatagtagatcctccatttgggccatgctttcagagcacatctgttgaataggctcttccaaagagagcataagggaatcgccaattgccatatctagagagagagttcttttgcaattatactcctattcctttacttccgcccctgatagccgccaccgccacaagtgctgctttctctttcctcttctttctcatcgtgtgtttccgtaagatcacttgcaagagaaccgccccagaagccgacttagtctccaaaccacgagcctaggagatacaatcttccactacagacattgcaaaaccagaacacttatttgagaagatgaaggaatcttctattattcaattacgtttgggagaagaatcggagttcccactggttaggagttacgacagtgaaattaattattgagtgttaagctccctctctcttgccatggcagaaggtattctttttctctctctctctctctttttctttgaggttttttgaaagttataatggtgaatgaaactgttggagtattgttttaccaggatccagatttactaccatgtatgttgtttaacatcctaaatataaatttttaaaacaatgtaatttaaacacatataaagtttgagaaaccttacattgattg

SEQ ID NO: 395928 - DNA, 1053 bp, Cannabis indica
cttaggcatccaaaatctcatccactaaatgttttctaactcaaccagcatctgacgtcaacctgggcgctgggatgtcaaccctcaataaaatgatcataattcactaaatagtagtctgattaacatgatttaacttgcatttcaaagacacttcaatgctctatcaagtcatgtctcacactccaattaaatttttgtagttatcgaccataaattttacccccaaggaagttacgaatttaagctacaacttacctgaagcaagtcctgtggacgagacttaagctcgaaaaattgacaaccaacctctagagtcaatttgaccatatgatcatcatcaacggtcaaaaatagccttaatgtatttttccacattttttggattattttattgttattttaataggacttccttccctataaaaggcgagctccaaaagctcattttttaagttcagaaaagtagtcataaggttagagcatctctctctagaaattagagcatctagacttagccatttttttttgtaatccatctcgtgagaaataaactcgaagtagacgtagcttcattactgtcgtgatacagagagtgaactactataaattgttgtgtctctcttagatatacttaacttaatcattttgccaatctagtgagtaggtgtgcgccagatatctgtcacctgatttttgtgccaacattttggtactttcattgagatccctagctcaaggaatcactaacaagatggttgtaacacgatccttgtaacaccctactagtttaggcgtgttaacgtgattttaacttaactgtgcagctcgttgctaatcaacgagtttattaaaaaatgtgaataattaaaactttattcaactatttataaatataaaaataacatatttatacaaaaccgagatctcgtttacaaaatatttacaaaagttacacaatgcataccataaaagttagtcacctacgcgacctatacagaacaatgtccagctgtcccaaacgatcatacgctccaggcctaaccgcctcga

SEQ ID NO: 395929 - DNA, 957 bp, Cannabis indica
agatgatggaggttgatacagtctaaaaggtcacctggatgactctgataattgactatttgaaaataggagtgcttcctcacgataaaacagaagccaaaaaattgcgatatcgagctgctcggaatgtcatttatgacgtcaagctctatcgtagaagttttagtccaccattacttagtgcattgatgggactgaatgcgattacatactccgagaagtacagagtggaatttacggtaaccatgctggtggtaattctcttgctcttaaaatcatgaggcaaggatattactggccaacattgcgagcagatgcagctagcttcgccaaaagatgcaacaagtgtcagcaatagcaacttatgtaaatagaccaccaagccaattaaattttatcacaagtccatggccatttgcaatctggggcatagacttaattggagaactcccaaaaggaaaacgaggggtaaaatatgtcgtagtcgtcgtcgattacttcacaaaatgggctgaagccaaacctcttgcgaccataacagcctccaaattgcgcgaatttgtctatatcaccatcatctgcaggtttggtatcccttataaattaatttttgacaatggtaaacaatttgtctataacacacgtaactcagcatatggagttttcagtgataactaggaaggaccatacttaatcactaaaaaatcagtaatgtgacttaccaattatccaacctcgacggtacaacaatcaagagagcttggaatggcaaaagcttaaagtattaccatcaatagtactcgcatgtatttatacttagtcaatttatttcaataaatgtactaagtataagggggtatagaatttgtactaatgattattataatgaaattttcaaagtttttagaaatttttatcttcttcgcaagtttttatattctaagttattacaccaag

SEQ ID NO: 395930 - DNA, 1414 bp, Cannabis indica
ttttattaataatcctatacaataattaacatataatatgatcatgactttaatttcctcttttgaagaaatgaaaaagatatcatcaatcaattattaagaaatttcatagataaataaggaccatatatatatattatgtttgtcgcttaatataaagttgataaagccaatcaagacgttttccactttaccatgtgaaacaataaattagacacgtactacttctatcttctatcttctatcttctatcaatctattattacaaaaatattgttgaaattatttatatatgtgaaatattatacaagtcatctctcttgagtcaacacaagaaattaaaggaaaaagctagctaatttcgtaagttaaggccgattgatttgttataaatagaatactagccacaagctaagactgcaaaccgaaacattagtcttattataagttaatatctattttgtgatttgtgagaattatatgatgagtattttatttgtagtggggtttatgtttatgctcttgttttccacaactgcaaatgtggtgaattcatacgagagtagtaatacacctcaatgcatacccaaagagagagaggctctcttaaagtttaagaccactttaaatgattctgaaggtgatctctccacatggtccaataatagtaccactcaaaactgttgtgaatggagacacatcagttgtgacgaccaaaccaaccatgttgtttatgttgaagttggtggaatttacacgcttggtggcgagattgactcttcgttggccgaactgcatcatttgaacacattgaatctctatgggatgaacattagtcatattccaaagtttatcggctctttcaaagagcttagttttcttaatctttatgacaatccaataagtggaattattcctccacaacttggaaatctcactcaattggaatctcttcatcttgaaagcacttctcaaatgatcattgacaaccctgaatggctctcccaacttacttctttaaagaaactctggttatctaattgccgacttctcaaggtacctgatcatacttcatcgtcatctctttcccattcaaactattctttcacttctcttcaatatcttgaaatctctcaaagttttatacatcccacaacaattacttggttactaaattctactattaacctagaattcataaggttaggtgacaacaatcttagtggaacattattacataatcttcttggaaatatatcaagttccaccaggaattccttacactatttgtacttgagttctaaccaacttggtgggttgattcttaatgactttgaaaacacctttccttctttgactgatctttatcttgacaataataaattggaaggtcattttcctaaccgtttgaaaa

SEQ ID NO: 395931 - DNA, 576 bp, Cannabis indica
aaaaattgggtattgatgtttgaagaaagaaaggtgaaatgggagaatcttagatgagatgtcatgtcaatttccaagtaactgtagtgttgtgtagtgtgttgtttagtaagaatggtgagattctgatcatgctgggtcctatctctttcaggtttaattttgtaaattagctttacacctctatctgctgtcaaatttcagttctagctagtactattttatataaaaaaataaataaatatatattttttgtatttatagagagatggtaatatagtacttaatgggtacaggtacttggctctcatagtaaatatattactgccttttcacatgaacactgtacatatatatatatacatgcattcattaataatatatatgatatatcaacttttcattaggtttctaattaaagtacatatattagggtttaaagtgttgatatttgtgttaattttagtattttatgtttttcatgtataagatcttctagtatgtttttttacaagcatatattaattattaattataacaataactttatacctagcttatggtatagatcgacat

SEQ ID NO: 395932 - DNA, 1800 bp, Cannabis indica
atataatgaaaaataatgaaggaaaattaattacatcatgttaagtttattgtagagtctaaatgatattgtaaaatatatttttgtatcctacaaataactatagaaagttattaaaaatatataaatataactatagaaaaaaaatgcttactatattgacattataaaagacaagcacctaagagaaaaatagtcatagattatttattaaagtgcattgttatgagacacctatagtgtctagtattacgatgaagtatcactttataattgattagctattttgtataatatttattaaaataaaataagtgagatctaatattaagttgtactaatattgataaatgccattttggcatttctcatttattgaatatatacactttacacacataatatataatgttaattaaaaatagatacaaacaactaaaaaaaaaaagatatcaatggaattaactaaaatgtttagacgaattttcattgaaagggtatatacgctcttagggtaaactataaaaaatcttacttttagtcacaacaaaacttgtgattaaaagtgaaaaagttgtggctaattataaatcatcatttttatgctgtaactaaaaggtccgtgaccaaagatattagtcacgaaaattacaatttgttctgactaaatgtatttttagtcaccattttgttgtgactaaaattaaattagtgacagcttgtatttaaatactatattttattcacaagtaatattttgttgtagctaaaaagttacatttagtcgcaaaaaattatgttgtgactaaaaaattatcatttgctacactaaatctttaggtggcttggggttcaggaacattttttattggaatttggcaactatattcaagtacgtttgggccattgctaaaaaagcggataatctatgagtgaagtggatacataacgtgtacataaaggaggagagttggtggtcttataagaccaccccagctgccaactagtattgacgcaaattggcaactataaaagatagagcaaaagagctttttgacttgaatcaagcctcaaatgacagctacaaagtgctatcagttttcatgctcttcgaccttccactagcaaagtagagtggagttctataatatggaaccgaatgaacttgcccaaacatagtttcatttttttggcttaccatgctaaatagactcaagacaaaggatagagcgcatatgtataaaccagtcaaaaacacaaagtatttttctgcaatgccgaagaagaaacagtgcaccacctcttctttggttgtcccttctctttggattgtttgaggaggattaaagattggctcacttggacgatggctactaacacccttcacagaatagtcaggtggatccgaaaagccaagattagcaaggtaaaaaagatgatgctagctgatgtcattgcagctcttgtctatagctttggcatgctaaaaataatattttgtggcaaaactcaataccaagtatagatagtatagcgagcaaagtaaaagaagtttttttttaaaaataattacatgtacatggccaaagaaaacaaccattagtgctaaagaatgtttagatacattgtaaagtttatttttgtataagttctcctatttatggagaacgctatttgtttgtataaagagtttttgaacaatgaaattcacttgattcataaaaaaaaattatcattaaaggtagcaattttttataatgatatagtaatatatacgtggtattattgtaaaatgtgata

SEQ ID NO: 395933 - DNA, 597 bp, Cannabis indica
ataaaatttttatttttgtgattttacttttagaaaataaaaatgtgtcatataactagttttgtttttaaatttaaaaacaatatatgaaagtgtattatgtaactacttttgtttgtattcaagtgaggaaaaagaaattgaggttagagaaactaagtctaggttcgagtccagaattgggatagggtctaggtctagggtccggggttcgggtttggatccaggtccgcgatagagacgaggtccaagtctaggttctgggaccatgtccgcggtgcagggtacgggtccaggtctggattcggagtttgcattctgtggtctgggtctgggtctgggttcaggagttgggtcgagttcgagctcgggtttgagtctgggtttgagtcagggttcgggtcttggatcaagatttaggatctagtttttggatccgagtgtgggtccaggtctaatttctggttcatgtccgagtttagggttcgggttgagaatgaagtccgattctaaaatattaatgataaaaaatacaaatagagtataatagtaaaaaaaattatttaaataaattttcaaagtgattttttttgtttt

SEQ ID NO: 395934 - DNA, 752 bp, Cannabis indica
ggtttttttatgaacactcctacaatcgactatgacagaagttgtgggagtcaaaaaggtttttaactggatcaaacatcaagatctttctcaaattattattgaatttgattgtcaaggagttgttcatgcgatctgtcatgctctccaactgaatacgccgtttgggttgattatttctgattgtaaacgtctacattctttttttaaacaatgtttctattgtatttgttaaacgatctgcaaaaaagacaattaattgtttggctcatgttacttgttctttttcaagtcacgacatgtaatggacctgaagccaaaatggaacaaatcaaagctaatttggggttaagatattcaaacccttaggattagcaaacaccataatacaacgatcaaaatactaggattggccctctaaggctcttctcctatctcccttacacccaaaatgagccaagaacatgccaaaatgataaacaaaaaacgaaatatccaagcctcattcatagccttgtaattttctaaataaaatttgtatttttatattttctttaaaaattttggatatttttgaaaatctcccttacttttttgctttttataaaacgtttatttagacatttttttttcattgacaaacttttatttagactttacatacatatgactaatcatgatttaaaaccttctatcaaagaaagaaaagaaaagaaaagtataataacctgatttctattagtttgaccatg

SEQ ID NO: 395935 - DNA, 732 bp, Cannabis indica
gccacattcatatcccccattctctaatcccagcccgcacactcttaggctgacagagatcattccagctcatcagagcacatatctgttcttttccgaattacctatccaccaaaatctcgctagaatcctgtccagttcattacagagagtgatgggcaataaagaagtggacgtaaaatagtttgggatagtctgtaataccgaactaatcagcacagacctccccgcttgagccaattgtctcgctttccaaccttcaagtctattcgtaattttctccttgaggaactgataatcacttcttttacttgcagaaaaaaagaaagagtttcctaaatacttctcactagatttcaaacaaccaatacccaccctttgcttgacttcatcacgacatcttctcgtagtgttaggagaaaagatcaaaccgcttttttgcttgttaactctctagccagaccactcttcgtaagtgcgaatgcatttcatcaagttctctgaatttgcaaccgtagcattacaaaaaaagattgagtcatccgcatatagaagatgtgtaattgggacagtctttctagcaatacgcacacccgaaatctgtccaaatctttcggctttagcaataagcttggaaaggacctcgctacaaagaataaaaataaacggagagagcggattgccttggcgaatgccccttttaggattgaagggagctaagggcgccccatt

SEQ ID NO: 395936 - DNA, 1045 bp, Cannabis indica
acattaatcaacaaaatcagatccacagatcattattataattataaatgtaaaattcctgtcgttttaattagagattgtttattgttatttgttttaaaaaatataattctattaataaggcctctgagatcaatacaaatataatctatcgaaaataaaatgggcgaaagatccaaccatcaaactccaaagatttctaaaataagaaacaatttagttagcaagagaattattagcttggttacaataaaaaataaaatataagaaaataactttaaaaaaatagcattaataacaagggtaatttacaacataaatatttaagtttaactctcagttataaataaatatataaatttaatttttaaagctaaaaatacctaagttataattcaggaaattctgtagatacctgactgttaagtgttaagtaaattgctacgtgtcaatccctgattggtccaagtcattaaatttgtattttttttaaagaaaaattagttttaaaataccaataagaaaatggtgtttgaataatgacttgacatttaacggttatgtacctatagagttaaaaaaatataacttaagtattattaccgccaaaaattataaacttaggtatttatttacaatcaagagttaaacttaagtgtttataacgtaaattactcttaataacaacaccatactcattacatacattcatcttattggaaagagagttcatcaggcgcacatcgtcagaaaaaatagtgatatgagtgtaacccaactacaaacaaaggagaagaccctagagaagggttgaagcctccaccacatgaggctcgagcatgtctgatgcaagggtagcagttgaccatagaacctttccattattctgagacattatcgcccccaagctaacttgccacctttcaaagcaagtactcacatcaacaaacaaattatatgtaacgtccccgcttcaagcctttattgggcccttacatccacagaataatgactcttatacacgagtacgtcactctggctactt

SEQ ID NO: 395937 - DNA, 867 bp, Cannabis indica
cattttccaccaaaacaaacatatacttagttcaaaacttagcataaagcttcgaaaacataacaaaccctttagcttgacttctaacaaagtcttcaaaaatgggatgaactcatcgattactaaacaatgagaggattactagtactgcctaaaactatgagaagggataagtagtagaacgtcgataagaacaatggcgaggtcgaaagcaaactcaaaacggatgcaaagacgaatcatgatcaatcgaagttgaaatagaggttaaccgaagcaaaggttagccaaagtcaaagcagaggtaggttagcgaaagtcaaagcaaaggtcaactgtagtcgaagaggaaatcggcagtggtcaagatgaaaagcgtgaagaatagatgttttttaacaaagataattaggattaaagaaaaaaaaaggtataattgatttaaaaaatctaatagaatgttatttatgaaaattatgatttgtagaattgaaaatattaaaactgaaatgtataattgtaaaaaaaatagtaaacctttgtacaataggtaattctccaagagaaaatatctacagaataattttagagcattatgccaccatcttataactttgttttataactatatatatatatatatatttgaatcatagagtcagaaactaagaaaatagaataataattacaattaaatagcaatgaatgagaagatttgaacattcatatcgatatatttagggaaatttgattttctatacttaaaaaaccctaaattatttccctaaacctaaatgttataacataggcaatatatgactacttttgctttattcccataataccacttgttgggttttatgccct

SEQ ID NO: 395938 - DNA, 1276 bp, Cannabis indica
ttttggtggacaaataccagccctaagatactcaaaacgtgactcctaattaatctaatagctataatactcatgatggatcaaacacctgaaaaagatgatgaggtattgtataatttgctttttttataatgccttcatattttacaaattgtaatactgttttgttgataaatttttttggaggagtgctaccatcaacctcctgttacaacctcttagtcaaactccacacccgaaaactaatgtccaaataattttttttacggggttgttcttatgcttacaacatcatccttgtaaatttttgaaaaatttcgaatagtttacagtgccgaaaatacgtttgaagttttttgaatgtgtgtggtaaactggaatattaggaactatgttttgggtactgtaaactattcaacatttttcaaaaatttatagggatgatactgtaactataacgaatatcgctatgaaaaaaaatattttggcatgtgattttggacgtggaggttgactaagaggttgtaataggaggttgtaattagcaaaaaaaaaaatttatatgtgtcagcttagggtatttatatatgtttattttttagtattttaagggttgattgattttttcttcaaaaaaatattagattatttaaattatttattagattctcaataattttatttgattttttaagatacgtgtttataaataaaataaagtttgaaaatatttttttaggaataatttaaaattttaagtaaaattaatatatttttaattaatttaatatttttgtggggtttttttttaataatttttattcttttttcaaaattaataagttattataattgcttaaaaatatagaatattataattttaaaattattttttaaataaaaagggacaaaattttatattagtcaaagtttaggggataaaaatgctaatttttaaatgtaaagataacagaacctaacagaaggggcataattatgcaactattatattttagagacaatttttaaacaaccgtatattttggggggcaaaattaggtagtgtcaaaagttcaagaggcaaaaatgcttattattctaaattttaatgtgaaaataagatcatttcaaattttattaataaaatatgtaaatatatgatcttataattaaaactagggtaaatactattttggaccctatgttttgcaaaagttaccgattggaccctgtgttttgttaaatgacaaaatagaccctgtattttccaaaatag

SEQ ID NO: 395939 - DNA, 726 bp, Cannabis indica
  modified_base (44)..(44): a, c, t, g, unknown or other
gtaaaaacttagtttttttagttttttttttttttttttaaaanaaatttaaaaataatttctcttctcttttattcttttttcttatttttgctttttagcaagagcggtaagaaatttggtagtcttgtttttgtgttgcggaaagattaaggtcgatccttgggaggacttaagactctgattttataggcttttgatgagagagagagagagagagagaggatttgaaaatctatactgaaaatgcattatatttgagcaagggaagacatgttatttaaaaaattttagatttgaactaattgtcgacggtaaaattgtggcctataacattataggcgacgattttaaatcgtggcttatactataggtcacagtttaaaattaaccgtcgataattctcctttaaaatattcgcaatttttaaggcacccttaaaaactgtcgagaatacctcacgagtgtttaaaactgttataaatacctaattttttccgacaattttaaacactcaattttttagtaacgtatccaaaaaaaaagtatttttaggacaatcggggatagtagtttttgtggtagtggttttttgcgatagtgggatggtacaaggaagaaggtggagatgaaggatggtactggtcgacaaataacgcatccactatcgagaagagtaggctgcaaaatgtaaacagttttgtcatagcacttttagatcggatt

SEQ ID NO: 395940 - DNA, 670 bp, Cannabis indica
gataaaagttgtcaagacaaaatgcacattctttatctttaacaagatataagaggcgccacatgcactgggtctagatactagggttgtacatcgattgatttggtcaatttatactacatattgtctaattcaatgtaaacatcaagttgcgaaattttaagtgcaacccgcccaatttagtaaccctaccgataatttggtcaagttagccagtccaaactttcttaagttttctatttttttaagtttcaaaataaataaaatttcaacaattaaaacattagagagagtgtgtatgagaggtcaagtcattggttttttttaataattgtatcatatattattattaagtcataataaaagttaaaaattaaaaagtacaaaattaaaaaaatgatgcaagtcgggttaaattgggttcattgggcgggttgtacatattttcaacctgcccaattaacagattaggcggtttatactttggttgggctttctcagtttgtattttttatcgatttttttggtttggtttgggcgggttattcggattgggcggtttatgaaaatttctgtataaccctaccagacacagtgcatgcgctccatatagtgggagtctctattagttttgtctttttgggttaattaattaaagaaataattaatt

SEQ ID NO: 395941 - DNA, 1796 bp, Cannabis indica
gatggtaagcttgttcaactctccataataaatactcattcgcagagacccgtctttcttcttcacaaataatagtggagcaccccaaggagagtatctcgatctaatgaatcccagattcaataactcttgcaaatgaatctttaactcctttaattttgctagagccatccgatattgtgcttttgatactggttctgttcagggaactaactcaattacaaattcaatctcgcgagtaggtggcaatcccggtaaatcttctagaaagacgtcaaggaactcacacaccaatctagtattctcaggtccagatgtcagaagttggctggtatccactatagtgactatgaatcccaaacaacctctgctcatcaggtcctttgcttttaaagtgttattcttggtatgcgcatcctttgaactttacccacaaacactgctggattagcactctcaggttcaaacaccaccatctttcgtttacaatcaatcgttgccctatacttagacagaaaatgtattcccaggattatataaaaatcagacaattgtagttctattagattggcagttaattcacaatcgtcaatctagaaagacaaagaccgaatccacctagtggatcctataaggtctcttacaggtaacagggtaccaaaccccgaagcatatacatcacaaggttgatgaaaatttcaattactctacttgacatgttggaatgagtagctcccgagtcaaacaattctgaataggaacatccatttatagataactgacctgtcaccactgatgaactagcatctgcgtcagcctgagtcatggtaaaaagtcgtcctgggttcagcgtagtatttttcttcggctcttgtttcttggcctgaggacaatctcgaataaagtggcccaccatgccacactagaaacaatccttggcccgacatttacccttatggtgtttcttgcacttcggacactcgggataagattgaaatgaaggtcttcagccctgacagccacctctgtttccccaaaactttcgattaccccatgatgttctggaagcatcagcctaccatttctgatcatggttaccactatcggtccccttacttatattaccactagtaggaggattcgatgccatggtggcatcctttgctgtctgctcttttattacatgtcgctcagcctcctcagcaattaaggctagctctaacactttcttgtacaaagtgtaatgagtagttgtaattttcaagtcgcgacagattgtggcattcagtcctctcacatatttctcttttctggtgaaatttgtaggcaatatatcaccagtaaatttggacagctgatcaaactccagagtgtattcaaccacatacattttcccctgagtctatttgacaaagtcctccatatgtgatgtcctcacagggacgttataaaatttttcctcaaatagactcttgaactcttcccaagtcatcacagtgacatcacaagtctaccccgctatatcccatcagacgcaggcatgatcttgtaacaaaaaagctggacaatttactgtctattcgcgtcacccccatattatcaatgatacaggtgattgtactcacccactactcagctttaattaaatcaatacctccctgaaaagttggaggttggagcttcacaaatcgctcaaacacagaatctctatgcgacaatatgaacccccggttacccaccacttgcacaagtactggtggtaacacttgctcaacaggggcagtcggtgccggttg

SEQ ID NO: 395942 - DNA, 624 bp, Cannabis indica
aactaggttagaatttgtttactttatttgaaataatttctctttgatgttagtcaactcatttgggtttgaacttgtgcttacatgaacattatattccaaacaattcgtacacttacgagtaataattaaaacatacccactttagagtccaacataacctcagcttaagaccatctccaatgagatgtaaaaattgtgttatatttgattaaaaaagctttgagatatatttgcataagtttttagcattgtgctccaatgtacatttataaaacttgatacaaaatttaaagtttaattaatatttttatttgaaatataaaataataataattttattattataaatattaaaaatttataatttattgcaataactaaatttaataataaaatattaaaaataatataaaagtatatataaaaataagaaaaaattgcggcgaaagtcctcaaaattttttattttgatgcagttaagtctccaatctcgaaaaatagtagcaatagtctcgaaactcgagattcttgtaagtctcttggtcctcattttaacagattcgttagttattctgaaaatgccacatgttgatattaaattgcgacataagtcctcaaaaa

SEQ ID NO: 395943 - DNA, 1764 bp, Cannabis indica
ctacaagataaatctaatatgagacttgcaaagaatactagtaaatatttaaatcgaaactcacgttaaatgatctttgtttaataataaagtaaattatttattgatatctttagaaaatagtatgtttaggtatttgtgaagcagtgtagaaagatccaagaaatcatccaccgaaaacacataattttaataatgctgcatgcatcctaacaatggaccagtgaaaatatattttatgtgcgttttatgtcaacactagttattgtacaaaattattgacctttttgttggtataaaaagaatttaaaagatataactttagaatattaggaattaaataagaattatcacaaccaaagaagtttaaagtaattatccttaaaggttggtcaggtttaatggctggattacctccctgccatttctattagatacattaaagtcggttatgttagtttatttggttatgttagttgagtcggttataccttagtataaatactcttctccccaatgtaacagaaatatacaattttcatttcttcaattttctctgtggaataaaaggaaaaactctctgcttttatccactaatatggtatcagaagactctcacactctcaaacttcaagatttcaattgaagttcctccttcgatctttctgcttctgcaactatggtgcgtacacgagccaccatctcagctacttccactgctcaaaatcctccagtggtcgatgcaaacaacgctccaccgccaaatgaatccgctgtcaatctgcagccagatacgaatcaagatcaaaccaatcgacccaatccagtcgatccatcatctcaagatcagattcccatacctcgatctaccacaatcaatcatcaacaagatcagctccctatttctcgatccacctccatcgatcgacccccctacaaggacattcgttctccatactatctgagtaatgctgatcatcaaggactggttcttgctacaccaattcacactgatcgcaacttccaaccatggaagagagacttcaagatttccattcgtgccagaaacaaaactccattcttggaaggtactttacctcaaccccctcttcatgattcactttacagttcttggattagatgcaatcaattagtaatgtcatggattcttcattcggtgtcacctgaaattaagagtagcattatgtatctcgacactgctgccgagatgtggactgttctaaataacagattcaaccaagaaaatggcccaagaatctttgagctaaatgaaaccttgacttaccttaattaaggtgatgatacagtgagtgcatattttaccaaattaactgctatgtgggatgaaatcaatcaacttcgcccaagaattaattgcacttgtgcagcagcaacacaggcacaaaaccacatcaatcacgatcaggttttgcaattccttaagggattgaatgaaacctaccatgccactcgtgatcagatcctgttaatcttaatcgatccttgcccccccctaaacaaagtcttttctatggtcattcaccaagaaagacaaagaactcttggcaatagattaacaccacctatcactgctgcaacaaacacaaatatccctgctgcaacagaccagaatcccaaccctgctgtaaaccagaattcaaaaaataagaggcccagaccccattgcactcactgccaaaagcctggtcattataaagacaaatgttactttctacatggttt

SEQ ID NO: 395944 - DNA, 1187 bp, Cannabis indica
tgaagaaaaagtttcaatttttaataaaacccaagtcatgtttttactaacaaattaaacagaagaagaagataaataaatgaattttattaatttttttagaaagtaaaaaagtggctagcttactttccgaaaagcctaagcaagtttccccaaagaaatagtgaaacgacaataaccatggccacccatgaaagaactgtaacgaagttgaattgatagaattgaagtaaaacccatgttgctgttgatatgagtagaacaagtgagctctgtttcttctttttccagaagaatatgtctctcatcatggttcctgcaccaaattaatcaagtaaaacaaaggctacatgtattaagtgctactctgtaaatttaatctaattacctgaagttgaacttggtaatactgaagaagattgagttgttgtactagccatgattttcttgctgtcttttcttatagggttgaaagaattaaatgaaatcactgaagatgatgaagagtactggattatggtgatgatgattattgttgtgttttttctgtgagctgcagttgaatttggtcttgttgaatgaggagtgagataatattaattagtagtaatagtagtatagtgttaagtttttcggggggctacacgtgtagctccggtgggacacgtggaggctggacagcatacgtggcacttgattatgaaccagagacgagagcatacgtggcctgaattgtcaatctcaccaaaggtcagtttgacacagctgtactgagaaaaaaaaataactgtagttgtgctgtaaaaaaaaacaattatagtaaaactgcagaaaaaaattaagttgtgtgtttggtcaattataaatttcaaattacttaaattgtcaagatctattatagtaataatgataatgttataatccaatttattataatcacaaatatacaaatatgtaaaatttattttatataatattttattttttttatatatattttaatttttttaaatataaatttatatgtatttaataagaatttatagtatttttttattatatttgattaaaatgtaaaaaaaaaaattaaaaactcaaagtgtataataaaaattctaaggttgatgttgtttattaatattaaaataaaaatataaattatttttaaaaatttaagatattaataa

SEQ ID NO: 395945 - DNA, 860 bp, Cannabis indica
atttcaagctctcatgatcacttgtttttttttaagttttttctatattataaaaagtataaaattaaatttttttttaaaaaaaaaaattacataattttgcaagtttaataactttttttttttatgaaatggagtatttattaatcaaggagcctcactgaaaacacgatcttaatagaaacaagagtcacgagtaacacaatggacaattttgtttacataacgtttaacaaaataaattttagcagactttaaactttctaacataagacgacaatcactagccaattttccaaaaggagaagacataaagatagaaccgagcaccgcttgaattgaaactaaacaatccaactcaagctgaatatcttgccaatctgtcttttcgatcaaacttaaagcctccttaataccaaccatctcaacaaaagagcctcgtgaccagcaaagcacaatgaaaaagcttccaataatcggccaacactatcccaagcaatctcactgttccatctaaaaataagatttttctatcgatattaactttaatcttattcaaacttagtttagaccaatacttaaagaccaccatccattcttgtaggaacaaataactctcccattctattagaatgagcatatttccattgcttaaaggtcacttttgctaaaagaactatctccgttgctgaagaaaatttctcacgccaaaccacatcatttcgagctttctaaaagacccacaaaaaaatcacagcttcagcacaaacatcagtcgagtattgatgcactagcccgccgaaccaaccccaaaaatctaccccataaagtagcaaaccaaaatggcatgacctctatca

SEQ ID NO: 395946 - DNA, 588 bp, Cannabis indica
cattatagtgatagtttgctatagaaatgattcgagagtgagtattgagcagaagaagtcatttatttcgctgtgtcactatgtaagtatactcaaacttaaagtgtttaatttctattttagaaaatatgttataggtagttcaataattaagttaactattgaaatatatatatatgttagtaaataaaatcttagtaaaatatgtttcaacatcaaacatatgttaaaaatactgtccacttcatccagccaaattttttgattaacagatgcttattatacaaagtttgagcaaaaagatagagggtatcaattttgtaaagtttttatataattttcttgtatacacttttttttaataaagcacaacactattaaacaattacaaaattcttcaaatatataaatgaataaatattattttgaactctgtattttgtaaaagttactaattggatcctctgttttgttaaatgacaaaacggaccctgtattttctaaaattgtacaaataagaccctaaataatttttgaactctgtattttgtaaaagttactaattggatcatctgttttgttaaatga

SEQ ID NO: 395947 - DNA, 1369 bp, Cannabis indica
aaagagcttgtcacagacctgatattttaaaatgttctttttgaaaaagatggtaatgagaatagaacaaggaaagccaatgcacaagactaaaatcaggaataaaataaaacactaaatggcacaattgcaatgttacaaatattaagcttaagctgaggaaaaatatgcagaggaaacaaattcaagataaattatccctcaagtgttacaacattgcttcctcctctaaacatctaaaaataaaacaaaattccaataacaaaacctcaaaatctccatatcaaaccttttagtcgaagagactgaaacccatatcctgaaacaaagaatacatgataacacaccattagtgaaaattccaagagattactaaacaatcaaaaccaaatagcttaaccaacaaaacttacatcatctgattcttccttctcttccaccttctcttccttctttgactcggctgcagcagctggggcagcggctccacctgtgggtgcagagtaagcaacagcaccaccaccaccaccagatgggactgaagctagcttctcccttccagatgcaattagctcagtgagatccttgcccttaacctcagacaagaggaagctaatcttctcatcctctgcctcaattccaactaaagcaaaatacaaaacagattcaatattctttctcctaatactcgtattaaaacaaaaatcaaaactttactcaatttaaatacaacccagtcatcttagtctccaaagattcataatagatctataaaacccttaacaacaaaaattgcaaagcaaaacgctaataatcttccaatattcatggaaatgaagttaacccaaaataagctgttttccttgtatatacacagatataaattaacataacctaatataaattaataaaacaaaaatctaaggttccatagatatgcaatctcttactattattattactactaataatactcagatctgttattacgaacagaacccaaagattggcacttaatcatacctgaaccgagaatttttttcaaatcagtggcggaaggagcagcgtttccacccaaaacggctaacaagtaagcggcgatgatcttcatcttgatgaagttatcgagaaagagagctgaagcgagagagagaaatgaggacgagtagagagagtgctttgctagggttttgaagattcgggcctatttataataccaaaccataacacaaaactacgtcgttttagtccaacattattattatttaggggagttctatttgcaccccttaaacttataaatacacctcattattaaaaaaatataaacttaaataatttttaaaaattactcttaatatttttttaa

SEQ ID NO: 395948 - DNA, 563 bp, Cannabis indica
agctacgttaaagagcaagcaacctcacaaaaaccctcttttgctaaggattttgctgtgtctatggtgaagatgggaaagattggagttcttactggcaattctggtgaaatcaggaagcattgtgcttttgttaatcattgatcaatgtgccaatgatttctgatagctttttttttcttcttgctcttgaaataaacaagtttgtatattgtataatatttgatgctgtaaagtaaaattgcagccacaatgggttgcaggtggtaatatttaatggcttgttcgacaataatctgcttttaccatattgtgatttagttttatgagattgaatcaaaattcgacggtcactctttaagttagtacggaagaaggccggaataaaaaagttctctatcgtaggacaatgttactaaaacttattttaaaaacatgtcatattataactagtgaaacaacaacatcttgttcgactcaacttttgtaattttgtttttcatttactaatcaagttataacttaaaatataatattttaatgtgtttattataaacaaagta

SEQ ID NO: 395949 - DNA, 1423 bp, Cannabis indica
attagaatattgaaatattattggttttcaaaatttgcatactatcccagcgatcgaacttgatggaggtttcactttaactttaaaatcgaggatataagagtgaaggtcataaatgtataaactgggttgaagcggttgtgtgggatcctattaaaattgtaagatggatgttatttgcggtttatggaagaccatatgatttagaaaaaaatatattttggggcatctttaactcagaaagtatcaggttgttctctcctttggttgatgatgtgcaatttgaatgtcattgctcatccatgggagaaaagaggaggaaatagattgacccttcatgatacaagttttttgcaagatttcctccctaatactataagtgtcaacctaggtttcaaagtttgtcaatttacctagcaaaaaattcattttaatgggggctttacaagggagagactagataaagcagtgggcttaggcgaatggatcactgcctatcctagtgttatggttagtaattctcctatttcagtctcgtaccatgggttcatccttgttgatacatgcgatggaacaaaaggaagttataaatctttcaatttttttaagcttggagtagagaaccttcttgtggtgaagccatcaaacaagcttgactccctgtaaaccaagaggataaccagagccttatgaaaaagcttaatgatacaaagagagccgtacatcggtggaaaaaaggtacctttgaggactgtgatcaaaagatcaatgagatagaagagagattaacatgggttcaaaacaaacctctatatgacactttcatctttggaagaggacagagatccaaacaaccttaaaagagctcatggttaggaagggaagtatttggtgccggaagtctacagaggtatggttaaaaaatagggaacagaaatgcaaagttcttccacgcttacacaattattagaagaagaatggataaggttttaacaattaagaacaaggaaggaaattgggttagtcaggagaaaagaattggagaggtgttccatgaattgttctaggatctgttttcctccaatcaccttgtgctaaatgatgattcctatagtctttcccaatattttccaagaagagaattaaatgatcaagaaggaggttcctttagagaatgagatcactagtatagtggcagttatgcaccctttgaagcccctaagtccatatggaatatcgagatgcttctaaaaaaattggacaatgtgatcaaaatggttcaatagttcttctccagaggtattcttgatgtctaactcaaatactcttttatttgtcgaatcccaaagatgaaaaattcttgctcaatagagagtttcagacccattagcctctgcagcttttcttacaaaattatctcata

SEQ ID NO: 395950 - DNA, 1858 bp, Cannabis indica
aagctttcaagagatagtttttcaagtcttttcttgagtggaagcaagcactcttcaaggagatcgaagggagttcgagcacttgaagttttagcaagattccgttagaaggtggaatacattaagcttgcggcatacaaaagagggagtctatttatgcataagtcaattactttatatttttgagacctatctaatgaatcttatctgtggacgtgaccacgtggactattgacaatctagaaggattgttaacaccacgtacaaaaatcttgtgtatttatgcataagtcaataagagggagtctatttatgcacaagtcaattactttatatttttgagacctatctaatgaatcttatctctgaacgtggccacgtggactattaacaatctgcaaggattgttaacaccacgtacaaaaatcttgtgtattttattttcttgcactgtttgttttctaattttattctacagttacatggttatgttctgtagttacagaataactgtttcaataccaacattattatttcgcaattaattaaattaattaatggatttgtaattataaacacaaatttcatcacagaatcaacaccaaaaagctaattttcataattattctgttaatttgtctaaaatcgattttaccaattttataactgatcggtcaattacgactttatttttagtttttgacagtttttagcggtttttcagtttggtagtttttggcagtttatggtaattttttggcgattttgacaattttttgtttgaccaattttttttttcaaaaattgaaatcaaccaccatgtcaaaaaaaccgtaaccaaaattgactgcaaaattcagtgatgatgtggaaccgaaaaattcagttatggtctactcagttttagttttgcatattttttgaacacccctattaggtacatgatgctaccacaaaacttgtgtatcgtatcctttccatctgtttgatttcttcatccgttttaggagcttgttgtcagtgtttatgtcctgaaaagcctgtaatcacatttttttgattatttatgtagaattgaatattttgatatatgcttgaatgttatgttattaatatatattattgaatactttataataaatatcaaaaaatttcttatgcatatatgagattgtggcttatagttgtacagagaactaagaccacttagctatgaataaaataatatgcaacatattaaagttatgaaatctttaatcaatggttactagtacgactcattgatgcccgttctttaatgcaagtgatctcggttcgaattactgatcgtagtttgacatctaagtgaatgtattgtatataatagagatcatatagacaatgattgatatgaatgaagttgtctttattaacatatcgtttatcataaagacctaattcatatcataataataatgatcaatagtagatcgacctaaatcctgaattatcatgaactcttgttcatgttattagtttctttaattcaatcgttaaagtttcttagagaagatgatttttataatttcaattttgagaatctaataatatggatgattggaaacatgatgtacaattatggaatcctgactttcctaacaaatcgaatgctggttccctttaagtgtcaattctggaacttgaatgttgtgcctaaaatttagatgggatctaaattatacttctactaatgaattaatggtactaaatgatcaagaagtaattagaagggtaaaacggtaatttgaccaaaactaataatgaaccaacacatagagagctaatcactgaattggttatatcaatggacactgcagtt

SEQ ID NO: 395951 - DNA, 1039 bp, Cannabis indica
ggctacacggatgcagattgggccagctgtatagacgatagaagatccacgggtggttatctcatgtttttgggtgaaaatctagtgtcttggtctgctaaaaagcaacatgttgttgctcgatcaagcacagaaagcgagtttagagctcttgcaaatgctgctgccgaagtacaatggctattgtctcttctctctgaactgcaaatatctcagtccaaaccaccgattctatgggttgacaatcaaggtgtcactgcccttgctgccaatcctgtgtttcatgcaaggtgcaaacacattgaaatcgatcttcacttcgttcgtgatcagatcttggcaaaacagctcctagtttgctatgttccgtcattcgatcaagctgcggacattctcactaaacctttaactacagatcggttcaactacttaaaagacaaacttcatatggcatcatcaccatttcgtttgaggggggatattaaaccagaatctgttagttaagtttagtctgttatttttcttccttgcaaactaactgttagcttcattctgttatgactgttagttgttagcattattagtttgtttttcttcagcttgtatctgattgtaaaggcatataaataaacatcaaagcaacccattttgggttaagcttttcttggcaatattgttttcttgctctgcatttgctctgcttctttcttttttggttttgccttgataaagtttctacagttcgagatttatatttttacttaaaatatcatgtttcttttatatttggagagttatatatatgatttggagacttattcaattttggtgtgctaactatcctttgtatccctttgtaatatggttttcttccgccataagcgaagtttattaatacatttttaggagggtcctgtctatgacttgcggactctctctcttttaaaaaaaaaagttttgagaaactattaatttgacacttactacaaaatatttgattgattgttgtgtttttttaaatgacaatttaaataaataa

SEQ ID NO: 395952 - DNA, 748 bp, Cannabis indica
ctctctctctctctctcgtcgtggtagtcgccgaggttggtcgatgtcgcacgaaggggggccggtgttgtcggtgtcagggttagggaatgaatgaagaagaagagaagaagaaaaagaaaagaaaaaaaaagaaaaaaaaataaaataaaaaagaaaataaaaaaataatggttaaaatgactctggatgatgattgtcaatttttggaactcgaatcgcgtctgttggatcatttttaggtgttttgcagacatatatcatacttggcttggggatgaatttttgacttgaaatatttaaaattacaatataattttttaagacatgtcttgaaagatattgaaaagagctttcaagcacaagttgaatcgcataaattgggtcaatattgagagagttatggttgttttactgaaagctgttcagcaaccactgcccatgttgacatctaacgcccaagttgacattctaacgtcaatctagattttgtatgagtgggaaaacgtgttatatttgtatttttgatgcctaagttatattttgacttcacttagtcactttcttagttctctggtgaagtcgttcattagttttcggagatgccacttttctgcaaaatctggtagactcgaaatttcttgatttgtgactaatttgcggatattccacttcgcaaaaactggtacaaaactcaaagtgtgaattttaacttgtcacaagtcgtagctctcttttactaggaaaa

SEQ ID NO: 395953 - DNA, 1007 bp, Cannabis indica
atatatatatatatacaaaatttatacctgtatgagaatgatgtttgcaccctttgcatgagctgctctaacaagcctgaaaagtaagaagagagaaataaatttaactccaaacaactcacattaaaaaacccaactttttagcatgaaatgaaatgctctttcttcaattttccattttcagaagtgaaaactcattccattggaaaaatgagctttacagagcacaattaaatcagtaaaaaaaggatcagatggaggtgagattaagttttcatcaactcagaaataaaagttaattgaacaagtgagatctttatagttgaacaagaaattatgagtttgagattaagcagcagcagcagcagcagtagtagtagtagtagtagcagtacctttcggcggtggcgacgttggtggtgaggtcatcggtacaagcgaattggagagccgataccacaacctctctcttccccttcttctccattctctctcttctctctctctagctcagttacactatgagaaaattccctctaattattacgaataaattaataatacaagctattttagtacattttttctctcattatttttttgttttaagtaaaagtattctttataacattttttaattaacaaactaacaaacgatcacaaatttaaactaatggttagatgaagtaaattaagtaaaattattttacaaattatagtattttacattattagtttaataattttatttttttttcataaattataataatataaattaaattcaagagaaaaattagagtttctcgttcttaaatctatagctatcgaaggctacctccgccccggccatcgtaagcctttgggcttaagtacggcttggttagagttgtgttttgctgctaccaattaatttttattgctatgattagtcctgtctctgtgacatatttttaagtgttttggtcttgtgtgtaacataattttgagtgtttttagtcttgtct

SEQ ID NO: 395954 - DNA, 798 bp, Cannabis indica
tacgtaccttgcatgagggcatggtaacatgtacgtatataattaattgatatacttgtgtacatagctatagctaggttagatggcatctatctatagctagctagctataggggtgggtaagcattttattattattagagtctccttcactttctcctttaattaacttgcatttcttatatatacatactatttttgtaatcctccaatgtacctaatataaactctttatagcatatacctagctacgattggaaaattaaaactttcataataagtttggttgaatagttactataaatttcaaatgtaatcattccatctatcatcaaatcattataaatcaaacagttatggaatggaatgcaagttgtttgatgttatttagtccttgcatgtggctcagtgtaagaaaaatattaatttagtcccgatattttatatcaatactcgcacaccacacacagggccgtcttaatgtgataagaggtctagggcgaaatataaaatggggttttttttttataaaaattaagaataaattctatttaaattttgcacaacatcaattttaattctttatctctatgtaataaataattttttgcaacgtaagctaattcaataaaataatatttaattactaagaattgagataatttgctttgtgggcgatgaagagattttgttgaatttcatctttgttggtgttcttttgaataatctcatcttcctataattattttacatcttgataatgataaccactaaactcaaatctgttgggttttatgc

SEQ ID NO: 395955 - DNA, 760 bp, Cannabis indica
atatatatatatatatatgcgatgcggtatgaaccgtaattattaaatttaaaactgtaaaattgcacaacaccatgcagtttggtaaaattgcaaactataactgcaccgcaaagaatttcaaaccctatttttttctgcggtgcaggctgttgtgcggtgtggacggtttgatgaacacttttaaaccttaatcacattattaatatggataatttaaaaaaaaatacaaaaaacaacaaaaaaaaaataataaaaaaaagtaaggttgtcaggattttaaatattcttgcgatttttaagattttatttacagaaaatacagacttttgatgtatgtttatgttgtactcttattaatttattattaattttttattatttatatgttatttttttgttgtcgttttaatattattttcgtgttacttttatataattttttattatttttataaaacaccttaaaaatatatataaaaaaaaatcttgcagtaaaaatatagacaattgacaaaaagaataatactatatctaattatctccaaatcggactaatgaaaatgaaaattgtccaccattttttttttttttgtttattctactattaataggcatgtttactaataagtaatgtgaatataagggagaaaagaaaaggagaactttccccacccattttgtaaggaatgccattaagggtaatggatttttattatttttattttattttttaatattaaatatataatgacaattt

SEQ ID NO: 395956 - DNA, 824 bp, Cannabis indica
caagaatgtgaacagccaagtcgtaatatagaagtcgtgtacacttctatatgtagtgtatgaaactggaaaatgttcttatttattaatgttaacgtttttatcttaattattgtaaattaatgtataaacggattcacaatgaatgcaatccttgtgtaaatgataggacacttgctttgtatataaaggagtcatccaccgtgaaatgggacagatactgaatccttgcaacagtggactaagcagaccgtgatctgactgaaccactatattctctcgtgttctttgtatttccaatttttgttaagtatttgtgttcccagtttgagtactcgccgttctaggttgaatactcgcacttattcatcattttattattattattatctattttggtgttgtaaaatcccttcaataaaaaaaccttgatggatactatcaaaaagaagttggacgttgcaaaaggtagatgggtcgatgaactaccataagtactttgggctcacataacaactgagaaaatagcaacaaggcatactccattctcgctgtcatttggcttggaggcaatgcagccagtagaagtccatattgcgacccacagacgacatttttataatcaagaaaaaaccaagaactcttgaaattgtccttggatctacttgagaaaaacgtaatgagtcacaaatcactaatgcagcatatcgacaccgattgacaagatatttttaaaaaggaaaagagaagaagaggctttttaaacgtgtgactgtgcgaagcgagattttgcaaatacgagagatgcatctgtaagagaattt

SEQ ID NO: 395957 - DNA, 530 bp, Cannabis indica
tgagctaaccccaagtggttaatattatagtgtatctctaggaccccgaaaaaaggatgtatgtgaaggatctaaagacaatcattatttgtttcaattttatcatgaaattgatatacaacgtactatcaacgggagcccatggacttattattgaaagggtcatggtgggagttaattcacgtacaataccactaaatcggcttgatatgtgagtacaattacatgatattgaattggggttcatgaacacttaaaattacttttagtcacaaaaattgtgacaaaagtaaaaaagttgtgagtaattattaatattcatcattcctatgttgtgactaaaaagtctgtggctaaaagtattagtcacaaaaactctaatttgttgtgactaaatatattttgagtcacaatatttattatgaccaaaactaaattagtgacaacttgtatctagatactatgttttggtcacaagtaacattttgttttgactaaaagtcaaattttaatcacaaaaaaaataatgt

SEQ ID NO: 395958 - DNA, 974 bp, Cannabis indica
agagagagagagagcaatagaaaagattttattaactttttctaacttatccttatttcattataaattggttttatccttagttaataattagaaataaaacttaggaaaatcctactattccactaaaagacaaagcctaaccttaggcaaagaatccaattttactcttcttcatgcttaagtaaccttaaggtctaagagtaaaatagttaaataccataaccctgctaatctcgatagttcaaatattaaatatacttgccccgctaaaagaaaggttctaaaccatacttgtgtgactctaatggccaaattgttgtatttccatcgttaccgagcaagaaatacaaaaaaaatattaaaatacatgtttatcatatataattcatctaaaacttaataaaatccccataattgagaaattataactcaagtgcctacttcttgaaaatagaacccacatctcatttaatcacataatataattttttaatgctaaatgtccactaatctatattctaagtatgcagtcattacatgatcactagtgctcgtaagtgtcgatggacttgcgcataacacatgtacatgagatattgacttgcagaagcatccaaatcttatgttagtggcaaaataagattgattcccaagactaaactatcgtttgatggaaaaaaaaacactaagccttagggaaaatgtcaacttgggtgcctagggtggtgcattgtaacgccctaaataattaggcacgctacccaagatacttatgaaaccctaatcccctaattggaattactaataaaattagcgcagaaattaaactttaattataaacggaattaaaataaaacttgtaataatttaaactttacaatctaaaagttacagaagttgggatcccaaaaacatttacaaaatattattacaagtcctttttcttaaagccggcctaagcagcaaaacag

SEQ ID NO: 395959 - DNA, 1346 bp, Cannabis indica
ttttgaaggaatttgtcaattataacacttttgccaattttatctaagaacaattactagatttgcttttttatttttgtgattagagcatctcccaattaggagtgataaacagtcggtttggttggttttctacacagaaaaaattcaaaattttgtttttgattttcatgataataattcgaaaaccaaccgatcattatataaatgtaaaaaaactaactgttataatctacagtttggtcgtttaaaccgaccaaaccgagctttttttttaaacaaaaattaaatttactataattatttggaaactaaaaaattaaagtaatacatcaaatatcatataatttaaaaataacttttttaattaaataaataatgtaaaatatatatattctttttttaatttgctcaaattatttgtgctactaattggtaatgagctatattaaaaactcctattaatatatgaatgtgtgtatatataaaataaagcaatgaatacttgagatttacaaaataaaaaaaaaaataacaagtaaaactagtttaataaaattgtatattaaatatgtacaaaaataattatattatatatgtatagtgtataatatatatgttcggtcgatttttagtttaatcggtcggtttgccattaacactaaaaccgaccgtgcaaaggcagttttaactaaaggcggttgttttactttttcgattttttcggtattcagacggttggtgtactcggttggttagttttttggagtttttgctcacccctactctcacgtatatattaaatttggtgttatattgttattagatttttagtgtaaaaaattatttttactctactggtaacaccaaaatttatattaacaaaatcttttttattattatattatttttatataaaataaaataatattttcaatattatattaatatattaaaatcactacaattataatatttaattaatgatttaaataaacatactaattaatttatagataataatattgtaaaatcattaaaatttaataaattaaaatataatattgcaataacaaaaataatacattaagaaaaaatattacattaatgaagaagatgtaataattttacttaaatcatgaaaataataataatttatggtatttacatttaaatttacacaataaattaaaggtatttttacaatgcaccccttcaaaataggtctatcggtctacccttatctatttcggtatctattatttttttagttttcatagtcgtatacgttagggctgagcattggtcggtttggtcagtttttttctatataaaaatccagaatt

SEQ ID NO: 395960 - DNA, 1142 bp, Cannabis indica
ggaggaccctaaattggttgggcttttaatactcggcggcccagtcataggcctacttacttagtcgccacaaagacgagttcaaacgcaaaatgatgagtaatagtaaacccattttataattattattattattattattattattattattagcggtaaaatttatttgtgaaacttaacattataaatcgatttttttattggtaaaacttttcaaaacgcacttttataaattgttgttaaatgctaaggagaattgtctatgtgtaccccaagtgtacacatgttttgttttgattgatccacccactttttaataattataaaattaaaataattatatattttttaaaaaaaaattataaaaattatatttttttttcttctaattctatcgagagtttcatgaataagaatggtaattgtattacgccacaagtgagattggaaatgaatttaagaattttgttagtggtattttctcaaattcaacccatggccctttggaaagtttggacaatctcatcaatgattacatctctgctcttgaaaaatttgaaatggtcggtatcctaggtcatgcagagatcagataaatgctttttactatgggcaacttgaaagcttcaagaccatatgaaatgtcaattatcttcgttaaacactactagaatacagttggttttgatttctgtgaagttgtggtagattcttccagttttgaacgatgtataagggcaggcccaaccctggatataggagggttaggcctgtgcttagggcccacacctagtctaggggctcaaaaaaaatctcctttttaaaattatacatttttgctgattttgaaaaatactacattttactctaaataagtgccccatttttttttccaatgacccactaaattttaaggccggtcttgtataagggtatcaatgcaactaatactgttctcatttcgaaggtctcccaattcaaatctatttctctttgtaatgtggtctacaaggttatctcaaaaatcattgcaaatagaaatatatcagtcatacaaagacaaatctgccccactcaaacgactttcattcctagtaggaacattcaagactaggggtgaaaatcgatcggttatggtc

SEQ ID NO: 395961 - DNA, 663 bp, Cannabis indica
gtaaaaaaaattaaccaaaaaaaaaaatgagtgcattatataattattcgaaattttattgggtgtattttggacttatgttctgttttttttttttgtttaaattttatttttcccatgttttgcatgaagcatattggtagactttgtattattatattttttttttttcttgaaagagaagcaaagatttttgttgttggagcaaatctaatatacggcacaatgcttaatttattagtatattgattgttggccacttggttgggcgtagggccatcttgtgccccgcttatatatttattattttattatatgatttccaaaatgaaaaattatacctaaactaaacatgtttaatatgtctaattctaaattattggtataaataaatatttgattaaagttatttatttttcaaataataaaaatccatatattatttgtacatataataaaaatccatgtttttcaaataattgaaatttttatcctttaaattttgatatgtaccaaattatgctcttagggccagtttggcacagctgtgctgtgggaaaaaacagctgtagttgtgctgtgaggaaaaatagctgtagcaaaactatgaggaaaagcagctatagcaaagctgtggaaaaaaaaactgaggtgagtgtttgg

SEQ ID NO: 395962 - DNA, 1075 bp, Cannabis indica
aaaaatatgagaaaaccatgtaatcaattaccttattattatttttttttttgacgtttgtgaacaaagtcacatatgattaataatgcagcacaccacaatcggcggtggagcccctcgaaccatgatagctcattgtctaaccgaagagcatgttttgccaaaccatgagctgcaaaaaacaaaacgacaagccacataggacaaaactgtggcttatattacatttgttatatcttttttaaaattcacaaattatttttttaaaaaaaaatatataaaaaaaaatatatattgttataattaaggcacattgtgaatctttggactgccacatcatcaaccaatttaactaactttgttagcttcctaacaacctaaaccgacatctataaatagcaagcatttctctggtttatggttgagattttagattacttttagaattagatcacttagtattgagccttgttttgagtgtgatttgagggatattaaagggattgcctattcttgaaatagcttccctcatgtgagatctttgtaattacattgtttgatatacaaggcttgattgtaagcattacagctgtgatcatttctaattgaattcatcaataaagattgtcatttaatcagctaagttcttgttttcttacaccttcttcagattagtttaattggcattattttagttctgtgatttgttaatgtaatgctcatttagtttgtcatctgaattcttgttcctacatgttcttctctggtttgttactggtttgatctcagttcttgcacaacatatattttgtaaatttataatttagaaaccataaatataatagtttgtcttgttagtgattgtgatattattgtacttctcctctctcatagtaaagaggttttacactcttttcttctataatatttgtattagattgtgttagattgatgattgtatattaaattaggaatcattaatctattatattttattttatgctattttaagaaaaattaccttatatactatttttttattttttatttttttaaatttacggcttgagtttct

SEQ ID NO: 395963 - DNA, 911 bp, Cannabis indica
aatacatgacttgaacagagaaatgtcaatagtagtaagcttcttttctatgacatatggagtattattagttttttttgaaatttttatattagttggctcgcaacagataactgttgcattacagtttgccaaaagttgacttacaatacttaaacttttatactcttaggaaaaagacgcaatttcattccccatattttacaacagatagtttgatgaagaaataaattatgcaaatcacgaagttaatggacaattcatctcaattgattatgaatatgaagaactaatacacaagctggaagaagtgttggaatgcaaccaagaaaaaactaacctgcaactgatatcaagtgaaaaaggataccaattgttgaggataaattacgatccaagtctaatcttctacatacaaataaaattgaaggaacctgatttcacaagatatttattgtgtgaacgtagtcaacaacaacaaacaatccatcattcttgaaaatgagcaactcattagttacacaaacaaatgcaacaacaacaatagtaatcaaaatattttgataataaattcaaaaaatcaaatcgagaaatgaaattataatccgaccatatttaaaatattcagtctaatcatagttaagtttgtaatcatatactgttaaaataatacaaaatcaatttaaaaaattttgtattatattattagaaatattctaatagatcaaacacacactagaactctacagagaattcatctcagcctaaagagtttttaaactttaatcatgtcccaaaatgagtctttggactctcttatagatagtacttggatagttagaaaagcctcgaccgtttaactgttggattttatgccctaaataaaactctttacaatctgattagttatc

SEQ ID NO: 395964 - DNA, 1028 bp, Cannabis indica
ttttttttttttttgttgattcacaagtaaaggaaagattggtatatctgaataataccattaaaaaaaaaagaattttttgattcagatgaatctgaaatctgtgaggaatccctggctgactcttacaagattatatatgaaaagtggatacatattacttctaaaaataaatcaacgtctaaaataattaaacaattgtctcatcaaattgtatctcttgaattgaaaattaaagaatgtgagacatttgtctgtttaaaagatgaaaaataatttattaaagaaagaacttgaaaatttcaagaaaaatgttcaaatatttaatcatggatcttctatttttgaggaagttgagaatgcaggtcaaaggggctctgctggcctaggttcaaatggttctgaaagttctagaaaaacaaaatttgtgaaatccggtacttcatcgaattcacttgccgctgcaaattcaaggtctgctgctacaaatgcatcctctatagaagcaaagtctccagtaagatcgaaaagggtaagttctcaggtaagaagatttattccaatttgtcatttatgtggtattaagaggcatattcggcatagatgtttcaccatacaaaatatgttgaaatcaaaatattttggtattttaaaatttaaaagaaacataatgctcctaaacaaaagtagattgaaagaaaaatgtcatgttgaattttctgataaaactattacttctcaaatgtggtattttgatagtggttcctctagacatatgataggtgacaaggattttttgataaatatcataccaatgcaatatggtgaggtcacatttagtaatggtctagcaggaaatgttattagtatgggaactctcaattttaaagggttaccaatgttaaaaagtatgatgcttgttgagggactaagggctaatttacttagcattagtcagatttatgaacaagggtatactgtttctaggtttatttattaattaagatattttatatgtctaaattaat

SEQ ID NO: 395965 - DNA, 772 bp, Cannabis indica
caaattttgacttcgtagggctttcgagatggtatacgcccatcagtatcatatgaatactagaggtaaggcttgtatgatgcattgatgagatatgcatctacaaggaaaacaacatgtgaaagtaatttgtagaacagtgttggaacataattgcatctaaacaaacctagtttattgatttgctttccctcttatttatcatcacttttattattagtttttgaataagttgtttttccttttcccatttacattatagttctcatatgaatattatcgtaatgtatttattagaaattaaatcttggtccatcttaataaccctcactttggaatggaaggaaatcttgctatatggcaagggtatttgtaaccagcaatagcttgtaggtatgttagaaaaattggattcagtttgcattatggcgaggctccagagacttgtgtggtagagtcagactagggtgaatcataatatatttaccaaagcccctcttcagctaacaaagactatagattaatataagtgggacttctacaaagactagtttgtgctgtttgtaggggtgtacgtcggtcggtttagtcgggttatagcatatttttattaacccaatataaatatcgggttgcaaaatttaatcgtaacccgcccaatgaaaatttagaaaaagttcaacccgcccaatgattttgtcggtttggtcgggttaacccgtccaaaccgttctttagttttttttttataattattattgttcgtttctag

SEQ ID NO: 395966 - DNA, 1132 bp, Cannabis indica
tgttaccaaacgccaccttaatgcttttatttgtttttaggcagctttatacggtaatttttagttattttttgagcacatgtgttttactataatgtaagttgtttcattatttttttatattgtgttttgtctttttttttattataaatttttatttttatatagttaaaactagtttttttttattaaaaaactaatttcttaatagaaaacccaatttcttgatgaaaaaattaattttttgaatcttgatgaaagatctttagtaaaattttgatcacatgcatgagaaacttagcaatttgaatcacatgagagagattaacatcttgtgtggcttgagagagtagtttgatttttgtgttttcaagcacctttgttttactgtaatggagttgtttcattttttgtattgtgttttgtcttttttttttattataaatttgtcatattatatcttttttatagggtaaaaatagatttgtaggtttttttattataaattttacttttatataatcaaaatgattttttttatgaagaaactagtttcttaatgaaaaaattagttttttgatgaaaaaaatcagtttcttgataaatgatctttggtgattaattttgattgcatgagaaactaagcaatttgaatcgcagaagaaaaaaaaaaatcttatgtggctggagagagcgtgatccctattttgaaaaattgattatcttttttaatatttttatggtatatttttctatttaaatactcatatatttagttagtttggttataaaatgccatatttaatgacattaactttttttagaggatagtgacattaactttacatgcgatatatatcaaaacttctatttattttctcatatttttataaccatccctatatcgacaccctttgtattaaattgtataggataatttacactatactatttttttttacttttttttttattatattgcgtactattttttatatatataatttttattttattttaggactacatctcaacttatgttaaataaaaatttcaatttttgaagtggtgttgtcatagaagtgatagattttttttttcttttctttccttaaaatatttgttttttatt

SEQ ID NO: 395967 - DNA, 923 bp, Cannabis indica
aattctgggctgttggcacatgatcttgaggtttgagaagaggccggaggcggcggtcggaaaaggggctacggcggtgagaaaagttggggttggaggatgagggaaagccagtgtttggatacggatttgaatttgaggagagactttatgggaaggcggaggagtatttggttgaggaggtcgtcgttgttgccaacttgttcggcggagtagtacgatgtcttggtgggtcttttggggaaagaaattctgagtttgaatgacatttgagttttctttgttacttgggtctgtaataagttgttatgtatgttaactttgttgtaatctacaacacaacttaaacataattcagtcacaaacaattaaattagaaaatataaaattcaaaaaaaaaaaaaattaaaataggaatatgcatttcacttgagcaagaataatagggacacttttacaatttgagttttttctcacttgctatctttcaatgtgtttctcaaaactcaatcttaactatctctcaaccttttacaagccttttcatatcttctttcaaaactaatttgaaaactctagttaaataggaagtcaaaataagtgattggctacttagagaacaagtctcaaccattgaaaactaaactattaataatcaataatcgtaagattgcaatgtaagctaatgttgatatagaagattgcaatgtaagattgcaatatttgaagttgggaaatcaataatcctaataaacaaacaaacaccacaatttaataatcaataaaacaatttaaaagtcaaaaagcttgccttgcacaaaaaattaaaatagaaataggcaatcttcatcatcaatcaataagtacttattaggggtgttcgcggtgcgggtggtgcggtttttaaccattttttcaaacca

SEQ ID NO: 395968 - DNA, 1697 bp, Cannabis indica
tagaggctggctaggcatagggcgaggcaaaggtggccgaccaacttatgtgaggaagctggtctcccgtttgatacatatttgagtgttggggtccctgtttgttgaggtactaacttcgccttcttgtgggcaagctgtactaccacgtggcactaaatccaaagcctagccactacaacctgtatgatctaacacccttaaaagccacatgagaaatatgccacctaccaattcaacagtgtgatttcatccctacggtgatccatccaaaataacccatgcaagagagttggcctataaataccctagaggaagcacaaagaggggatctttttttgaaccttcaccttcagattgaagacttattcctcatcaagcaaacacatttttgtaaccccactattaaatctagagtatttctactaagcttcctcttctttaagaggaacacagtggaaaggagtgaaagtccactgtatttgtatttgtataaacaatcactggccgacgagcctagtaaaatggagtcgtggactaaggatagttaacgcctaaaccacttaaaaatatcctatttgttatttcattatttatgccctctttactttcttaagctctaaaaatattcgtttaaagaaaaactcggtaaacacttgcctatcatgagtgattggtagttaggtaggagcttgtatttgtcattgattcttacaaattgcctctaataccaactaccattcgtagaagaagtatattccccttcaaatagacattatgtatccatctcacccataagttgttttgttttgaggaaatcaccctttcatagttagctaatgtcatcgtattccaaatcattctgttttgaatcctcaaacctccttttgacttttgtttacaaacttgctcccaaactacataaccaagagactgagtctccactagactgcaccattaaaatgctctacaactgaagttaatcttttttagaatagtctttgggagcaccataattttgtgcctagtaggaatgtatggagaagaggatagagttaattagagtaactcaaccagcaaaagatatattcctggatgcccatacccaaatttcttacaccattttctctaccagtatattgcattcagaaactaattgtcttctagcacaaattgggactcctaagtacttgaaaggcatctcaaatcaaagaaatcctaaagcatcaagaactcttttaaactcctcttcatccatctcacaacaataaagaactaatttgctatcattcggatacaagcctgaagatatgaaaaataatttcagcccttacaataaaaaatagatggtttgaaatccccatgtgaaaatagaaaaacatcgtttgcaaaacaaagatgattcaactttaaatcagagtagcggtaattgtatttgaaatcctctttttgttcaactttgcatagtatcttagataagtattccatgcagagctcaaaaatgacaggagacattagatctccttggcacaaaccccctttttgcctcaaaaaaaccatgtaaggatccattgaaatagagactgaaacgaggagttcaaatacatggcatcactagctatacaaatcttgctggaaaatttagagccagtgcatttcttctatgaaatcccattccaatgtgtcgtatgatttct

SEQ ID NO: 395969 - DNA, 798 bp, Cannabis indica
gatcataagcagctcttttttggatcgtcttttttcgacttgcggtacttttgactcactatcccaaatctcaaatggctcttttggcttgtctttttggaccagttattggatttagattggatactcgttagaattttgtttggctttgataccatgttagaatttaggatgaaggtgaatggttgaaaggtataatagggtgagcatatggtaatgtacatgtgggttcatctcaaaactaattggtaatgagaagagtagctcatagatcttatatataatattttgtttccacgcattagcaatgtggactaactctaatacatcttcctcacatttgagcctaaaaagtgtggatataatgaacaaacttaatagactacaaggccaaacgtaatatttgaaagatcccacaaggccaaatcaagaaatttgtaggtgtacacatcgagaaatttgtagattttttaaaatagttcaaagattccaacactagaaactaatactctttggcaaaatggtcccaaatagaggtcaaaggtagagaagcggaagccttttaattgatctgataccatgttagaatttgataaggtgtaaggggttccatctgaaaactaattgactatgagagaagtagctcatgcatcttatatctttctctctttcacatgattaataaaagtatatttttttatgttttatagtttattcgaatttgagttatgaatcatttgcatattttaacaatgtcaatgtcttgttatttttttattaatttatagttgtcttttt

SEQ ID NO: 395970 - DNA, 1090 bp, Cannabis indica
atgagttcacaagtattgttatggtttcataggttttgttatgatttttcatatggtcaaaactagtttcacagggttaacaagttttaaactcgtttcgaagttagtttaaccgtgttcaacggtttgaaattgattttattgggttcacagtttcaaaactgatttcacatgttttgagggatctgtaatgggatagctccattttatgatgttattgtataatttgattttaagtttctttttttattattttgtttctaggttcgaaactggttttcacatttatattttatttttagattattgatatatattgtgtgatgttttgattatatttgtgattaaatttttatttttgtatgtgtgtgtgtggttttttttttatttggttgcctgatgaaattggtttcaattaactttattatttagcatttatattttgttattacttttcatagtgtcaaaattagttttatacggttcacaggctttaagggttctgtaatggggttgctctattttatgatgttattgtatattttttattttaagtttatttttattattttgtttctaagttcgaaactgctttttacatttttattttgtttttagattattgttgttcattgtgtgtcattttgattgtattggtgagtatttttttgtactttttttctttctatttagttgattggtgaaacttgttttaattattttcattgtatatcatttttatttttattttttcataatctctcttattgttgtgtgacgaaactagtttttgtttgattatataatgttcattattgttgtatgatggaattagtttcaatttattttttgtatttttgttcagatggaatataattcctcctatgaaagaataatagaagatgttgctaaagattttaagtgctgactcttagaagaaacatattcctccatattataaagaaaaatagtaaatttatccaagttataaggattcatctttggtatatattttttttttcttttttgaagtatatatatagttcattttttttaatttatctttaaatagttttatatgtttatttgt

SEQ ID NO: 395971 - DNA, 766 bp, Cannabis indica
ggtgttgcgaaatacatatcgagtaggtaagctcatttaatgcgcttttgttaattgctttgacattagttaactaaccttagaaattagcagcgctaattttcggggttaacacttaccccctagtctataagaattcttttatgtgttcttatcgactaagtgagttgggaaatctcccttgccgaagtgtgagaccctcttggttttcttcgaggaagtgcccgtcttttttttactgagcaatctaatccctcatgcggttaagcaacaattttacttgacattggctgaatgactctgagggttgctctttagcccaaaaaatttagtaactggcgttggccgagcgactctggagatcactctttggccaagccattttcgtaacttgcgttggccgagcggctccgagggtcattctttggctaagccaatttcgtaatcgacgttggccgagcaactctgggggtcactctttggccaagccattttttgttgtggtaagcgtgcatccatttgagggagtatggctctttgagcagtctcaacctcttatcatttcttcatccttttactccaatgggagggagcttatgacacttgactgcgctaccctcttgacttgcaattgtttgcttactcttgagaggcgttcccctcgttttagcgttaggccatgagtgtcttttgagatctctgttggctaggtaacttttgtggggagaggtatgtgttgggttttatgccctaaataaaactcttt

SEQ ID NO: 395972 - DNA, 676 bp, Cannabis indica
gaattacttttcttaaataaaataagttagaaaactcattcatacaaattaaaaattattgtaccttattttcctttctttcatatatgtatatatattgttgacataatttttcatcaatagatctaagaagatcgtaaatgaacaagatgaacacaagctttaattaatcaaaataaatcggtttgtcaaaaataaattcgacaaagatgaatacgataattttataatggtttgtctcctttcggggataataggctagcctacttagagtgttattgatctcaatgcttgatgagagttcaccagagttatgttctctaaagttcaatcctcaagtgagattttaaaatgagagaatgggagcttatgagtatgattttatgaatatcaaattcaaggtccctttacaagtgacgtcacttcccttatataggttttcatctaagattcaaaatctcttaaccatgggagcaccttctcgtaaccatggtcgggttatgtttaaaatacaaaatcatatttcaaaataagtatttaaaaaataataaagttgaatgtcttccaagtcatgttggtgagtcgtgagagacacgtaccgaggcgaggcccctctattaagccaaggtgacaggagcgtgatgccccttttggtccgagatgatggaggcgtgag

SEQ ID NO: 395973 - DNA, 570 bp, Cannabis indica
ggaactccctttgtctttgcttaattttaggttggtttctatgggagtagaagcaggcttggctcctatgtaccttgtttattttaaaaattgaattgtgaagggtctttgcagacagagatgccttgttttttttgaacaacctcaagaccaagaaaaaagcaaaatgagccaagatctttaagtttgaattcgtcatgtaaatatgttttgaagtgagaaattccaagctcattattgctagcaacaattatgtcatcgatatatattaggactcttagaaacaagttgttggtggctttgatgaataacgagttgtcagagaaggattgatgaaagccatctgataagagggtgtggctgagcttgctaaaccactatctaaaagcctgtttaaggccatacatgcttttattgagtttgcaaacagtgttagaaggtgccttatatcatgggggtattttcatgtacacttcttcatgaaggtcctcatgaagaaaagcattgttgatgtctaattggtggacattccaattgtacattgcaacaagtgctagaaagactttaaga

SEQ ID NO: 395974 - DNA, 1018 bp, Cannabis indica
atagtttcttaaaatgatttctaatgtcttgattcttgttaggtttgatcttataactttttacaaaacaaattacatcaaagtggttgatcttaatatagttaccaataaaaggaagaaacaaaaatttatactagtccttttccaaacaaaatctatataactagtaactatactgacttctattaatatttatgataatttaatttaatcactaaatgctaaaatgactacatcagacaaaagaactagtgtttaaatttaatgaatccaaccacattcaccacgatgagcactgagtagtgctagtatcccattttatattgtgtgatatccattaattttattaagagtgcttttatggtaattatattatataaaatattcaagtaattttacagttagagaaccagaaagagtgtaaaataagatgtttaaatcatattatataaacgttttaaaaaaagaaaaaaaaaatcatattatataaatattactgctgaaactaactccatcaaataagtcaaatatttaagtttatttatatttttgttgatacttcatttatacacagacatgcattaaaagacgaatctcatttttttctctaataaaaattactattattgaccttgtgagagctagcggtaccattaaagtgtgtatacctaatgttaggacttaattagtgccattttaaagtatggtgcttttaattagtttttaactgtgtttgtgttatcgttagagcactatgaaaataatccaagaaagaaattttaaaatatttggtgcgattggagcctctaataataagaaattagaaagtgtagagtactacctcaacattagaatcaaggcgttaaaaagtaaaaatttaacagcatggtcgtgtttaacaaattcataggtgggccttaacacctaacaaatatcaaaatgttatttcttggtttatgtattttttaaaaataaaataaaataaaatatggtaccatttggtaatatttttttttaa

SEQ ID NO: 395975 - DNA, 822 bp, Cannabis indica
gactgtatatgactaggctaattttggttattgtattatcattcctgctacatagttgatctatttttagtatttttgatgttgaaattttgtattgtgagtcttttttagagttttcttatagacttcaatgagtaatagtatttatataattatacttggaataaattttcataatgttgttggtggattcctattttgttattaggtaacataatattattattcgttaggtctgtcacaattattattaaagtaaaaatatgagctaatgatgttgaacctaataactaataatatttttttaatttttaattgtatcactttttaataacgtaaaaaaaaactagcataaaatttagtatacgtgcctcgcacgtaactttttactagtatatatatatatatatatatatatatatattagaatgcctttcatgcttgacacacacttgatgtgtgcaataatgataggacctcataatgccatgcagcacacaacataattgtttccatatatctctctttacaccataatgccttttattaatttctttaggaaaagaaaaataaatcaaattaataaattaaaaagcttccataattccattgagaaaaatatttttatattgtggttgacagataatgtggcttttttagtccgatgttgtgaaacaaatacagaaaaataaattctatatgccaccaatcattttatgtaaaacgacaccgcatcattgcttttgcataaataataaataaatcttctaataatttattcttttatttttctctctctctctctagaatttccttacaata

SEQ ID NO: 395976 - DNA, 551 bp, Cannabis indica
catgaggataattaatctcatccattcattttgtatctgagatccttctctccttacatatttgagctcaaaatagaaccttttcaagaaatgtgtttctgattaattggcttgtctatttttgaggtcattcgacgttcatgatttgagttgtttgggcattttaagcaccattaattagtatccaaattatcatattctattttattcagaaaatgataaatttgtttttctgttagtattgataattaactataataatattatgcaatgcaattgggataatttctcgtgttacacttgcaattagaaaaaatgagttaagtaattagccatttaattcgtatattttgttttagtatttcaataaaaataaagaagattgcagtattttaaacatataaaatttaatttaattctaaatttatttataataattgaaataataagaacaaaaataagtttaatttaattatattttaaacatataaaatttaatttaattctaaatttatttataaaaagaattatttacatcaaaaatataaaaa

SEQ ID NO: 395977 - DNA, 1453 bp, Cannabis indica
aagccgtacgatctgagtcgaggaactttgataactcggtttacagattctggatattaagttaactattgggccagtaccttccatggtgtctcaggatttttgcactaattttttttgaataagaagcctattatacgaaaaagttagacctcccgatcattacaaaataaattctacggtaagaaggaaatcgaaatagaaccgttcaaatagtgagtaaaagcccacgttgtgggtaacaaaattacaggacctactaacattgataaaattacaactaatgaaagagggagaaacttagaacaaaatgcgacatagttctcaagagcccaatgggactctttctcattgagcccattgattactagtctcgagtcactctccactatacaaatttagatcccatttctaacgccaccgagacggctaaacaacaagtcgcagcctctccacagagtgcatccgaaaagtccaactgagccaagtggattcggatcacctcacccaggtgattccttgcgacaactgcagtacacatactctccaggtccactctaacgtcacaattaagtttaatccagtcctgaggaggaggagcccaagactcccgccatatcggaacatgatcaagtaagatagtagcatatatatctgcaaaggaataacaaacagagtcaatgcatttcttcacatcaggcagacagccaatatgaaccacttcgttgcgtgtcctccaaatggtgtcgactacaattgaagcataaagaaagacctcttcagcccgtatacccctgtccttgaggcaccaaataaacttaacccagtcccacatgtgaatgccgttatcacaaactgggtaaatactccaaggcgaagatctccaaacatgaaacgccaaatcacaagtaagaaataggtgttcaatagattcctcccttaatccacacagcaggaagctcatatcctcaatctgaaatctgcttccaattatagttctaacggggagtgcattggaaaggatgctccaccaaaaaatcttatgtcactccaaaattttgctattccatagtttattctaaagtgatggagccacctcacaatgaggcgctctttccaaagcttgagttagataagccgttttgcaagagaattgcccattgctctctaaggtccaaatccatctattctttccttaacccaaaggattgccaccttcaaaaatagcaaaaatagtatcatggtcaaacaggatttttaacttggtaacatcccatttgccacaagctaacaagagatcgaccacatagatgtgactccgagtaccattaccagtcgatttcagagtgaaaccttttaaatgaggaatccagggatccctccaaatgctagtatccctaccattggcaaccaacttacaagcccctttccttaagattgcattggctttcac

SEQ ID NO: 395978 - DNA, 767 bp, Cannabis indica
aaaaaagaaaaaaaaacaaatcactgaagttctttttatgtatctataataatttttttatattaagaaaaaaaaatatgaaacatatgcaatttttcctttcaaatagctataaattttcattcaatctctctatattattacttgttgtgcatatatatttcaaattaaactggtctttcacgttttattattgacaaaataccaatttcggttacatagtttgcaaccaaaacccaacccctcattatccttttcctaatattattaattgttcaaaaatttaaaactttaaaacacattcatgacattaatttctttttcacttatatatatatatatataattatatcgatacattgtagaccaatcaaaacgttttttttattaatatttatttagctctgataaataaaaggccaaacacccccataagttacatattgattcttaggaacatatcacgagagagagcatatttgctaataaatgagccgagccaaatttggaaaaggccagctagctattcgagtcaagtttattttgactaagaaatcaagttattattggattggagatattattaccctacatttctcttaacctgtttacgtgcaacccaagtttaggtgttgccacacccaagtttaggtgttgccacttctatataatagaaatattacaagcaccacactacttagaattgtaatattactattaatctaattaaatattatgttccacataatttaatttagaaaaatatt

SEQ ID NO: 395979 - DNA, 1106 bp, Cannabis indica
ttttttttttactttttgtagaaaagaaaatacgttgtaaatgtataatgatggattctgtagttttctttcaaattgccttttttttttgatagaatttgagataaattaaataaggttccatctcaaaattaattgataatgaaagaagtagaactaactctaatattttccaatattaacaatgtagaactaactttaatattttttattttgcaatcaaatgttcattgcttctcatttctttaagcatatcttaataaagattaaagaaagacacataaagaagggaactcatcgaatgtgaaggcacaagtttaaactaggctatttgtttccaagttgagattggtccaatatgaaatgtgcaagctgttgctgttgcgcccacagtgcaactgcaaatcacaagctttggggtcacttgttttgaaaattgaaataaaaaacagagccaataagttaggaattccctacaaggaggggtccacatatggtgtggggacaagattgggatcgttttttttttttaataaaaagcatacttataatagattggtaaatttagactccgtcattacattgtaagaatagttgaaagtgaaataaaaccaaacttctgatcagtaaatgtccaattcactacattatggacaacaaaattacaagatttactaatattttaaaattaccatatattagacaagattgggagtctaatatatagaaatatattcctccagcattgtccttttctaagtatcaccatcatcattttgtccctccagactccaacttttatcactgtcaaaccattctcttttattaaaaaggctcattaaaattttgaaggacaaaataacatagtaattatagttggatggtaaatttagggtaaattcactaaatctcatattttactagcggtaagatgactatttaacacgatattaaattagaggccattttcttcggccaatgaggggcaaaatacctatttgttcatattatatatacaagttggccgtttactaaactgtaattggaattagaataatcaataggagaaatgtatcggtttaaaatagaaaataatcggaaacaat

SEQ ID NO: 395980 - DNA, 727 bp, Cannabis indica
agattttgcttttagattaactgctgatctctcgcataaattatagttagtactggtatactaatcctgatcatctctagttgttatttatatgttattatctgcaagatgggacatagcttaattttgtatcaattttagaaatgtagtactttgtagcttctcctatcattatattgtttgtattaactcgcacatttctgattatatatatatatatatgtgtgtttatatttattgaaagtaaaaccatactcaaatctttatcaatcaattttctccaagttgtctatatgctaatatatgaaaccacaaaaaactaaatatgctaatatattgcacctgatcgatgttcttccccggaaattgtttcacactatatgatattaatactgattcataaggtttaacatattagaaatgtaatcattcatacttgtatatcttctattatatacgtgtgtgtaatacatgatacaagaattgaagcagctcaagtgatcattaataagccttaacacaccatgtattagttaaaagaaaataataattaattattatatgcgaagtgtacgttaatgcaaagatcagatggtattgtattagaaaaatactttacacaaaagtgggtcagttacttgaagtaaaacatattatatacaggaactagactgatcatcattattatgaaaacatttataagaaacttctaattattaatgacgtt

SEQ ID NO: 395981 - DNA, 938 bp, Cannabis indica
tattgttaaaaaggtatgcagtattttctaacataaatttatattgatttttaagaataatattatactacaaaattacaaatatttttacttttctacaagttatattttaaaataagactcattgtattaaaaggagttgtcacatatgtgtttaacattttggtgtatatattttctatgcaaatatcattttaacaacgaaaaaatttattgtaagtatggtatcattttcattaacacatcatttttatgaatgaaaatttacaatcatgtatacattataaaattttattatattatatgtgaaaaaaaattatttataaaaaaattgtacattttataacttctattttattatattatagttagtaaagacattttttgtgttacaaaaaaaaaaaaaaagaagattttttttaaaaaaaaaagttttttaatacgtatgaatataaagttgtgttgttacttgcataattgttttgtgttatacattttatacgtttagttataattttattcattaatattatttcaaatttattttattttattttgtacattgaatttaatggtttgtttgttttgtaatttggtttgtatcattatcataataccaaatagttttgttacgtgccaagtcacctatgttaattttattttaatttttagttttttttaatatcataattttaaaattaataatattcaatgtagtgataatcattgaaatttgaaagcataataataatttaaataaaaacaaaaattactattatattttgtaataataaaattaaaaaaaaaattattattcgtcctaaatttatcttcgaattaatgaaaatgttcatttggttaaactatcaaaacattcaaatttaatttaaaataatatttaaaatttaactaattctaaatatcaaaatttgaaaata

SEQ ID NO: 395982 - DNA, 708 bp, Cannabis indica
gcatgaatgctctgttctcttctcttctcttctgtattatattatattatgtaaaagttgagtttctattttgttgaaacgtagcacgtagcacacacttctctcttcaagacacctaggcctacctactacctagagcattactattagaaatcaataactaagtggtgctagcattatcacaaggtgtccattttagtctttttcttttctttctattaaattaaagagtattattgagatagtcgctcctaattaattagaaattaataagtaaaataattaaaattcgatagtgatgatcacaaaaactcactgcaaagagtgtgggatgtgaattgaggatatctattctatataaaatgtgtctatataacaaaatttttgatttatgaaaaattattgggtgacttctttttttaaaataaaaaaataataaattattagatattgtcacgtaaagggtcatcattattttgatatttagaattagttaaattttaaatattattttaaattaaatttgaatattttgatagtttaactgttaggctatttttagcctaagttttgggtcacattttatagttgtttttcttctttattattatttttggagtagaattacgcttgttttctttggttttatgtttctacacttgggatgtataaattggacaaatttcggaaaacagtgatctataaaat

SEQ ID NO: 395983 - DNA, 893 bp, Cannabis indica
atatatatagaaaaggaaaatacctaagaacagaaaacatctaagaaggaatagaagatgccgaatccatctccacattaatgaggaactggcgtgatccctcgatggaagaggtaataatcaccaaaatcccctgagttcttctactgacggcgcgctgagtagagagaaggaagaaaaacaaaagagatttaaataaggtctgcaaaagtattaaatggaaatagatcttttgagattcactgagatgcattaaatacctaaacctaattagaaattatgataaagaaaattagagagggaaccaaaacgacagttacacatcatcacagggaagaaaggctggaaaaatccagaagaagagggaaaaaccctaggagagtattccagagctttttgtttgttaatttattgtaagaatcttgatatgactattttttgatgaaagatacacttgtaaatacataaagttgaaatattatttttagcattgctataacagcatctttaacgaaaacatttatagttgcgaaaatatataatttattttaaaaattattttttattttttctttcatctacaattaatttattgttataaatttagacagatatgagtaataatacttgtatttttttttctgctctttcttcctttttatttcttcatcaaacttatacatatatataggagaatacatgcatgtatatgcatataattattatactttactgctacaagttgaatactattctatagtattgtaggtttatcatgtagagtatactacatatctatccgtagtcattcataagactctcccttagtatactctataatttgtttataattaatattgtctcgttaaaaaaaccttactaggtaaaaaaaa

SEQ ID NO: 395984 - DNA, 595 bp, Cannabis indica
ccgagaacatagcttatttctcctaaatctttcattttccccaattttattcaccattaccatcgaaaggtcataccctatttatttttatttatttttaagaggtcatacctactttatatacaagtaacattcattataatacaaaatgaataactcaaaaaaatatatattataatatttaatatataaaatttgaaaagtattaaaaaaaatatatatatttattgtattagttatacctaataatatttttttactaattattgatgcatcatatttaatatactacatataatatgcatataaagtcaaaattatatttttgataagtaacaaaatatacactcaataataaataaatttttatgtattatataagaaaaattatttaattgtgattttttttaatcactgcccataagtaaaaagtatatttaaggaaagaatgattttattaaaaaaaataataagaattacatgacttgctattttaggtaattgttttttttcttaagaataaagaatgagaatcaaaattaatttattagaataattgcttaatttttttaaattttcataatgacccaatttt

SEQ ID NO: 395985 - DNA, 1147 bp, Cannabis indica
aatctctttaattagttaagacaatgtttgaactcttcaaatgacttgatgaatgcttactttcctttcgatgcaagacttagatgaaccttcttcactttgtgaatttgctacacatactaacaattacaaaaacacacaaactcactaagaaataacagaataattatttcttaaaaaaaaaaaaaaacactcttataaaaatataaaaaatcaaggagtaaaagagctaacctaaagttgagccattatactcaacaagaacaactttacacattttagatgcaataaaactaaaaagaaaattttcaaattaaactttaaatcacaattaatataattatctgaaaaaaatttcaatcttagattgattatgaggtgctcaaggtcaatgaagaaacaaatcaattagatatttttgataataaaataaagactaaaaagatatgaaaataattaaaagtcttaaaatatgagaatactaatatttttctaaatacaaattgtcaaatatggatttatcaagtttgtaatcatgatgaactagatatatggtagtaaaataataagtttgtgtattgaatcccaatctctatttctaagcaacccataaactattcataagaaaatgtgataaaataatatgtatgttatcgtaattaataaactactcttaattaagcaacctgttaattataatcaacccttaaattaatttttgtaagtaattccaattgtatatatcaattcaattgcttgagtttcaaactttccttatatattatgtttttaagagcattcacatcagtttctttattttattttttaaaataatttattaaaattttatttttttttattttataacacaaatttttataatacattatacattaattttttcgtttaaatattgttaaaatattgttttaagaatgaataatagcattgtagcattctttaaattttgaactaaaatatctcatgagcccattttttgatatttctcttttctattttgaagaaaagagcattatagctcatctaatatgatttgttgtatccacaatccctcaatcctagacaatatgtctttttttgtaagaatttttttctaacattagtccaggctgttagaaatttattg

SEQ ID NO: 395986 - DNA, 939 bp, Cannabis indica
aaaaaaatacaaaacaaaagaaaagaacaacaaaaggatggggacttttggagaaaagaaaacaatgtcgtaaagtcctttttgtcaatgattttgtcaataagggacgttaagtaagttgtttgtgtagggtcaataacgtaataaggaaaaaattgtgaagctgactagagaaagtactcgagtttttgtgctgaaatatgttatatttctccaattatatttctaaattacagtttactcagaatttcattgtgagaaaattcattagtttgggtctgaaaggtgatctacgtttgtattttttttttgaaaaatcgaagctatattaaacaaataaagacccaaaagtcattttacattacacttaatcaggtgagagggcagagaagatatctcaatgtaacgcccacttgccaatacgtaccaagaacaacatagtttgggtatgacctaaaccacagcacaacctaaaaataatttagataagtttttacgtacaatcttgcacataattactaatctcccatctacctcaagaaccattcaaggccttaacaccagtttaagaatcattctcaagagtatgcgttaagatagtatttagttggaaataatgaaataaaataaaatagaatagaaatgaaatgaaacaatttttattctatttctttatttggtttcaatttaaaaatattggaatgtcattcgtattttaactctattttcattcattccaaccaaacatcgtttaatgaggtgtttgtgatgcgagtttgagttcaaaagagtaaaattggagggagtacatatgaaaaagtattggagggactaacattgctactattttaatttaaaaagtaggacccacttagaaaaacaaatctcttaggtgctgtttggtaacacttttgtttttcaattttttaatcacaaaat

SEQ ID NO: 395987 - DNA, 1860 bp, Cannabis indica
gaatttgtttattggttatttttcttacattgattattttttgattattttgtattttttttttcaagtgtaactctatttagttataacctctcaattagaatattattttcttgatccaaagtgtattcttggatagaggttctactatataaaggagttaatgaggcagaagaggaatgaagagtggcatgggtctaaaatcatttcaaatgagtttttttattctctcttcattttctcatctttataattttaaattttattttattattttttctaatattttaattaaaaaaaaaattgaactaagcctactaaattctatattttaatattttattaaaaaaattgaactaatcgtacaaattctatttttagtccattttatttaattaagtttataaatatcattattaattaagaaaaaaatataattcaaatattaatataattaataatgctaaaaaagataaaaaaaaaaaataaaaaaaaaaagaagaaaataaataaatatttataaactcaaaattccaaaatttttaccaagcctcttatctatattccaaaatatttatcactcttaaaattttgtaagataattatattttgtacggttatcattttttatcaatgaacaaatatgtcattagagtttttttgaaacaaggagctttcttcttcctttgctaataatgattttcatgataatattttatgtgtgatctattataacgatgagatgatgcagtgataatagagttgaagtaatggcctacatgtttttcttattgttattttttttttattgtggcaaagtatacatttttataccttagtgtatctttagtaaagttgctctttaagatattttcatagttaatattatttatctcaaattccgaaagttgaggtagaacaatataactatgtgtttttagagatattttaaatttgtgttatatgattattaattattttttaaaataaataaataaataactcttaatcatgaatagtgttcgtggtctaaattgtcaaattttcattgtatggatttatcaaataatttattaaagtaaattataaaattgtcttacacatataattttgctattctttttgtcattttttaacttaattttattaatattttctatcaaattatcactttgaatgtagtgacaactacaagtgagatacgattatgacagcgattttataatcatatgatgatatctctttcaatttcaatttttaatcttttatttactataacatttaaagatagctcttttattaaatgattataaaaaattaaaattaaataagttgattaaaaatatttaaagcatactatttgaatttaaatttgattattatatacaagtttatctattttctcattattaattaattaattttatttggcattttctttttgtttttttttaaaaaaaaatatattctaaattcattcacttctttatatataaaagtgatcagtagtaaatttattgtttgatttgttttaggaattattacataaaaaatataacttgatattttatttacaaaaataccttcataaggtaaagtcaataattataccttttatgtaattttaattaccaaaataccacttacattatcatcatttacacaagcagacgatggttgttgcgtggttgtgcggtggttacatcagacgaaggtttcaatcagacgatggttgcaaggtggttgctggtggttggctgaaggttgcatcagacgaaagtttttgggtggttgctaggtggttggccgaaggttgcatcagcgaaagtttcaatcagcgaaataactgttagcaaaatg

SEQ ID NO: 395988 - DNA, 901 bp, Cannabis indica
aaaacgtaatggaaagcggatatgaataataaaggacagtaaaattgactattactaaataaatttctaaatgtgcgtttgcttataagtaataatccacaaaccgcgttgcgcgtgcgtgtattcctttctttcctaattttaaagaaagaaaaaaatgaatattcaacttagaaacatacgtacgaataatctaattctacattttaatataaatatatataatattcttcaacctctacacaaaatttctcacatttcatattctgatattgtgtgtgaggtagtctagagagaaaatctgtccaaatttgttaaaatacaaccttatatatattagactaagatcgattaatatataatctgaatcattattatatataatgagttcgttattagtttctgttagtcattataattattacgattattctggtgtggttggtcgtagtagatcttaccctccaacttcatcaaaccttcatctcactacttctaagtcgccatcgctcctcaaaaatggaaagatcaggtaattatttcattaattaaacattactcattaatgttctctctctttttttcaatgtttaattattatttgacaggaatatttctgtaaagaacaatattttgcctgatttacctcaacttccttcacctgataattcagatcctggttcctggtaattaattgattcataattataattagttacattaatgatgatctttgtcgatggattaatattaatatctgtgttaattaatttttaattaacaggaaagtatggcttatgggaatgattgtatcagtaattatacctttttggacaaacaaatgggggcgtttacaaaaattcaaagtaaggagttttttttttttttatatatatatata

SEQ ID NO: 395989 - DNA, 1649 bp, Cannabis indica
aacaattggagataatggacttattgtcaaggttaaataataaaagtttctcaaagcgaaaacgactgtgtcttttgtgttgctgagcagttgcttgagtgaagacttctaatgtaatggctcgatgatcagaatgaaaatagtccaagtgagagacagttggttgttgaaaattagaaggccatacatcgttcacaaagcaccagtcaagacattcctttaaagtgcttgttgctattctatccttagcccaagtgtagctgtctccgtggaaaggaggatcattaaggtggcagtgatcaagaacatttcggaaggctgtcatttgggattcaccacggagagatcccccagatttgtttgcattcaaaattatttcattgaaatccccaatgattagccacggttcaagggggcaatgtcatatagccgacggagtaaaatccaggaatccattctatttcccacaacaggagctccgtagaaagcagtggaatgaaacttgttttcactagcatcacttaaccatgagtcaaaataagagggaccaaaagtattgagctgaagaacaatatcatctatccatagtcgcataagacctccactaagtcctacccgaggtgcttccaaaccatgagaaaattttaaaagctttcgaaaacgatcgagagagttattgttgagtctagtttccatgaggaaaagaacatggggagattgctggcgtacaagcaatcgtaaatgtctttacgctctcgggtttcccaatccccgcacgttccaacttaaattttcataatcccttgcgggaatgcaaagcaatctccgctgaatcatctgagtcaccatcagaatccttggaagtcgaggaaacattctggtgtgagcaatcccctttcgacaaaaaggagggtgcggctgtgtattgttgattgcgatatctcttaagcatttgcctcatggtaggcgcatcagtttgccttttaaacatacggtttggatgaaggttttctttactgctttgagggtgagagtttgtgatcaaggttggtgcatgtgtagtggagatgagagatggtgtagtggttacaatagcatgtatctgagattgaggagtaggggtgtttggcagggtagtgggagggtaggttgcatagggaatatgaggggtgagagaggagccaatgccagggatgaaaatgtggcttaagttggcagtagtggagagattggaagacattgagagggttctggttgaatgggagggtatatcgggtgatgcagaaaacccagagatgctcataagagaagcagcagaagtgagggcagatagatggtgggaagaagggatagtagcaggtgctgtaatgggagtgtttgatgaggaaatcaaattagcagtagtgattgtagggaaagaagttttcattggtacaccgaggtgttgggttttatgccctaaataaaactcatttcaatataatcagatttacttattaatatagatctgaattaacatttaatgttgcatggttcacatgatttatttcatgattatatatatacataatgtatagattcatctgaaacccttttcacatacttgatcctgtttattgtgccgtcagcacattggaaagtaaacatga

SEQ ID NO: 395990 - DNA, 696 bp, Cannabis indica
acagattggacaatgaaatggaagagatgacttagtggagaaatgtagctttttattgattttatttttaatgagtatagaggggtaaccaaggcgattatgccattgatgtttatttaagagaacattacatgaaatagaaataggaagtattttttgctgtaagtaattgaggttgccttgtctcttagctgtcccaatcttcaaggtccgagaaggtccctggatataacattcattaggggtgagcaccatggtgttagaactattatgtaataaggcactaaccaatagtaagttaaaattaaaggatggtatatagagaacatttgtaagagtaattcatgtctagtttctttcaagtgcattataccattatactctgagtctcttctgtaaccgttaggcacttttctctctctcaaactctattatactactatattccactattgtttcttttgttgcgtctttttcgtattcatctatttgtatttctctagtgtctagtaatacatatgcttcctctgcctctagataatgaagcctttttctctgcgtcattttttctcttcttcttgttcgtttccttgtggttctttttatccttatttattttctatcattgctttcccacctgaaagaattaaaaaaaaaaaagaaaatatggtgacattaacatctactcgcaacatc

SEQ ID NO: 395991 - DNA, 1068 bp, Cannabis indica
cagtacaaatgtattgagaaaaagaaaattagtgtcaaaaaagaaaaagcaaaagtaaaaaaatatgcgtcagtgtaatatgaaaaaaaatatatgtatttttatgggtatatacctatcacaataaaattaaaggaagaaacggtatatgtgcaaattgattgaataacaatattgtagtaattaatttcaaattttagttgtcagatgaaaatgtatttttgattgaaaaataaaaaaaaataattaaaaaatataagaaaactattagttgcccttaaggagttaccttatattgcttttccatacattctttctataatttttttttttttttggaaaaataaccatattttttgaaatttatgtcttaaaaattttcctcaaaaataagtgaagtttcaatagtattgtaaaatgtatgtcaaatttagcacatgataaaagtttgatcaaatttgatataaaatatagtatgaacaaaacttataccacaataaatatcaatttttttatttactcatttaccaagcttttgacattttattttcatttaaataattattttatatagtttcaataaaaatttaatgattaggttaactattagggttattattttgcaccttatacgctatagtacaattatacatttatgccaaatataaataatataatattgatcaatttttgaaataaatttgctataaaatttacgttatgtattgaagatagtcttattgaattgtataacaaaattagtgtgtagtctcaagggagatttcaaaaagttgaaattacacgcagtatgacttttttaaatgttttatgataaatatagtatagtttagtttggacaatttttatggcttttttaaactttgggcatgtgtttatgggttgttaaagcccatacatttggaatgtatgtttaaagagtccatattttattgtttgtagtttcttgttgggttttatgcccaataaagtttcctagatttttcaaacatagggttttactgatatgataatttacaacagagtttacttgcatttagagaagtgcta

SEQ ID NO: 395992 - DNA, 816 bp, Cannabis indica
tttttttaggtaataaaccgaccaagaaaactgaaaccgaccattatacatatatatatatattaatttattaagtttttttgcatgtattatagttactaataatatataaaaataatatattacttttttattaatattaaaattaaaagaataagataattaatttttgaacaattaatttgtatgtttgtagttgtaaaatgtagaataatgtatttatagaataaattggatcattaatttttttaaaaaaaaaaaaaagttcggtttgggcaatttaaactgaccaaaccaaggttcaaaacggtcggttttaagataggttctggattgttcggtcgatttttggattgcaccaatctagaccaaaaataatggatttttatataaaaaaaaaaaactgaccaaatcgactgatactcagccctaacacttacactcaacgagtgttactagattttagttttttaataaaattaatatgcattatatattaaatttatttgatttttatttttatttttaacaaaaaaaaaacttgaaactaaaacgtaatatataggtgtatatatatttatattcaacaaacaaaaattaatttacaagaaaattaaataaataaacaaatatagaatgtattacactatctaatataaagggagtaatgttcaatacaaagctaaaatagaatggtggatatgaatccaaacccataactccaaaacagaatgaacattgacaataaaataaacctaagaaatatcaacaccaagttgcactcttgtagaccacgaactaagaagccaagagagt

SEQ ID NO: 395993 - DNA, 621 bp, Cannabis indica
tgtaagccacctattttctcacatcttcaccactcatgtgagcaaagtgtctatacatcacacacaaattaatgtcattcttgaacatattgtatatatatatatatatttgacaattgaatatatatataatacatgctcattcctcaaacaaaggcacacgattggacacgcatgaatccaacttcttgacttcgtttctttcatcaaattaattcattcattttttttaatcatgagcatacatatatatgaataattttacatctgattttagtagagaggttcatgcagatggatagatcaatcaactgagatagttttagatagatcttttcggctcacagtttttttgaaatttttattagaatccccatattgtaaaaaatttggcagcataacaccatgaagatttatattattctcttcgattatataacacgtattgacttattttctgtagtctagtgaatcgaagaaaaatataaaaaatcaatgataaaattgacaacataagaatattagtcttttttcctttcctctttgattatatatcacatcgatttattttctgaagtctagtgaatcaaagaggatgagaatgactcttaatcacaagat

SEQ ID NO: 395994 - DNA, 1048 bp, Cannabis indica
atctctgccgatataaggataaaaatataagagcaagtatattatgggtgtaacttttgctattacattattgtgactaacaattttaaagacaattttatagtgataatatatttatataataataatttgcaattatgactattttcttttttgaaaataatttagttactaaatatgttggggttaaaaataagatttttgtaatgatatatatcatgactctacaaccacaatatatatatatataatacctttagtaaaaatttagtgcacactttaattaattagtattgctgattatattattaaagagtaagaaaatcgatataattagcaatattaaatgttttattaatgtataacttacaataaatatatctacatcaatttcgaaataaataatattatttaactacaatatattttttttgtgagtgtatcgtaataatattttacaatcattatttaatagctataaatatatgtatatatacaaattaagaaaatattattcaaaggcatatatataaatagaaagctactcatcattttgtcttgcagagatttgagcttcaacaacttaagcggtccaatcccagattcattgagaaacattaatatgtaagattcgtttccttctggcaggcgcgcacttattaagcttttcctaataacatatttttttagttcactaagtattagctagtgtccaatatttaataaattattaaattaaaaatgtctagagatcaacattaaatcatcaaaaaataatatatataacacatgaaatggttttaaatacaactaatacattatagcaattctcaatattttatatatcgtattgatataaatctaaaattcatttatatatagtatagaggcatgcatgcctttgcttccacaccggtggtgagtctttctattttagaacataaatatattagggatattggcggctaaaccacccgaactttatggtttgtaacacttaaccacaaaaatcaaatttttggcggctaaactcccattctgttttgct

SEQ ID NO: 395995 - DNA, 700 bp, Cannabis indica
atgatagtataaattgcttaaattgtaccgcaccacaccgtattttcaccatgtgattttttgcggatttaaaattcgtactctcgcggtgcgagtctgaaaaattacaaaaactgcatgtgtattttgaattttaaaaaaaaaaaaaagactacaatctataccacccacaccgtaaatattcttatttttaatgccaaaacagttaaaaagtagtgtaccgaaacatattttatcatattaaagtcttaatgccaaaatagttagaaggtatactgaaaggaaacatttcttccctttgcgaattaatagagtaatacagattttgatgatattatgagttataaaagcgtgggtagatgtgtgtgcctaagtaggccttagactctctgaaactctattgcgtgtgcagacagtaaccacagcctatttatctcattctcccaatattttcagtctccccatgaaataaatcaaaatatattcccccatatactaataaatttaatatctttatttttcctaaaataggaaaagaaaacatgttttctctttattttttataatatatataataatagaacttaataactactaattaattttaaaacaaaattctcaaaaatacttattttaaacaaagttatatttaggggtgtgatctacaaatcctcaaaaattaaaaaaaaaaaatgttttt

SEQ ID NO: 395996 - DNA, 1144 bp, Cannabis indica
ttttcacccccaactttgacatataccaagttgtgccattgaacttttcgggctgttaagaattatctctaaactatagaaattattgaatttaaggacttcagtccaattcagataattttactaatggatgcctaatatgtagcgattgtccatgtaccaaattctgctcctaaattttgacatgtaccaaattgtttctccttaacttccgtcttcttcagacgcctgtaaataaaatttaatggaaatacttgaatccaacaatcaaataatgctgtggatttgttcttctcaagttaaatagttccttctccattgaaattttaattttaatgttctagccctgttatttattttcttctgtattctgtattagctttgcttgaagttttgaattttcaattgtgttcaatcgcagccccttgatttgtgatgttatgtttcttatgttttttcgggtttcatgtaagggaaatagctctttgatggagtgttgtaactcttttctgttcttactttaaatatttggtttcactgataattgcagtgaagttttgccaagagaaccaatggctaccaatctaataggaaggcttccaagctcggaggaacttaatgcttttgcagtcgaacagtgggaggtgtgaaatttacatttgtttcacaatttccctttccgggcattgtgttcaggctcttaattttatcggttatctatatgatatccaatgatacaaatatctacaagtttgttttatgctttaggtttctctttcttatgacgtgctgtcgtgttaatcccagtgcttcttgctgcaacttattaactcatctcaagctgataggccgtcaaatattagctcttctacgatgaaggttttccagcgcggccttttgagtcaaaggtgcttttgagttaaaactataatgactcgagaagtagtttccatatctgatcccgtacttttagtttttttggctgttttttactagggtagaaagaaagctaccacgatttaaccgaaagtggtttccaagttcttggtatgaattgtaaacattttcgatcatttaccactttatgatgttctttacaagatatcatcattcttgttctgtgctaatgacagctgatggatac

SEQ ID NO: 395997 - DNA, 1612 bp, Cannabis indica
ggacagtccactatggcacttaattgagatttttgtacagaagtgtaaagagaaaaaaggaatgggggctcagtaggttttgccgtcaaaattttggtttatgtggttaagtgttaaaaaaataaaattcaagtagttttaccgccaatatccctaatagaaataataaatcttatgatttcaaaatagggtatgttatccgtgtttctagatggatgacacgtgcaattttaagatagttttaggtcaactgttctaggcccaatcgcaggcccaaccaagataatggactagatctattagcgaagtcaagccttccagatgttgggcagatggctcgtctagacaagatacacctctggcacaacgtatcttcagatggcatggcatcgaatagatctttcagatgagtgatttaatgggcatttgaatatccaactctgtctcatagcaatttattatcaaatcccacaacatcatggctttatttctaagatcatgtccaggattcgtatctttcgaataaggaaataaagtaattatcaatcaagcatttacgtgtctttattatccacaaaaatatgacatgatttgacaactatcaacgtgatatgacatccacgtcagaagaagatcaatgcctcatgggccaggctttaccaaatgaacctaaagtcaatgtattatctgtgtttatcagtgggcaatgcgtacatattagaaccctagcactataaataaaagaaaactcactgatgcaaatggttagaatctcattcctttagtgctcaggcaaatcctagggttcaaacacttggcaaaatacttgtgtaaatcaataaggttttccagtcttatcataataatattgcctcatggactagagatcgttaatccttgaaccacgtaaaaaatctggtcttattctttgtctataatatatttctttaagcttaatttattttttacaatttacaaaaaatctcggtaaatattttggtactttcaatgagagttgaagaaagaagtgataccaacaaagttgtgtactgcaaccatggtagccacctgaatcactgtcgacaaatctggtattcgtgatggggatactcccatggacgatgtgaatcctactactcaggagaaagtaagagtcgatagagacatgtcataaccaatcagtcgtcctgccaagaagactcaacatattgaaaaatatgttgatgagaatctcatcattgaagatgacctagaagatccagaagataatcctaaagatgatggaaaagacaaagaagatgagtattactataaaccagatcctgaagtcattggaatggctaaagaacttactaaaaccaaaaaaagttggcggatcagaaggaattctctcatgatcaaatgcgagaaactctagtaagactggaggtcaaaattgaatcaggagaagtgggtcacaatgacaatatccctgatgaccctgctcctcaggaaaacaatgttacgaaggaaacaaatccaaaaaaccctagaacttctgatctcgcacgagacaaaggaaaaggtgtgttgtaaagtccttttttggcaagttagttgaccaaatattttt

SEQ ID NO: 395998 - DNA, 617 bp, Cannabis indica
atatattaaatatttaaagttaatagtggaggggagtatcttccaaccaaatacaatatatgtctataggaaaaaatatacttaaccaacttataaacatcagtattagtagatctaaaaacatgaaaaatctaccctcttgagaaattggtcacaagattctaaatatcaattagaatacaatgaaagtcagaaactacatctttagaagattccaatccttttgccaccacaagggaattagttttaatataatgcactggaaactccattcagccaccgaagactgtagaagatcgacataacttcaagtatttttggtttataacatcctttaaaagccattgaaattgctgctaaaagttcaccatcaggattgtgaaaaatagctccaaaaccaaattgccgagaaatttccctgagaaaactctaaaggtgcgtttctttagattcaacttcattttgtacttccaaatgatagaaaaagcttttttcaaaatcttcactatgttccataaaagtttttgacttaaccaacatgttatcaactggggcggacccacattgtagcgagggggggcagtcgccccccctgaaaaaaaaaatcgagaaaaaaa

SEQ ID NO: 395999 - DNA, 920 bp, Cannabis indica
aagagaaaagaaaagtcttgttcgattagtcaagaccatgttagaaatctatttaatggggtctgttattttgccgtatatgatattgtaattgtaattgtacttatataatatatgtttggtattgtctgatatgtatcagagtactaaaaccaccagagtcacaaacattacattagctccaacgctgcgtattttgctggcagtggcgtggcccttagagaagaagatatactaggaagtagatatttatttatatatttttgtaataaaaatttaaaattaatttttttatctccacagtccacacgcccctaaacctttctcagtaagaaaaaataaaaatgatttataccaaaagaatcgattgtttttgttttggggagaataataaaaatttccatctaataatgttgttagcggcgaagctccaaaagagtgttcaaaagttttttttttagaaaaaaattggaaaaggaattttttttttaatgaaaattaagcatacctatatcgagttaaattcataaaatatggaattaattaaaatcggagaatttccccaatctaccatcttgaaccacactcgaaccactaacgacccaaactaattttactacattttattttttagaagtgacgttaaaaattaatttattcaaatattcataaaaatatttagttatttactattttattattacactttcaatttttgtcataaacaatagacgaagtgtaacaatgctcctaaaacaatttcaaataaaatcactgtgaaaagcgaaaaccgaaggcattattggtaatgggtagtcatagaatcgacttcaataggaactcatatgaacaagttgactagttttcccgacaaaagctaaggcttacgaccttcttcacctacaaaatctaacccacct

SEQ ID NO: 396000 - DNA, 1270 bp, Cannabis indica
tattttatctttttaatccattttaaatatataaaataacccctatgaaattgataaaaatagaaagtaatactcttaacctaaaaatacaatggctatatatacttattatatattttacatcaaataaataaaggacaagggattccctgccgctttgtactgctgcggaagatgccacatattgccatggaatacacaatactaatgttaaaacacacattcttcctaaaaaagttcacattatttttgtggtctttataaaaattggatgtctttattgtgcatttaacataattgataaaaaaaaatggtacatccattatagtaacaacaattatattatgttaattaattactggttatttttattattaaattaaaattttaaattaacatttaaatgatatgctagttttttgttttctttttaataatttttttcgtttaacagatactcaattattagctgataaaaaaaatagacatataatttaattaataaattaaacaactcataatatcatcattcaaaaccacaataatcaaaactgctccatcatttatttatttattttcttataaatacagtcaactttttattataatcttttagtcaacctttgtgcctgaaaatacatattggaatatggttttttttattttttattttttttattttttttttaatggaggtagtcgttatgcttacaacatcctctgtaaattttttaaaagttttgaatagtttatagtgtcgaaaataaatttgaagttttttgaatacgcgtggtaaactaaaatatcatgaactttgtttttgacattgtaaattattcaaaaaatttcaaaaaattacaaggatgatactataattataacaaatactactatgaaaaaaattagaaaaaaatatttcggcacgtgatttgggaaactttaaagagtgaataacatgaacatgagttcataattacttgggatttatatcgatctactatagattattattgtgataaaaattaggtctttataataaacagttgtggggatttatgccctaaaaacaagtatttaatggaaatatattataaaatatatagaatgcaattataagataaaataaatatattaagcaacaatattttgttttattttgttattagttatgtgaagaaccatgtgaatgtacacattaaaaccatgataagacacattattccttagattttacttaattcgtagaaagcagtgttatattattttgttt

SEQ ID NO: 396001 - DNA, 479 bp, Cannabis indica
tctctctctctctctattcaattcaagatatgagttacaccaaatgatcttccaaccccctgtcacatctgagatgggggtatttataggctctagtggccaaaagtacaaaatggtcctaaggaggcaacacatcactttcaagctgcaggtcgtaggtgttggaggtggccttgcgccttgtacttttatctggtgtcaggtgatccctaattgtaggcttgtggtccctagttgcaggagggtgatcccaagttgcaggtgcgtggtcctcagttgcaggagggtgatgtcaagttgcaagtgcatggtccccatttgtagaagggtgatcccgagttgcaggtgcatggtccccagttgcaggtttgaggtccccacttgcaagttgcatgagagtggtcccagcgtacctttggtcgggccctcagaccttgcaggtctgttttcgctgctactcctccttgttgggttttatg

SEQ ID NO: 396002 - DNA, 751 bp, Cannabis indica
aatatacatatatttttaaaattatcatggttatatatttttttggtgtaaccactcaaattttatctctgtgtatatatataaaaattaataatttattatttttcattatacatatatttatataaagagaggagggttgtagatgatgatagagtaagaagtttaactttaatgaagactatttatggtagcttttatcatcttatttgtacattttaggtcagccaagttttctattttatcatcttttactattataatttatatcttatactatttaccttttagtcaatatgtataagtacttgtactaacccactatagaactaacttcatattaattacttataaaaatatatatttacattaatatattatagggatatttgtggcataaataattatatttttaatatattttttatacttatatataatacttttttttttctatgaattaataacattatttcatttatattttcgttatttctatcactactagtttgttatatcttatttaaacaaattgtgacaaaaataatttaggggttatgcagaaagtcattcaatccaattacaaccgactgatccaatcctatacgatctaataaaatcagatatccaatcataattggatcaaatcgtatgttaattttaaaacttcaattggatcagttgttggaaatccaatggataactgaccaaaccaatccaattattatcgcaatggtcatctaattatatt

SEQ ID NO: 396003 - DNA, 1647 bp, Cannabis indica
agagagagagagagagcatttgtatagtcaaactttgcgaaacactttgatgagtttgggaacacttaaggaaatactagatagatgttattaatagcaaatttgtatttgtattctatatatatatatatattatctactcagattaataatatcagctatctctcgtaaagtaggcgaattgctataattctgtgtgttttattatttactcctttaatatatatatttattattagtttttgctatttatttctgcctacaacagaagaactatataaaacaatgaaaataatgagtgatgatagtaaatttatagaaatgatggatgatggatatgagaagagggagaatgaagttgagatataagatgaaatttgttggaaaagatatgtaaagattaatgtcatagaacccagaaaatatacctctctagaaatcccaaaggataattttccttatcttattagtcacgattaaggaatcatggtgatattttaaggattgtatttttgtaacatctttaaaaattttagcatttgtgtaattatcttagtcttgatgatatatttaaagaggtgatatttttgtaaataataaaagttcttttctttagataaaatagtttttttttttttttttgacgattgtaactcaacagatattcaagaagttcaagttacaatgattaagtttggacaagtatctttcaaacaaatcctcatcaagccctaaagcttcctttgccatatgatgtgcatggatattgttatctcttggagtatagcaaacagaagcatttgggaaatgtgacaaggaattcttgatatccattatgacatccgccagagtagaaagctccttcttgtgactataaatcttgctggccagctgcttagaatctttaaaaatagtagaaagtgggattcttacactgcagcaccagcttaagcccgatctaagagccatagcttcagccatggcaggtgtgaccttagctaacaaaggcacagaaactccagctatcacctgaccattccaatccttaaccactgctccaagcccaatcttactgttcttgtcattaatggctgcatctgtgtacaattggtaagatccttccttggcttgagataccgctgaggaggtgcacaagtggcaagctggttcagcatcaattttcctagcctgtgcatccctgtattgaagcaaatagttactggtccattgcactaattctgctgcacttggatgaatattcctgataagttttttatttttaagttcccaaatagaccatagagtacacagcagtaaagaaaagtcatcagtatttagatcagtatatgcagataacataaagtctcttatatctgtatttctatgcaaaaggtaaaaacggtataaaggggaaagtttccaaacctgtctcgccctggaacagtctagtagtgcatgagttacagtttctaaagaacaattacaagaagagcaagaaggagagggaacaattttctttctatatagattataggctgtaggtaaaatgtgataaaaagttctccaaccaaagtttttacttttaggaggaatactttggttccaaagaaaaatttaccaccaactattatagaaactagtattaga

SEQ ID NO: 396004 - DNA, 699 bp, Cannabis indica
taatcactctttctacaaaatgttccaggcacttaattgtatcgattttcactaatttttgtacaatgaatgacttcatgtataattttgttgacctaatgaatatatttgttcttgttcacacagtatgttgacctaatgattaacatgtttgtctccattagttctaattagaaagacgaaagagaaacaatcattccagccaatctttcctcaatggaacaaaggaactagtttcgttgttcttctaggcactagcttgtgtttgtaatttttaatacattactacctcagaaagtaatcataatatatggtttattcctttcccttctaagttaaggtatggcggagaccatcaataggacatgcagatccattaggaggtgacttcccatttatcactagagaaggccataatgttcttgatctcattttcacatctccaatactaagccttggtaagtttttggtgggacttttcctgttgtaatcacatgttagtacatttgaagtatttgatttggttgatctataaaactgtattgcagaaaaagttgcagagagccttgataaaattgatggggttgttgatcatggtatcatttccaagttcctgtaagttttatttttctctagtaaattctttatttttggtgtgtatatgactgattgaaatatactaggatctatatttttttt

SEQ ID NO: 396005 - DNA, 592 bp, Cannabis indica
tttttttttttttatcttttatgaattttactctgctacttttacagaaacactatccaaggaatcatatagaggaagaagaaatggcggtgtggcagtaaacactaggccccttctgttccaattatgaaattgtgatccccaactcgaccacaacaagaagaaaatttttcaatccattcaacaagtaactaaaatttctatcatcattctaatctaaagaagctcaaagataacaccacttgacattagagcctaaaatagaacaacactgacaagataacaccactagactcaattgttttcttgcacatattaatatattataagaaaatttacatctacaaccttaaaatacatctcatttacatgaatgatgtgacttttaaaattatcaaaattactgtagtatatgtagtgttttcattttcattttttttttttttggtttcacacgttgcagttgtatcaattctcaatgcttgtattaattctcttgccccagacgcccaactttctttttgttaactttacatatgtgtaatatatatttagttttaaaaagttttctctttcctcatttttttatatg

SEQ ID NO: 396006 - DNA, 557 bp, Cannabis indica
atttcgtttttggagaattagagagtaaagaatttggtaataaagagtagtgagtgtgagaaaaggttaagagagttgtgtatttatatatggaagtgatgaagagaaaagatgaataataatatataaggcgtggtgagttggtttacttggtggtgggggaattaagtgaagtcggtcaactaagaataaaagagtataggagtggggaaagaaggctggaggcttgacgactgactcagcttaattgttatgtaatatatatatagagacttattccaagtcaaatcagtgctactactactactactacttctactacaacaccttctattactcttcttctatattttataaaagtcttttaacccaatcaaattagtttttatttatttatttattaatgctactagaccaacttgaattttggggcgtgtccaccactctactttctatggtctattagagcttgggaatttgaatatatatatagtagaatctctatccaagaatacacttgggaccaagtaaattatattctaattgggaggttataa

SEQ ID NO: 396007 - DNA, 1122 bp, Cannabis indica
acttttgtgattcatgtggtgtgatggaaagtaatttattaaaaatgatgcttttaggtagtgatgttgttgtccttcgacatcgtcattttgatcatgagttttggcaagatggcttcgaatattttcgtatactaacattataatcaaaggccatattcattgtaattcttcctccatccttattttcaccaaacaaaaacaaacacacacacacacatatattaaagacacaaaaaaaggccaagaaatctacatagatttaaagacacgcagcttccattatcagtgtatttggacctccttagcctctgttttaggcttctctgttttgggaatggtaatagacaacaccccatctttcaactccgctttgacatcatcagctttggcatcatcaggcagcacaaggctggcattgtagtacccgtacctcttcgacgacgagctccaaaactcgtcgtctgagccactttgatcctcctcctcttccttgtgctctccctttatgatcaaaaccccgtcatctatagtaatcttaaggtcctccttggccagcccgggcacgtcgaatttcaacttgtagagctggtcgtgctcttttattctccccgacagtgaccacggcgacaagtttaggctctcaaacaacctgtttacgttctctgttgcctgcatcagtgcatttccaaggcttgaaggaaagaactctgccaccaaaagaaaagaaaaaaaaacaaagaggacttttgtaacacacacaatggccaagtctataacattaatataaaacaagaaaagatgaaagaagagagtaagtaccaaaaagggcaggaggaaaatcggcttggttcctcctccagaggcctcttttcctttgtctccttggtaaaactggtctagattttttgccttgggagacagagacttgttttccctctgagctctcagtagccaccttttcagtagcttcagtggaaaatctctgagcaccaccaatgatagcagctctctccatagcaccatgacccacaaatgaaggtgaagagagtaccctttggtgcatgtcttcaaagccaaacgagccaaagccattgatagcttataagctacctgtttcgg

SEQ ID NO: 396008 - DNA, 996 bp, Cannabis indica
aaaaaaaaaagaaagaataataggacacttattgtttgaagtcgagtagtagtgtgatgaaaagtcttgcaaccggagacggagtgaatggcatgatgaattttttgaacacttgaggtcgaaaagcaaatccgaggaaattcgcaaaaataatgtcatagacaaggagggcatgcaaagtttcaggaaattgggatgaaaatttttcaaaaaaaacttgagtttttgaaatggcaaaaaatggtggaaagatggattccttacggttttattctttgaacttagttactgcaagatcaaaatttagaagatccaacagataaaaatgggagagaagtggaaaagacagttcattaatgctaataatgtccctcgaaaccacaaaaccgccaaaatcaaaggcatgcatattttaaaattggattatgaccgaaatacccacaataatcatttaaaagcactttttattaataaagacattttaaggggaaattgttatacccaaaattcgactgtaccttagaaggtgacacgtgtcactctcaaagaatatgaatcaacaaatataatggcaattatatcattaaatacaaaatggaatacctcattaaatgcagaattaattgagtatattaataactcgatatctacacagtcttaagcgagattagaatgtacaaacaagtgattcacgtattgacaagaaaccacttcgcatcagaaggcataatctcgagggagacatagataacgcatagcgaggcatctacctcattgtatgtaaaaaagtattggcgaggtgaaatggttattagaacactttacttataatatacattataataactaagtataatgacttgagggacatgattgtccagtcttcaaggccttatggttaaagagcagttcttaagtttgctcagtacactggtgcccatgccattgctggaagacttatgaataaacctgttggaatttattttaccaggatct

SEQ ID NO: 396009 - DNA, 504 bp, Cannabis indica
aaatgtaaaaaaaaaaacattttttatgaaagatatctaattaatattttacaaaacaataacgccatatattaatatattttactttgttgcataaatttatacacatatcattcatatatacatatagggtatatatattctttagattttggattcacattggcttttcaccacataattaatattcttatggttgtagtagtccaacctttaagacatttccaagagtcgcaagtcagaggaattaggtgtgttgccactttctgattgagatataatttactttacccatgaagaaacatgttcacgacttttctccagtaaaacaaacacaaaaacattataaaaagtagtaaaaacggaataaactttaatgctaattcaagttgttgagatatatattctttcagcaaactatatatatatatatctatattattaattttttttaaaaaaagtgaataccgtttggcaccttgtattttgcaaaagtaattgatt

SEQ ID NO: 396010 - DNA, 1057 bp, Cannabis indica
aaactttctaatagtctataaaaatttcggatacctctaaaatattaatctataccaatgttacatctttagccaattcatcgaattttattgttgtcaaatataaaaataataaatcacacataatgcatatgcaatacatatataattcaataaaatctctgtaatttagaaattatatcatatttgcatattttctaataatagggcttatttctaatattggatatattatatcataattaactataatatactgattaattattaattttcatgtctaattatgcggtcattacattagaggacgtgctcctctcacctatgccaatggtagtggtgcaactgcagctaaaataggtgacgacgtcagttgttcgcaccgagagagggaggcgagaaagttgagaaagagaaagagggagggagtttaggggctacgttgagagtaaggtgagggagacagggtctgagggctacgcggtggtctgcggctgtcatgcgatgcgctgagtcatttgacttgagggagattgagaaagtgagggagagagttggaagaggggttgtgtgtgtatcgtgtccgagagaggcgagaggagagatagatagaatttaggattttttttaagttgttttaacaaatataattaaaatatgtatattttacacgggttacatgcgggtccgggtacaactcgacccgtgaattaattaaaagttatattttatctgaactattcattttcaaatgacatctataatgttcacaaatattcattttttattttagaaatttcttataatttaatccatagtaattttcacattgaacacacaaatgttcacaaaaataacaacccgtgaactcgttcatcaatgtagcgggtctaacttgatttgccagtaataaatgagcgttttcaaatgcatgggtttcacgagccagaacccagtcaaatctgaaaaactgagtttttgtaaatgtcaatcatatgtataaaaatataaaactgtatacgtctgtagaagccgaatgtaattctgttattgcaga

SEQ ID NO: 396011 - DNA, 708 bp, Cannabis indica
ttttgccgcaattatccctattagaaaagaaaagtcggatacctcaaaccaaaaccctaaagcgcgtttttatcagtacacctttatattgagcaaaagtgtctcaaatttttctatctccataccatcaacaaacaactgtcacatacatgcttgtttactttctcattttaattacctttctaccatattgtgtgggggaaatgaacttcactgagggaagaaaacggaagtgttggaaagttaattaaggtggggtttagttggttgtgtttgaaagtattggaatggaacgtcattctaatagaatgttctttcaacaattttcgtagaatgactattccattttaaaacaaaaggaaagaccatcctaatataacatgaaaaaaaatttaatgatttttttatcaatttttttttatgcaatttatattttcttccatcttattctcatttctatttctatattttcattactcccaaccaaactccacctaaatgaataagaaggtaaaatataaatatatattgttaaaagttttttggtgtgaaaaaagtttgtgatgctgaaagggtcttctaatatatcagttaaaataggaaataactatagggtaattctacaatgcactcccttaaagatgtagtgatgtaccctctatttgtttcagtattcagaaaaaaaaaattagtctaattttttttcat

SEQ ID NO: 396012 - DNA, 675 bp, Cannabis indica
ttccaaacgtcttacaatagttttgaacagccaagggctatcaacctcattctcggaatgttgaagtgacaatctcactctaattggattgtttataatacctgtgccaacctcacctcaatcacaattaggtaatgtctttggaactataagaaaacttactctagaattatgataatacaatgaagaacctagagtgattagcaagcacacttagaagaaataaattcaaattttggcttaaagtttgtgaaaagtgattttttggattttcaactttggagcttattaaaatcacttgaatagatttggtatataaaataaatgctcagccgacttaaatttttgagtaaaaatttaatttatagagtgttagagtgaaatatagccgcttatagctgttaaacacgaaaagcgagactaccagtgggagattcgatttagtgtttcccaaacagtaaactggtttttgggctcgtttatccgatttcaaaaattccagttgcgttctcttagttaaatgatatgtgatcttaaaaatcaatttagaaaatttagatatcattttttgtgaaataacttgtcgcacaagttagtgagccaaacttttgaacttataaatcctagtgtactatgcaaatcactttaacaagactaaagcaaatttataccatt

SEQ ID NO: 396013 - DNA, 1035 bp, Cannabis indica
ttaatatttttttttataattttagggcctcaacgtttagtgggctcgagacacacgcctagtttgccaaccctcagagtcggtcctgccgcaccaacaactaccaaacccttgcaagttgcatcctgttgaaccaacatatcatctatatatattatatatgttggttcaagaaagatactaaaacctactaaataatagaattatataatatattattattatatatacatattacataaactaacacattaacaatttaacaaacactcacaaattcacaattaaaaaaaaaatataatataattatataacatatatacatagaaaaataaataaataaaaaatgctaaccaggttccaaattttgagtttttaaaaatattaaacctgaaccagttctgataaataacctagttacacctgaacctgatctactaaaattgaagaggaaattacactatatacctcttttaacttgataacttgatattttttttaatttttttttttttttttaaatctattatgtttactttttttttcaattattctaccaattttacccctatcacttaaatcaaaattttacattttcccacaaacctacacatccatctacaaagaacataaatctattatgtttaaaattatctcttgattatgtgagtgtgaggataatttgagtacaatactcataaaaataagtataattgaatttaattttatttagaagtaaatttgattcatgtttaaaaaaagtgagtatttttcaatttctcccaaaattgaaatcctttttttttggaataattacataagatactattttttgtaaaatatttacatttttacgttcaaagaatgttttttttacatttttacgttttcccaaaaaataacacgaaaataacataaaatcaacaagaaaacaacataaaagtaacatgaaaataacaacaaaaaataatatacatataacaaaaaattaacaacaaataaacaaaatttcaacataaaaagaccgtattttat

SEQ ID NO: 396014 - DNA, 1251 bp, Cannabis indica
gagagagtgatagcattgtagctaaacatcttagctattatatatatagaagacatttttaaaagattttgaatttatatttttatttattatggcatttatgtaaaaatattgttagaaacaataaatttacattaaaaaaataaatacacattaaatttattttttgatatcataaaatgtgaattattctaaaccctttaaaatttacatatttacgatatacatcattatataactataaaaattaagattataattattcatttatcaataatgcgtacgaccgttttttttttaaaagattttgtctaaaagtttccccgaaatataccctgttttttttatgtgtatatgatagaattttcctaaaatatttaggttgaactacgtgaggtccacactatgaagactcaaaagctaaaatatatgaatgaagcacacacacctttgtgtaaaaaaatctaatatatatcaataaagctataattgatttttgtcataaacattggcaatgtatcaaattatgctatcagaatttttttaaccgttaaaaattttcactaaatcattaagattgttagatttaagaaattttatttaattttacttatgtactaaattatgtttctcagactttaatatgtatcaaattatacctctcaaattttgatatacacaaaatcatatttttaaattttcatttatgttaaacttgtcttactaaaattgtaaaaaaaataaataaatatacatttatataacataaaaccatgatctagtctggaatgataaggctatttctgtggaaagagttgtttcatctgcaattacttaccttgatctttggaaatctgctcaaaatagtaatggaggagcttcgtcttcttctagtcagcttcgtgctggtgttgagcactggattaaaccatctttgggagagttgaaggttaattgtgatgctgctctgttttctggagaaaggagtcatggtttgggttggattgccagggatcatgctggtttgtgtgttgctgcggctgctgtcaaacaccgaggagatattgatcctgttgttgctgaggcgctgtccatgaaggaggctttgagttggattaagtcctgttgggaagatagcaggactgttgagggcttgtgtcctacagcggttttattggagtcagattgtcttgtgttggttaatgctattaatagcaagagccatattctgtctcctcttggtcttattgt

SEQ ID NO: 396015 - DNA, 1330 bp, Cannabis indica
ctataaaatttcaaataatttaagtgcaaaaaaataaactgctaaaagatccttctatagtacgtaataaattacaaaaaattaattaataattataattaatttaattttaaaatataattaatcttaattaaagttttataaggaaataaattattaggttactttcaggttacaagttatttattatttatttttatttaatttccaaattaatcacaaccatttaatagtaatccaatggtttaaaaaaatgtaaccatgatggttacaataaaaatgtaaccattaaaacctcttccatatatatatatatatatatatatatatatataaattttgaaacatttttatgacataagtgattaactttataacttggatatatggtttaatattttaaaaattaataattatgattaacatttttttagcaatcatcaatagataataacataaatgttccatatatgtataagttactatttttgtttaaagtattatttatatatttataacttttttaaatatatatatatataaataggtgcagatcagattcgatcagttacttttacacaatcaacatctgatccgcacaaaatataaattttagatttctcaatctaattgaagccacacaagtgtaaatattcacactttgcggattagattggattagatattttatgaaaaccttgatttaaacatatttttttcttattgatataattagtttcatagagtaatttatatttattgatattgttatccgtgtttctggatacataacacgtggcaaaaaaatagaagccaacgatccagatgattacccattaagtctccttaatcgtggaaggtcatggaaagattatgatggcccgagaattgtctaatctggggaggcgtagagatctgccacaaagcaaataaccatccgggattcagaagccttgtcatttctctgagacccagaggagaccaacttacctaaacgtacatgcatacgcaagaaagccatgcaaagagtgtaagacagatgtcaattgcacatggagaattcgaggtcaatcgcgaaccaagagctagatagccagttgacttttatgatgattattcttttttgatacaaaattagatcttgtaccccacattagaccatggtagtgatcacacccctctgaatactcttctttatccgatgaatcctcagggcattttttccaccaactgcacacccttgcctgacacgtatcctacattaacaatagtccccactgtacggaccattcaccccacgagagagatgttgtgattttatgccttaaat

SEQ ID NO: 396016 - DNA, 620 bp, Cannabis indica
cgaggacctttgctgattgagcacatactgtgaagaattctgttgatggttgccgcacgggctgaggacctctgcgtggtgtagcacatactatgaagaaagttgttgttggttggctgcatgggcagaggagctttgcttgtgtaacacaaactgtgaagaatgcttctgttggttggccgcactaacagatgagctttgttcgtgtaacatagactgtgaaaaaagttgatattgtttctttctgcaactttgcctgactgatcgataattttccatgtagcttatagcgtgtgttcctagaaaagaggcatcacattttgttccaccatgaaacactttattcatgtcattctagatactccacataatgttgattaagagtttaacatcttccttatccattgttgttgccaagtggattagataatcactgttgctaaatttataattactacgcaagtgcacgcaatcaagtagtatactcacgcaagtgaggtcgaaccacagggaattggattaattactattaaactatacttataattctatttggcaaatcaaaagtatttatgattgaaaaaaggaagaaagaaattcaagaaacttaaagaaacaag

SEQ ID NO: 396017 - DNA, 1157 bp, Cannabis indica
agaggactggtgacagtttgggcaaacgatcccgaggcaacgaggttctgtccaaagagaaggtaccagccggagaagtgatcgacctctctgaggtggtgcctactgtcgatcctccaccccagaaggtatccaagtcaaagctcaaaaagggcaagcttggatggatctgttttaaccaagacctcctcaactgtcgtggtgctaagcttggaggccaagaagggaaaggacatgctccaatattaccttgatcgatcacttcccgaggtgagcgatcaactgtctggggcggacaatgagctatccttagagctggtgatgggtggagtcttgaaggaggcagctcgggtaaatattttcctctttatttttatcttatctatctaccaatgcatgtctcaactcttttccgtgcaggtcaatctaaagatggcctacgcctactccgagcaaaatccacaattgcgaagaaccttgccaccaccaacaacttgtagagggaggtggatacggccaacaagaaggttcaggacgtgagggatgagctcggagaggtgaacaagaagctccttgctgccaacaatcgggtcgatgagctaacaaaggagatttaagagatgccatcaaccgctcagatcgaggcaaataatgatgccttatccaagaaggtcaatatgctcaaagacgagagggagagtctccacactcttctttcaaagttgatagaagacatcaagtctaggcagaccagggaggaagagctctcgaaggaagtggaaagcctagaaattgtttccttagaggtcttctatgaatttttgaaggcccctcaagcaattttgattacctcggagatttcaaagaggcatatcttaattactgggcgggtcaggcggctaaagaaaaccttaaggcagccaattctacagttcaaatcgaccagagcactgagacccctgctgaccagagtgtcgagcctccgacccctttagaccgagctaacccgtaccaggagcccaggatccctgccgtttgaaatatttttctctttttttttatttgttcggtcccatgggcctttattattagacaaaataactggccaagcagttttaaacttgggttatatttctatttcatttttcagtacaact

SEQ ID NO: 396018 - DNA, 791 bp, Cannabis indica
cgaaaatcataagcatatattgtgctgagaatttaaattaaaataaatacttgattaaatacgttaggttttatcgtccaccttagtaataagaaaacttagaaatctatatgaaaattaactataaaaagtggtaaacaataacaatgagcgttttgagtgttttctctagatttttctgtctgaaattgtaatgaaatttgaaaaattttagcttctatttataagaggtaaaataactaatgagcaatttaaacttatttcaaattgtatggggtaagaaatataattacccaaaagtatttagaagtgccacgttgcgtgctcagatttgtgtttgagtaagtcggtgccacatggcatttgttgaatggctgaaaaacgaagcaagttggacaatagggtgacatttggcgggctgagagaagaggagagaagctccgttttgatgcttgtggaccacggtgagaggagggccacttgcggagagggagagtgagttgcacatgcgcctttgatgaagtggtgtgcatcaaacgcgcgtgtgggacaatgaggagacaagagctattttcggtgggacccgcggctggctggagaaatggggagctgccacgtggcaaatttgtctcctttataagggattttgggcgtatccttattggatttttacccttttagagcaagttcaaggacatatatagtgaaaattacatgagatttcataacaaagttagaaaaatatggcatttttaggtttgccactttttctatggtattttttcacattt

SEQ ID NO: 396019 - DNA, 2574 bp, Cannabis indica
atcatctaaaaataagaagaaatgggaaaatcacgacaaatatgtgtcgatttacactgtgtacaccagtatgaaactcatgaaaacatctttcttgtaaatgagcacagggtttcattttgcgagcttgatctcgtgtggatatttcagacattatgtgaagcgtcaagggaacgaacaaaattagcctaatcagcccaacgacccagataacaaaagattgcaacctcctcctgttgagggcgaggatatattggttatcttgggagggctgaatcttactggagaaagtaataatgcccagaagaaatatgtcaatgaaataaagaatgagcaatcggtgtttgctccagaaccaataaaaaaagctaaaatagaagaacatctgattatattctcaaaggaagatacgaagcacgtgaggtatccacacatcgatcctctcgtcattacagttcaactcgccaacaagagaataaagagagtgttggtggataatggaagctcagtaaacatcctttacacggatacgctgaaggaaatggggctacaagatgcaaagttaaaaccttgcatagtgaacttatgcagatttactggtgatagtgtcgcctgccaaggcctcattgaactcccattaactgtaggagagccaccattgtcgacaacactaatgtaggagttcttagttgttgatctaccatcagtttataaaatattgatgggtttcccaacattgattggactaggggcagtcaattcaatcaaacacctatctctaaaatactagacatcaggaggagtaggtgtagtgcgaggcgaccagttgttggctcacaaatgttatcgtgtagaacctcaaaatagaagagccaaccatcaattaatggtggtcatagaaggcgagaagaaagaagaggatctagaccctaggatccaagatgagaaaaactagttaaaacaaattgaagaactggaagagactattttagatccaaacaatcccactaattgcgtgtttattgggaaaagtctggatggaaaattaaaatagcagctaatcaactttctgaaggcaaatcaggatcaattttcctagagccattcagacaagatagggattgaccctaaagtgatctgccatcatttgaatatagaccccaattacccgaccaaaagataaaaaaggcaacccttagattctgagagacaaggggcacttaaagaagaagtggacaagttattaaccaatgatttcattcgtgaggccttctatccctcgtggatttcaaatcctgttcttctcccaaaaccatatggcacttggagaacttgtattgatttttcagacttaaataaggtgtgtctaagagactgttgcctactaccaacgattgaccagttagtggatgtagttgcaggacacgagctgatgacattcatggatgcatattctggatataaccagattaaaatgcatgttcttgatcaggaacatacaagttttgtgaccaacatgagactttatttttataaagtcatgccatttagattaaagaatgctaaggcaacatatcagcaactagtggatgggatgttcgaaagcagatttgataaaatatggaagtctatgttgatgatatgttggtaaagtcgataaaatgtgatgatcatacaaaagacctcgaagaatgctttgaaattcttagaaaatacattataaaacttaacccaaagaaaagttcttttggagtctcctcaagaaaatttcttggtttcatagttaatgtgaggggaattgaggcaaatctagaaaaaaccaaggcattaatagagatgccttcaccaaaaaagtcgaaagaagtccaggcctcaacaggaagaatggcagcattaaacagatttatttcaaaatcaactgataaatgtctaccattctttaatgttttacgaggcaataaaaattttgaatggatagaagaatgcgaggaagtttttaaaggcataaagaagcatttatcaacacctccagtttttgccaaaccaataactggagaaactttatacctttacgtagctctctcagagagtccaatcagtgtagccatggtgcgagaagaggggaaacaccagcaacctgtaaactgtgttagtaaaaggtttattgggggcagaatcgagatatccccctcttgaaaaacttgccttatgcttgatccattcatctcgcaaactacagccttatttccaggcacatcccattaaagtcttggctgatcaaccattaagacaagttttatcaaaacctgatgctttgggaagattgataaaatggtcaatcgagctagggcaatttgatataacctaccacctgagaacatcaatcaaaggtcaagctttggccgatttcctaattgaagagataatctcacaagaagatccactcgtcaagcacaatacagaaacttggaaactatatgtgaatggagcatcgaatgagaatggcttgggggcaggagtgataatgatgtcacgtgataacttcaaatttcactatgcattaagattccaatt

SEQ ID NO: 396020 - DNA, 778 bp, Cannabis indica
ctaaacttccatgacgtgcaaaatcctatcctaattgaccaacattactgttttgatccacgtggctgcaaagacttggtaataattaataaaatttcactaattgttgtaattttagggagtaaattatgaatagatttgattatgttttttgtgttttggacaggcaactgcagttcatatagacaatgtgaccttttcgaatgcaattgggacatcatcgacagaaatagcaatgaatttgaattgtagcaaatcagtgccttgtactaatattaacttcaaagaaattcgattgacaccatcaaagccattaaaggttatacagtcaagttgcaacaatgctcaaggaactaccacaggagtagtccaacctgcttcttgtcttcatccttgatcaaattcatcactatatatatcttcatttatttgtaattatgtttatgttcaaatgcaataattatttaaagacaaaatattcatttgacatttgtttagtgccaatatgcaattcgtttcattgttttgtgttgaatggtattttattttcgacttttgtattttgccaaatgaaataacttccatgaggcaataaagacttctgtaatcgcattgctgatgtgcctattaaatattatgcatgtttacctattgcttttgggaaattttaagcttaattaaatgtaaaacatgttgttttaatatatcatacaattagtatatatatatttttaatatatatatttttttttcaaaaatacctttacatcttaaaaaa

SEQ ID NO: 396021 - DNA, 1098 bp, Cannabis indica
tactatgtcgcgactaggaaacttaaaattggcaagggtttattcctcgaaataaaatcatctttgataaaatttctaagagcaaaccttgaaatttttgcctggtcacatgaagacatggtctgaattgatccaagtgtcatgtctcacgccctcaacattgatccaactttcatcccgtctagtaaaaaagaagattgatagataaagagcgggcacatgcattgatagaagaggtagaaaggctttgagtaaacagattcataattgaggccttctatctggcctacatagctaaccctatactggtacccaagctgaataagaaatggcaagtgtgcattaatttcactaaccttaaaaaatgcatggccaaaggattactttccagttctaaggatcgattagatggttgatgctacagcagccatgagatcctaagcttcatggatgcctactcgcaatataattaaataagaatgcatccaccagagcaagaacacactagctttcaaacagatgttggtttgtactgttacaaagttattctatttggaccaaaaaatggtggggctacctaccaacgactagtcaagaagatgttcaaagaccagattaggtgtaacagggaagtatatgtagatgacatgctcatcaaatccagaaaagtcgggggcatatagaagacctgaacgaatgcttcaaaatcctcaaaaaatataacatgagactacatcccttaaagtgttccttcgaggtcagatagggtgattttcctagattcattgttaatgctcgaggaatagaagccaatccagagaatattcaagcccttctggatatgaagtctccaacaaaggtgaaagaagtgtaacgtctcactggtcgaataactgtactaagtaagttcgtgtcaaaatcaacagataaataagttcctttcttcaacatcctctagggaagcaaaaagtttgaatggatcgaggagtgtgaaaaaaaattcaagaactaaaaaagaaacttgcacaacctcttatctgttggaaattattattttaccaggatcttagatctactcacaagtatgttgtttaaaca

SEQ ID NO: 396022 - DNA, 631 bp, Cannabis indica
gagtatgccttaattgctcttaaaataagtgtgtgactatatatttgagcatttttatcattttttctcatgtttttatatatattgtttttaaattttgtgatattgttatcatttcaattttaaaatacataacatatctaatttctaaaaattaattttttaaatattttatttatcatcattctcatatttaattttgtaagtttagtttaaattattttaatggttaaaattattagagataacaattgaactttttttttacccaaaaaatacttttcgcagttttacattataaattaaaaataaaatatagaatttaaaaatttatgtgacatcccatatgagttttaattgatattcttccatctatttttctaattgttaattaataaagtaaaataatcaatatcaacctcatatataattgaaagctcaaacaaaggtgaggtagcatactataaattttttattatagtgtatatttttctcatttttttacacttttagtagtataagagttatttggaaaaatctcacatagtttagaaatcattgtgggtgatatatatttaggttgtgtgactattcaatgattacatttttttttacctataatagaaggtta

SEQ ID NO: 396023 - DNA, 369 bp, Cannabis indica
aatattattttacatattaggtataggaatgagggcatgttttccacatatacaatctaattaaacttttaaatgcaaacaatcaaaattagtatttgaaatttgttgcaagttgagaaataattaatatattcaaaatataaattaaataaaaatgatttatttaagggatcattgtaaaatgttaggaagtggtgggaaataaattatgaaagagagcccactttgttgaataattatggcactatcttaatcgcagtgtggaattaattgatgcatgcatatttccgtaccaaagtcgttgtttgactattctcattagtggggtggggaatggatatacaagttttttttttttttttttgttat

SEQ ID NO: 396024 - DNA, 1280 bp, Cannabis indica
attgctgttacaattcaatggtggacattagaaacagctatttattgatcagggattggcttgtgcaatttgatgtataattgtagatataaacagaactttgaatgagtatcttttgcataaagactttggaacacaaatataattggaatatagtttggtttcaatccctttccgtagtgaaatcagatagtgctccatttagggtgttataatttgacactgattgtttaaaactatatatctatatatacaatatagaagaagaagaaaattttaagctaagaagagaatattccatgttaccgactataaataaaaaaaaaggaaaaagaaaaagaagcacttgaagtttatagtaacagtagtgtttactgtaacctttttagagttttcttaattaataattaggtcggcaaagaaaggttttgccgcctgattactcaagtgcacgctttgtaggtgtaagttaggttttcctatttttttttcctccaaatcttaagatgttttgaaatttgaaaacgtgcaatttaagtccctgttaggaaaataaaggaatagaagatgagactattacaaataatagcataaaattacaagtaacaaaattaaacaaggtaaagaaaaaaatgaagtgatacactactcaaaacaaataatacaaataaactgtcaaaataataataattaaaaagatataggaaataattatcactatacttcaacaagtttcaaattacattgtccgaaatgcttatttaatccatctcagaatgctgtggagattacacaacggacaaacctttttaaatttatcaagtctagtgcttcttaattaggatgagaatgtaaaatattggctaaatgactcttatttgaaatttaaattatatgattctctaattccttccttgttaccaaacattgcttaggcatttaattatgggcataaataaataatatgggagttacttaattgaagtgtttgaacaaagcaaagcaaatcaacatgtaacagatacttctgcctcagctctcccttgccactttaaaattgtcaaaaacattccaaaaatttcttatttattctacaacaaataaaattatgtaaataaccactataaactttatcatcttacaccaatttgaatcgaaacttattaactcattttcacaaatatgtgaaagttccaaattttgtaacaattagttaccacactattgtcactatttacaactcatgttgtaacatcgttttaatttacagtacaaaaaac

SEQ ID NO: 396025 - DNA, 1381 bp, Cannabis indica
aaataaaatcattgggtttatgccgtttacaaatctaaaactttgggtacttatgtcactattttccctatataatatcttgtatatgtttcttcctctacatttaaaagggaatatatgtcaattatttttataggggtatatatttttatatggaagagatttcaatggttacatcaaatatatagccatcaaaattgtatttatttttagccattaaatcactattgtgattattttagaaattaaaaaataaataaataataaataacgtgtaacctcatattaatataatattttattttcttataaaagcataattaaaattaattatattgaaaattaaattactaatagttattaaatatataatttgttactaagtaaagatcttgaagttaattgttttttaactgaaataattgaaatatttgtaacaaaactgcttataatttaaaattattatacacataactttaattaataaaaaatagtaagaatgacctctaattgaagtaattttacactcaatcttatttttaatacatttaagtgccaaatcagtgtgtcagtttcatattggttcaagttatttagtttttttgtaaaaaaaaaatttgaaaacttaaattaaaaaatagtttaaaatgtaataacaattataaaattaaagattagttaactatttttgctcctcggtgaaataaacttcatcaatctagaagttgtaaaaaaaaattaccaaagtagattatctatcaattgagatccatgtttatcaaaattactaaaatagattattaattaattgagattgttactttcttacaaataaacataacagtaggaaattagcaagcaaattattaaaaatcgaagaaaaatctaactgtagctagtggattggaggaatgggtttgtggtagagatgtaggagattgcatcgaagtggaaaattcacatgatgttaggttaggacagattgaaactctaatttttgaaattggggattttttttataagggaggaagatgagtgaagcagttgtttaaaaaaataattaattatttaaaaatttattttacaactagtgaaagtctaatttttgtaaaaaaaatagaattttattttaaatattacagttaaatgatttaactgttagaaaaattaaaataaggatttaaacataaaaataaaattatttataaatattaactactatggaggtcttattaaatagttaaattgaaaattgttataaatagtattaattatgtggatgtctaaatcttttatttattaccattaatgtaattaacattccctttttcttagtttccctttctcttagtttcttaatatttgactcttgtatgtgtat

SEQ ID NO: 396026 - DNA, 672 bp, Cannabis indica
caaagaaaataggacaaaaagtgagtaaatacaagcatacaagattccaagccccctaaatcaacattggccaaagagtgacatatagaacaacaatgtatatagggacccacaacacatgggcttcttcattgctcatcaccctttccattgtgttgttggccccccctcctccctcaacactctcctctcttctctaatagtaattaacaattattctttgaatttcacacacaataaataaataaaaaaataaataaatgaatgaattatctttaaagtaataactacaaaatttggaattatgtgaatttcattatgtaaataatttagtttggtagttgataccctttatcattactcacccgttaaaagtgcaaatattaattgttttattgaaacttggattgtatatgctttttctttcacaagttaaaaacaaaatagggagggattcaatcaatctttcaaatctattgtcaacaaacttgtaattttggtaagtttaaaattgttattttgtcaacaaagctgcatattgtcttgtccgtagctcttgtttgtatccagatcgtatttttagtgaggatgatgttcctcctgattttctttctattgtaatggtcgaatcttcttattaataaagttaccattttccttaaaaaaaaaaaa

SEQ ID NO: 396027 - DNA, 591 bp, Cannabis indica
gagttgagttttcacatcgtgggtgacgtttgaatatcttctcaaggcttatgaaatattggttggtaattatggtttatctttctaaggtgccacatcatcgaaacccttcaaggtctgtacaggcttgtctcgtgataaccgttcaatgaggcaactgttggttttccaatgcaacatgtcacaatcgcaacagtgggtcgtgatttctaaaaaagccccaaatactaaaaatgagggttttattttcccttttatttcatatgttcaagattttcaaaaagtcctctcaactttgaaaattttccacaaattccttttgcttaccaaggattgtttgtggcttgttatctcaaattctacacagaatgatgtggcatccaacatggtgacacatggagaacattgagaagtctggacggattattttctctctatggcctggctagagaattctatatttaaaagtggtaagtttatgccttcaataggaatcatccaaacagaacatgtacgtgattgtctgcacagatcttcattatctagtgaagattctcattgagcttcctaatcacttcataattacaagta

SEQ ID NO: 396028 - DNA, 1408 bp, Cannabis indica
ggtcattagttgatcaattatatctctgatgatgtcgttctccacgaagttcttgatgagcttgatcagcgtgcgaaaggatcaattctctgtatctgcaatgggagcagcaagatcagcttctatactcctagctactctcgtcaatgatagaaggaattctgactcatgttgttggaaatgaaacttcagcacaagtctggaaaactcttgaggtatatttctctacacaaacctctgctaaaattgattagtaaactaatcaattcgccaagatcaagaaatgatctctctctttttttttaatgattacttgctcaaaatcaaaactgtcgttgatcgacttgagtttgttggccaccctgtctctgttaaagaacacatttatgcgatctttaaaggtctgcctgttgaatatgatacctttatcatatcttttaattcacgtaaccaaccatacaatgtagctgaaatcgagtctctcttactctcacaagagcatcaaatggataatcaccacaaataattaaattgttaatcttgcaactaatcgaccatctcgaggtcgaggatttggttttttcttttctaatgcagatcacagatccaatcatgtggcttcttctgctcctattggtagaggtcgaggatcttggaatccttatgcagttcctcctcgtgcaaataatggttttgctcctaactctatgactaaatgttaaagtggcttaaaaggctactagataattatttaacctatggaaagttctatgcagtttttggcattattccagtcatggattaactactagtgttacttcctgataacataaatatagttgccaaatagtaaagaatccaataccctaagaggattaaacatatagaaaggaatttcataatatcaaggaatttgtgtttaaggagatgtaataatggagaaggttgatattgaatatagcttgtcaaatactattacaatgaaaatattacatactacacttgatcaggacatgaaggtatttagattgattgacttttaattttatgttagcgtaagtaggagttttttgagattttatgccctaaataaaatctatttcaacataatcagatttactaattaataaaagatcataaatcattttatgttgcatagttcacatgattattttcatgattatatgtttaatgtataaattctattatatcttaaatatatagttattcacaattacaacgatgtcatcatagtggaaagtaattgttattgtatgtttcgaagtttttagttccatgatttattagtgcattggatttacattaacgtgataatcatcaataaaatttacttacacttgtataagtggaatgtcactagtatcagatatatggagtatatatcaaa

SEQ ID NO: 396029 - DNA, 738 bp, Cannabis indica
tgcaccaatcaatatattactaaaaatatttaagaaatttagaagtttattgtcttttttttaattaatatatattacataaaatatatataattaagtgcggattggattggatcggttactttttgaggtcaaacaacattcaatccgcacaagtgcggattttagatttttcaatccaatccgcataagtgcggatatccacattttgcggattggattggattggatcgcgcagattggattggatcggatactttgtgaacacccctaataaaatccttctagtaaataacaaatgaaaacaatgccattacagtctccttgcatgttttcttttaggtatcaatccatacttatactatacatttcaaacttaaatagtcaacccataccaatacccagtaaaataaatattttttgatttaaatttgggatatttgcagcaaaattaattaaattaattatacaattggtaatacttaatcatataaacagattgtttttagtaaaactctctaaatcttactttcattaattatttatcccttttatttaaattgtgttgttaaatgacgtcgtgtacaactggtgtatacataaaggtgcaggcagcaacatttaagtggtctacatcatttaaaaattattttaaaatataaaaataattaaaaaaaccaaaataaataataaaattagaaaaaaaaaattcttcttttcttcttttttcttcttcat

SEQ ID NO: 396030 - DNA, 592 bp, Cannabis indica
acttgagtgtgttcaagtgttagctaacattgtataaaagtcaacttacattacattgtttgatttggataatcagaactggaatttgtaattgaattgattttatagtggatgttactttacccagttcaagggaacccaagcactactcggttggaatgcgtttccaatgcagaggaagcttgtaaattttgtgttctttgattttaaattctgttcagatcttagaaataatctgttgagattaatcaattagaattcgtagtaattaggactttcacaatatttcttattatacacttgtgatatgtatggtgttgaatttactcttgcatctcttatataaatatttgtatgctatttatattattgtattttatttattgcttattgcatgagtagtaattttctttttatctcttaattctcttcttttaagtgtatatttgcctattgaattgtaatattatttaattattgttttgaccatatattattcttctaatatagtttggtttattatttttattgaagcacgaatttttataacattcttactcttactcttatgtatatatactcttttatttat

SEQ ID NO: 396031 - DNA, 996 bp, Cannabis indica
acttctctctctctctctctctctaacttttttggttattactgatcatgagcttcatatgtgattctctcacaaagttgaaggatcacaagcattaatacattattggagagagaaagaaagaggaagtactctttgcttggtgggttgttagtttaaaggcaaaggtagtactgagtaaattatatagtagatgaccagtcaaaaagaagaagatggaaacaaagttaaggagaatatgtgatgaggtcttttatttacatgttatgatgctgctttcaatgatttgtttggtcattttcttttctttaaagcagttttagagggagtgaaagattatgccatgtgcacagtgaagtaagtcattgactaactgactcaaaccaaactcccagaactaaacaagtttatacttcattttcattagttcaaggcaaacacatctaacaaatttatatcatcattgaaatatatttttagcttcaaattcaaaaggggagaaaaaaagactaaagaaaaataaaaagatggtaggaaagtgcaaatagctctttagtttctctaaagacattttattcgagtgtactactttgaattaaagcatcaaaagaagagtaatgatgttgatactatttgtggatgctaatgctatatattactaacatattcgagatcaagataatcctaaataactaattttaattcatgaaacagctgatctagttcccaaaccacaagcacacagccttagcagaaaatgggaacttcaatgcctcaacaataaacaattgcttatgtttattttgaatgagcaaaaggtagagtgtgaatcttatcttaatcaagtgactttacagggttgggatccttcccaaaacccatcattgcatgagttgctaacatggaacctctacgagtagtttccataaatcgaccaacaagtggcagattaactgtttctctgttccaaagaggcttcttgttccacctacagta

SEQ ID NO: 396032 - DNA, 680 bp, Cannabis indica
caacccaatagtaacatgatctatgtccttagttgtcattcgcaataaatgtaaaaaagccaaagcctcttcccactggaatgaatgaatatatcctgccaacattgcattccatgatatcaaattacgttctggcatgtcattaaagagttcccttgcctcgcttgtcttcccgttaatcgcataaccccacacaattgaagtccaagaaaccaaatcttttgcaccagactgctcaaaaattgcacgagcttgttccagtttcccacatttaacgtacatatctattagggagcaagaaactacctcatcaacatcaaaacacatcttaatagtcactccatgaatttgaataccttccctaagtgcagaaatacttgagcaagcaacaagtgcattggaaaaggtaaagcttaagggactaacagccgcaggaaacatcttgaaaaacatgaaaattgcttccttcccatcattcatttcaacataccgccttacaataacattccaagaaacatcattggggttacgaatctcatcaaacttcctacgtgcatcactcataatccaacatttcccatacacatcaacaagtgacgtttccaatattatattgttaccaaaaccatactttgaagtaagcgcgtgaatctgtcgggaaagacaaagagacagtagtt

SEQ ID NO: 396033 - DNA, 928 bp, Cannabis indica
atatatatatataataattgaataatttttacattttttgacagtatttttttttttttttggtaaccgataaaggttaaaataacaacggtaacaaaagttacacagaaggaggaggattttttctttccaagaaagttcattgtctatcctaagggcatgtttagccaatctatgagcctcaacattaaagttgcggctaacatgagaaagatatgccccaggaaaactagacaataggactttaatatcagaaaagataacccccagttcatttaaatacacagtctggccctccaaagctgagaccaaagaaagtgaatcagaaaaaactttctccacgggatgtcccacatctagagcccaacgcaatcctactagtaaagcaactgcttctgcctggaaaactgaaaaggaacctacaaatgagatagttaaaccacgttttgacagtaatgtgttcaagaatgttagatttgaagaggtcctcatgagggagaaagattattactatacaatgctacgtgaattaataagtaggaagagttatctaagaactcatacgtcaaacatattcccttgaacattatacaataaaattgcacactcaacgatccaagttgcacatgaagtgtgtgagcaagaataaacccttaaaagtcatggaagaactcttatccaaactaataaataaaattacttccagtcttatatcttcttagttaaagtaaataattttataattaagcataaacaaaatcaaaatcgttatcatggttattagggtagaactaggggtgggcatccgatccaatccaacctttttttatcatccgatccaatccaattagtaattggatttggaaaatcatcatccgatccaatccaattctaattggattggatcggtttttaattggatattcaa

SEQ ID NO: 396034 - DNA, 356 bp, Cannabis indica
cgtcacttgatgtaaatttctcttattagtgtttagtattttactgagggttatattattattaatgtagttaagcattactaaccaatcgtggagcactacttatacaagattagacactacactgatactcaatagcaatactttaattatatatatatatatatattttgggaagttgaagtgtcttaaatttgaatttcctttagagaaatgctaagaggatctctaatggtaatattttgaaaaatacttgatgaggtagaaagcttatgtggcaaaatatagggatatatatatataatagtttaataaagaaaaaacttatatatatatatataataatatgtgatatc

SEQ ID NO: 396035 - DNA, 872 bp, Cannabis indica
tttatctaatatgaactataagttaaaggatctcaacataatatgtatagattaaatctaaactattaaaagaaatataatacctcttgaagcatatcaaggtatgtttatttcttttcgtataattaacaatcatctaatctaagaattttgttgaagaatctacacatcgatctttcaagccaacctcaacactcagtaatagagtagactattagatcttatttggatgaacaaatttaagtattacaacgtgtactcaacttatgagacactataactgagacggggttgtttaatctcatacacacatgaattggtgtatttgtgtgagatgaagagagagtgtgtaggcgtgagagagaatagggagtgaaaaatcaattcctattattctctaactttgttaccgtatacctcaagctatttctttcaaatataaatatataataaccgaataataaatatcagttagattttttattttaattattattgttgaccttgaaaagtgatcaactgacaacatggtcgtgcagatcggatgcttgccacgtatgtgcacaaataagaatgaaaaacaattgacaacagaatttgttatagaggttcggcccccttgtgatagcgggtaatgacctactccctttttagttgtattataccgagagaattactatccaaatcgctataggtgagatatgatatagtacccttaggattacaatgtatgaatcgatgctatcaaaaatcaagtgttggacaacttagggtgttgtacatcctaggctaggcgtgtgtgtgtgtgtgtgtgtgtgtgtgtgtgtgagagagagagagagagagagagagagagagtagagagagagaga

SEQ ID NO: 396036 - DNA, 649 bp, Cannabis indica
ttattttcatttattgattatattttaagtcgggtttggggtcgaggtctaggtctaggtccaaggctgggatcgaggctaaggctcgggccggagtcggcagggtctgagtctaggggcggggttcgaggtctgggtcgggtctagttttgggttttggattgggtttggggtccgtgctccgggtcgggtccaaggtttgtggtccaaggtctaggttcaggattcaagaccgagtcaaggtcgggttctgagttggggatcgggttaggattcaggttccatagtctaaattggggtcggagttaaaaatattaataaaaaaactattaaaaaaaattgaaaatgacttttttttcaatatttttaaaattttgtttctcaattgaaaaattaaaatgaaaaacatttttattaaaacataattttggaaaatattttaactcttctaattttaaaaacaaaataatgagtaaaaaaatattaccaaatgcactcttaatttcaaatgtattctatctctacttacctgcaggggcacataggggtgggatcatgtgggggcacatgaccccactcaacttttaataaattaatttttggacaatttttatttatatacaagtaaatgtacattattaccaaaaat

SEQ ID NO: 396037 - DNA, 440 bp, Cannabis indica
aatgggatatggcccccagatatcgaaatgtaagagatcaaataattttggtgaaaagttgttattggacacaaaaggtaatttcttttgttttgaaaaatggcaagttggacagttatgtacattagatgcatcaaaaggaaattgcagtctttattcaatttgtttgtaattaatacagaatggtggtcaaggcgtgtgtgccattagtttttattgtgtatattacacgagactacaatgtatgcttggtaatgagaagcttcttgatccagatagtaaagcttgccaattcttctagctgtcccaatcgtcaatgtttgagaatggtcctcaatgtaacaggtgttagacgtaaaatacacattgtatatattgtcatcaatttaatgaggtgatagaaagcaaatttaattggaatttaggtacaaataggacat

SEQ ID NO: 396038 - DNA, 791 bp, Cannabis indica
gagagagagagagaaagggtgatgagttctaaactttttttttatttctctattttctttaaaaggatagaacccattaattcatttacttggctggaatatattaaatggccagctgccatgccatgaagaagccacctaatctcctcatttaaaaagatcaaaatacccttaaagcttaaacttaagctaatacaagcctgcggtaaaatggtcaaaaaccataacccgctcaaactcgatattctatttatctcaaataattatcccactaagaaataggttctagacttacctatgtgactcaaatggccatccatcgcattttccgtcgtcgccgaacaaaaccataataattgcagatttcatatataatacaagtaatacctctagagtttaataaaatcttcggaattgagattttataactctaatgcccatttctaaaaatgggacccacaattaaataaattcataaataattataaaaatatcaatgattaacgctaattgcctttactaatccatattctaaaaatgcggtcattacaccatattgcagggaagaccaacaaagccaaaaagcctatgctcggacactccattacgagcccaaaagcgacttcctggtaggcaaagaatgaggctctaagcaaccaaagtttggtgagcccacgatctctttctcaaaaggagatcctattcaagaaattttcctgcacaatgaccccgtggtcgttaccacacaaatcaggaatagaaccacagtaagatactgttggaaattattt

SEQ ID NO: 396039 - DNA, 882 bp, Cannabis indica
tatgtacacattttcttaacattccattatcccatatcgatatgaaagtaggagtaccttatttctttttgaatataagtaagctcttattctttcaatgttccaagttcattttcctaattatctcattatatatatcaattaaacccaaatttgaaatttaataatctttttaaagaaatcaccaaaattgaatttacttacaattgctaaaccatcttcttgaaggtattgtgattgttttttacttggaaactactgtatctttgtacgtgtgataactgtaaaaacaaattaaagaagaggctccgaaaaaaattaaagctagaaaattaattaaaatattttttgcaacataaaaaagaatacaaaatattagtaaaatatacctaaagtaatgacttaattttttaatttgtatagctaataactataaaactaacaaacacaaaagtttaaaataaaaagtcacaacataatatacataaccaaccaagtatattagggctattatagtttatcactttatacttattattatttgggtcaaaattatactcaaccatttacatgaaattattaagacaactaagagagcattttcatacaaatagtaaggtgattgttttttaatagaaaattaaaagaaatctcaaaaaaaaaaaaaaatcggacccgaaatttttggtgattttaaagtctttgttttacgtgttttcgatgcatgaaatctatatgaatggcttaattttttcatttagatcattttggaattgatttcatgaattttggtcgtcggtgtcgtttttcaaggcagtgcattttttccaaaaaaaaaaaaaaaaggaaatattccgtaatttttattaaatttttatttat

SEQ ID NO: 396040 - DNA, 846 bp, Cannabis indica
tacctccagctctcagctcctccttctgcataccagcttgattgctcatacagctcagtatttctccattgttgtcaggctattttatttttccactccctgatcgagctaatttttttttttttttttgtttgttaaagtaaaagattaatggcagaggtatagatttttgtccccatttcaacagccaaaaatgtgtaaatccaaaatccgtgtttttctttcttcatttattttcttcacaatcccaaatcttacaaaattttagctgaattttgttttgcttaggtaggtttcagagtgttagtactgaacgttactgtatagcaacacttttcgttttcctttgtacaacaacattattaaaaactcggccataatcatcaattttttggcttattgtaaaacaagacatcggttctggaacaatatttgatttggtcaagttactttttttatgcccatcagtattaaaatttgtaacaagtgaaaatgttttctatttatctagttcaatacattgatttaaactaaattggaaataaggaaagaggatctctacttggttcatttaattaaaaattaacaaggaatcaagaggattttgtttagctgaatgaaggtataagtttgaaagttaatgtcaaaaataaaatttaaaaaaggtcctaccgagacttgaactcgggttactggattcagagtccaatgtcctgaccactagaccataggacccttacattagagaatattttcattttacatattccatagtaccaaagatggatataacactgtacggtgatatgtaggggtgggcatccgatccaattcaacctttttttt

SEQ ID NO: 396041 - DNA, 552 bp, Cannabis indica
agcgagtcgagttagtactaaacactaatagtaacgaaaatgaataaaatgttgtataaatttataccgtaaaagaaaaaagcaataaatataaaagtgtattaacttaaaaacattaagtatttatgcgataaatatatataatgcattaattttttttgaaaaataaatatatatttatataaatttgaaatttcaggaaggaagagtgaattatgttgtggaaactggaagattggatggaaaagaatctaagcttactaatgttaatcttccacctccaacaatttcagtggctaattccattagtgcatttcgccaaaaaggacttgacatcgccgacatggtttatcttctcggtaattatcaattagttttgagttagaattttatattaaattactttatataagtatatgcttcttaatatacataatacgcaattaatagatttttagctagaaattaggaaaaaaagagaaaattaggttcctaacatggtaacttgccacatcaccatccctaacaacagcattatagatatatatagat

SEQ ID NO: 396042 - DNA, 1110 bp, Cannabis indica
ctctctctctctctctctctctctctctctctctctctctctctctctctcttccattttttcttaaaaaatctctcattttattactccatctcgtattttttaatgaataatagcatgtaaaagactatatgagcatacaaaaccgaccatgagaatatatgatcctaaggcgaattagatttttggaccctcactttcaaaaatatatataaaaaatattgaaaatgagtgtcatgagattcgaacccataacattgtataatatcgtacacccaaccaactaaactatgaatatttatcgtttataatacatttaattttgggtaaataccatttggaccttatgatttacaaaagttataaattggaccttctgttttgttaaatgataaaatagaccctgcattttctaaaattgtacaaataggaccctaaactgattttttgtcaaaataaaacttaataataatcttatctagagatgttatgacaaaactaattatattttccatatctgttcgtgttagaaattgtcttaaagttggttatattgaaaaataaaattattgaaaattgagctcaaggtactattttttctattttagaaaatatagggtttattttgtcatttaacaaaacagagtgtctaatttgtaatttttgcaaaacacatggttcaaaatagattttaccctttaattttatttaaataaaagcttaatgaaattttttatttttattttgggcccttaaaaaagtgtgggccctaagtacgggcctagttcgtctatgcctagggctgaccctgcaagcatacatatgatattagtcttttttgtattattagaaaattatttgagcttacatttaggtagaacgactgataatcttaccttcaatcaacgaacttatactacactatgtccttatttaaacataattttcttaataattgtttaaatataattagttaaagtatgagatatgattataattatagggttcgtttggtacgtcgtattataccgtattgtattgtataatattatattaaattgtatttaatgtaatatttttatgtaaaactatatgtagtattaactttta

SEQ ID NO: 396043 - DNA, 1004 bp, Cannabis indica
atggtgatgaactgattagggtcaagaatatcgtgtcataagtgtgtgtgtgtattttctaggaaataagtgtaaaggtttgaacttagcaagggtgattcttaggaatttctatgttgattttgtctctgcccatctctttggagctgttagggctctaaatgggattgatgttagggtttagaactattcagtgagtttcctctagagttgttagggctttttatggtaaacggtaagtttgataaagaaatctttactcatatcggttcttgtcatatatgatctttattatatacaaaacattcatttagatgtcacgccagtaatctgaatcgagattacttgcaccaaataacaggcatccgtgaatcttcttagcaaccgttgattaaagatttctaaactttaacatgttgctaactatttaattcatgattaagtgatcttaattctttgtacaattacaagtcacgacctcatgtatgaatagttttttttttcaatatttatgtataaattattcaatatcaaatattaataatttaataaacatgtatatatgaaaatattcaacaaaatattttttttattatgtgaatcaactattaggctatgtttggcaagaaagaaggagagtaggataaataaggagtaagagcatctccaatggagagctacaaatatagtgtattgccatttttcagaatattttgcaaaaaattaaactccaatggtgatctaaaatgtgtgccaaattaagccaaagttaaaaattgtgccaaatttagcacaaaagatatcatataagggtatttataaaatagccgatccaatccaatccgcacaatccaatccaatccaatccacaaagagcggatatccgcacttgtgcggattgaatgttgattgacatgtaaaagtaaccgatccaatccaatccacatatatttataaaaaaaaattaaaaaattatatatacaaataacattttaatgtaaaga

SEQ ID NO: 396044 - DNA, 734 bp, Cannabis indica
tatatatataggaggaataatatagttgtgtattatggtaggttttgtcggctagctaatatgaaatggtgttgttgtttttataatgttattaaaagattgtaccaatattgtgggcaggtggaaaaagaagctggaatttttaaaacaattttgtttttctattattattatatattatatattatatgtcttcttttgagtgtgtgtgtgtgtgttttttggttgtatatcattagcattgcttaattgagattaaggtgtttggaaagttatggaggaattacatttgagtgtaatgtataatttgatatgtttatttcatgttacgttataatttgatatgttaagctaataaaagtagtagaattttatgggagtgtcgtgcacgataatgaatcttgatattcttcttaaagagtattggagatcaaaatagcccaatattgaaaattgctctaatctatattaattatattttgctctttctcctaatgatgaaaaagttcatcaattggttaactcttatgagaattgagtgtaattacacgatataattacttaaaactttccattttaagtgttaattactaaaaattatatttttctatgtaattactaatcacatttatgaattccaaaagacataaaatttatatataattattacgattcatactagatctgactaacagcccatcctacctcctctacgttcttgacagcccatcttt

SEQ ID NO: 396045 - DNA, 860 bp, Cannabis indica
ataagaggttaaaaaaaaaatttccatcgtcgttttatgtaggtggtgcgttgtttcttatccatatgcgagtcaagcaacattagactccggaccatctaaacattaaaaagtgtatttatcatttatcattaagtttattattttatttaaaagtaaatttagttaatatatatatataaaaaaagatatttttcaatttctcccaattttttaagagaaatttacatggtatattgacttttactatttttttataaaaatactgccaagcggtatttttattttttactgtgtttttctataagtttcatactgcagtatactgtgttaagttttactggtgttttttagttgttctactgttgttttgttttgagttattctgttttgtgttctactagtgttttataaaaatatagtatttttgaaaacttttctgtgtgacagtatatttagtatttttataaatttctcgttttttttttaatgaattaaagccagtgtctccaagtccaaaaggcccaacagaaggggcccaaaataacaaatcaagattggaaatctccatagaccatagtccatagtccatacccacaagaagagccaagccaacaattcacagcacaacgatatcttcttctttgatatttctcattcaactcggccttggcgctttcaacggcatagatattttcgcgggtcccacctcactacatgacaaggttaatattatacccacacagctcacacacaacacaccagtttcaattttctttcaagacttttatcaattcaacttttacatatatcaaattatactaggtgattgttacgtgccaagccacgtagtgttagtt

SEQ ID NO: 396046 - DNA, 890 bp, Cannabis indica
aaaataagagagatattttctctttaaaaatagtttccattgcttacgactgggaaccccaatcaagccataagtaccaactctagaatataatatagaaaatggggatagatccataatcaatacagcacataaaactcaattgctggggatacgcaactaaacccaactcggtttacccactctcgagcgtaaatccgagttgaaaaatacttttctactattctgagtcttcttcttctaatttcttcccctagtctctctatgagttctgagagagacttatattcctgtacataatgtatataaaaaaatatattttttaaatttaattgtgtactgttcgggtatcgggttaaaacccgactaaataaatgcattattttaaaacccgaacccgatacccgtgttgagtattttcgggttagacccgacccgaccacacgggtttttaatttttcggctttgttcggtagcgggtcggggcgggtggtcgggttttcggatatgcgagtctagatgttcagccctaatctctaccatcaacaatcatccttaattattaataatgaatgttattccaatttctcaattaagctattaatcccgaaaaaaatgctcaagcagtcaattttttcaatcttcctattacaattaatctaggtgaagcacttggtaattaaatcttttaactaagcaataaatttatgaaggatacaattatttaatttagataaaacattaaattctatggagataagttgatctaggtaaaaaattaatgaagcatataatcatttaacctaggttctattattcaacacattcaaaaatacttttgacaatattaaaaaattacaattcatcacaaatacttagaatcctagact

SEQ ID NO: 396047 - DNA, 638 bp, Cannabis indica
ttctaatatttttactaaaaaaattactttgaatactttattatattctctctattttttaattttttattactaaaaaatatatttatatacaaaattaaaaaaaaacacatataagtatctatttaaataaattgtacagtttaaattaatttatgaggtaatatctatttaaattaacccaaaagttaagtcactagaactagtttagtggtgaaggaaggatggaaaaaaaggagaaactttaagctattaagctatttttgagtatatcctctaattttttattcaactattttttaagatcttattatttttttttttatattttttgatgatttgaagttactatggcctttgaatattttcaatggagtcaaacacctttaatataagaatataagagtatgtatgtatattatatatgtttttcttttctttatattaatatactttcaaatcatttttctttccttttttgttttctaaacacattcaaattcccacgataactattataatttaataaatgggtttttttttttctttatgaaatataatgtaatgtcatatattattatattagttagtattctttgttgaaaaatatgaagatagatttttttttttttttacta

SEQ ID NO: 396048 - DNA, 1483 bp, Cannabis indica
ctttgcagttgttagttttcaacgtaatcagaaatttcaatataaaatcgttgctctgaattagtcttgtatgtttttactttaacagtttacttttcaatctaaaagtagttgtttgctattatatataaataaattgagaaagaagcaattaacaacaaagtggctgtagtttagtggtgagaattccacgttgtggccgtggagacctgggctcgaatcccagcagccacattattttgttttaattattttttcttgtaaagaaaccaattccagatcttttcataacatttctagtaattaattattttttttttaatttaattcagtaaatagcctattttggaatttcatttagctaatcatctttctcaaactttgccctcttagatcaatcggcaataaaccatgtattaacgacatcagctggtcagaaataataaatattgaggtttgaactgcacaagtaacaattaatcaactatattgttaaatttaaactaaatttgataaatttgataattataattaagaactacttgaactacatgattttccaaacaataattatagactaagggcaaaggactagtttttaaattagcttaatattttgaaggtaacaatgctaatatcacttaaagaaataacttctagtctttggcatcaaagataaaactaaatcagtgacatcaccctcctattttggaccccaagagttgaaaaaatcctactaagagcatcttcaatctacacattaaatttggtgttatactatcaccaaatttagtgttaaaaattatttccactctgttaagcaaaaatttcacatttagaatattaaaaataaatgcaaaacacaatttcacctatgccaaaattatagcataagagtttattaatttaagttcgacccatccaagattataagaataacctcttaattacaatccttttaaataaaggaaataccctttgattccaattacgatgatattaaataattaaaataaatttgggaaatttggggtaaatttggaattgcagctgaactcagtccatttaattaaccgagctgcctacataccttctttgtgaaggatcaagccacttgtagttcagaatgcggtattttagaatttggatataaggattccggtagatgaccactttcaggaatcatttgctattttgaaaatttggaaaaattcctaggtgtatgaccttttatggaattttgagagttatgttttataccattttgcggtatcggggactgcacttagtcttagcaactaagttgcctacgtatccttttataggaatcaagtcaaacgtagttccgacaatctttgtgaaagttaattcactttgccattttgaggtgaatgacctcatttagcattttgagataagagaacctcacttgagatttttttaggtaaaagacctcatttgagaattttgaggtgaatgacct

SEQ ID NO: 396049 - DNA, 526 bp, Cannabis indica
attatcgaccaacaaatgatcgtttgaacaccttcttatcaattctcaaagaaattagaatttagtatgagttgtttaaggacaagtaatggtcatgttacataatacgcaaaggggattggaacaacaagcattgcaagatggagcttggtgaaaaacattatcttttgatgatttggttgtttagtttgatttgatattacttaattttcggattgaattttaagagatcattaaagggtcaaattgatgagtggaccattttaattgggttttgagtttgtttgccttgtttttatgtgacttaattttgagaagaaggttatagaatacatttaataaataaaattactaacaacgttgtctaatattttattttagattaatgatgagttgcaactaaaaggatattagtgacaataaataattgtggattaacaaatattagtgataaatttttattgtgattaaagaaatatttgtcacaataaaaaatatcagccacaattttttgttgtgactaaag

SEQ ID NO: 396050 - DNA, 1038 bp, Cannabis indica
ttttttttttttaaaaataaattctttcatttttcatacccaaaagcatatcctcagtgtaagatcgtatttttcttcgtttgtaatgtaaaccaagagaaaagttagtggttgtaactccgattgtcgtttttggtgttgaaaacgttgaatctcaaaggatattaaggtataaatctaatctctaataattaattttatttatatacattgttttattttgtaaatattttgaggatttttctatattattaagattttgttcatatgattgtgcatggtggttggattttggtcggcattggtggcggaatgcggtaataaggtaaaaaatataaactttaataatatatatgtatgtattttgtgttgtattgaatatgtattgcgtgtatatgtattgtgaatgagaataagatataggagattaatttatgtattgtatatgtatatattgaatattttaaagtaatagttttgtaaatactatgaatgagaatgagatagagagtatggaaataaaagtttagaaattaatttcgaaaaaattagtttagaaattaattctattttttatcatttttttctattttcaattttatttatgtgtttttattttttttttagctaataaatagttagtaactagttactcattaattatatgacaagtaagtagttaaataaagaaatttttaattttgtattatttttttatattgtaagttgtgaggtcaatttgcaagtatcagacttatttggtggtacgtaatcggtttctagcttgctcgaggtatacatatataacttttaatattagttaattattaatgcttagtagagtttgaatatcttaaatattcatccttagagaagtaagttctgtgatatattgtactacgctcagatgggtagaataatatacatgttagatgagtttgaatatcttaaatattcatacatagtgaaataagttatgcgaatacatgtattgaagtcggatgggtggtaaatttttatattgttaaatgttgttgt

SEQ ID NO: 396051 - DNA, 566 bp, Cannabis indica
agagagctggttccggaaaggcatagggaaaaaacatcaagaaatcggatacggcgagtgatgagatgggtatactgggaaccgtagtcgaggatcaaaaccctgtctgattccacacttttggggtcgatggccatggcaggaggctagggttttaggggtgaggtttctttggaagtggctagggtttaagaggtgcaactgcaattgggtttggagcgtttctgtttaaataattatataccttacaaaaataataatattattaataagacaaaatcacatatattaaaatagattaaataataattggcgggaaatggctacatagagttaatgattggtttagtgattgtaaatagggttgtattgaaattttcgaaacagcccaatccaaataatccgtccaaactaaatcgaaaaagctgataaaaaatacaaaccgacataactcgataaaattctaaactgcccaatcagttaattgggcgtgttgaaaatagacctaaactgcccaaatcgatttaacccgatttttactttttttattttatatatataatata

SEQ ID NO: 396052 - DNA, 604 bp, Cannabis indica
atgtttagatctctatttgtatatttgatctaatttgtgtatatttttttagtttggccaaagagtgataattcgaagatctatttttacatgtatatatatatatatatatttagtgtgttttgtacttctgtacaaaattgaccctaatggtataaaagttagattgtatatactatttgcatcagttctagttcgacagtaacatttaatagtgtcggtttataactgacgcgattgagtattaaggagacagaagctgatgtgtcaagttagttaggatagttgttatcttaattacggttatttgttgtaactaatttagtgattctcattctcttgcttgtgtatatataaggattgtaatactctattttctaatcaataaaaatagtagattatttcttcatcttcttcctcctctctcctctttctcttctctttcaatatcttctacactgagtcccgactttgcgttggtggcatatatgctgatcttagcaattgaaaatgaaagtataaatgtcagttaataaattgacacatatacccaaagcgcaagtgtaaagcccgcttagttaatttggaaattagcagttgttta

SEQ ID NO: 396053 - DNA, 681 bp, Cannabis indica
atatttttaaatttttcagagaacgtttcaaacacgtcaagttcatattaagtagatttgtgtttgtattttgactttgtttttttttttattttcacgctagatgtgttggcctactttcgacttgtacctaattttttcgacttctaccaataaaatttgtgttgtgttcatgttgtgcgatcatgtcgaaattcatattgccactcttagtttctagaagaatattgcacatcaatcattatgtagagaagagttatctggtgatatcaccttagtcgtccatgtataagcactagatcacttcaaatgaagtactaggcactactagtaccaaaaattgccaataactaacaataccaattaccaagtacatcaaaagatgtttatatggtattgcgcaagtatacgtaaacattaccaagtagtaatgatgacaaatacaagcatcgttctctctgaggattgttagtaaataccaaaataaattttttatttttatttggctaataaaaattggatttcaaaattaataaaaacaagaaaaacaaaattaattgaaactaacaaacttaagaaataaataataaaaattaattcaataaatgttaaacaatggcttttttgtttatttttttttaaagtaagattcattatggttacatgatcaggtagaaaaaa

SEQ ID NO: 396054 - DNA, 1169 bp, Cannabis indica
gacgatttagtttgttgagaaaaaaatgatacatattgggaagaaatttgtggaacttatttttgtttttgggcccagttcttaattaatttcaattgatgtgtcaatttccaacgtgatcaaattaaagactaaagaattaactgtttcaatacataaatgggatcaatcaaatgaaataaaatcgtcaaagcctgtctcctaggaatactagcacatgaattacttcaatttgacccttcaaaagaagaaacacaaatcccaaaaggtttctcgtaaatatgtttttctttcaacataccatgattaattttgtttatatttctagtgttgatttattaattagcctaattattatttaaaaaaatttgaaaatttttattaattggtaaaatagataaaatatagagaaatgttaaaagacactagtggtgcttagcaccttcctatatgttattatcgttattagtccaattaagtatgagatgtttaatataataacttttaaggagtatcgctagccaatcacaaggcgacatgtctaaaagtgttaggcactactagtgcccaataacaatactccaaaatatatgataaaatcactctaaaaaaaacagaattaataaaattagacaaacaatatcgtttacaatattaggaaaaaaaactctaatagcacataaactaagagactaacaagcccccggcattagagcatcaaagaagtacgaagaattctaaatttctcatccaaataagtatgttacaaatcacactgaccaataataatgaatcactgatcttctaataaagaatagaaaaaaatgaacccactatgtaaaatcgaagtaagaggcaatgacaaactaacaattatggagagggaaacaaacacaagaaatttgaaatctgtatcgcatagtgaaaaactatgtatttcaatatgcaataacagattaaaaatctgtcacagcaaaacatcaatttgtagaatcaaattaaaaacaactgtgcaaaatgtaaatattggcacaagagaattgtatgtggtattagtattttttcgaacattttagttcacggggccatgcttagaaaatgaaatcaattagtaaagtatcaaaaattacaaaagcaattgagtacttaaacaaatttagaatccctct

SEQ ID NO: 396055 - DNA, 707 bp, Cannabis indica
aaataatttgacgaaaatttaaaattttactattttataatacgtaacaaattacataatatagcatatatagggacggatgtagtgtcgcttcaatatcagtgttgttctacactataataatatataacattatcaatataattttatttttaaaattatttcatttatacaagaacaaatactttaattttctttaaaaaaaaaaattagaatggtattagcatcagagtccaaaattaataaattaatttcaaatattgattttaaaattaaaataaaaaatttgagggaaagaattttattgaaataagtgcaaaatcttgtatttatactaagagataatttgtgctaggctataacaaattatccataaaagaagttgaaaaaatatgtggtgagtattaatatatttttcatatttgtccaaattttataactttttcacatatttttttaaattattttggatgtatatttactatttagtcgctaaggccaattttgagtttattattaccatgttttaatgaatagttggttaaaatctagattttttttttaggaaaagtaatgtatttttataattaaaaactattgaaactttttttttctctcagaaaaatatatttatgaagaaaaaatttagtacgtataatttatttttaggaaaattatttcatttattatttttttaatcatttttt

SEQ ID NO: 396056 - DNA, 574 bp, Cannabis indica
cacactatatatcatgcatagatataatgtgactatatataaagtcattatccattctatagtactatgaattattcttttttaggtgttaagattttgagttttgagttaatggttaggattaatgtccttaattttgggtacaaattaagataagtttcatataagggaatttatataaaatattattttagtgaaaaatttatacatttacgtttaaatattatattttatattttttacagtgttttaataaaaataatacaaaaactacttgaaagtaataggaaaataatattcaaataatattaaaataatataaaaataataagaaataatatgaaagttactagataacaacataaaaataattttaaaaacggcaaaaaaaaatcgatccatccttattttcataattttttttttttgttgtttttataaatttaggaaataatcgttaatctttttagttctaagctttcgagttttaagttgggaaatttacatagtatactaacttttgtcatttttttacaaaaatactgccaggcggtattttttgcttttttactgt

SEQ ID NO: 396057 - DNA, 926 bp, Cannabis indica
tttcttttttcttaagtggtttggtgactgtctcttcattaccatacagaattttggggacaattccattagggaaattgtgagattttcctttctttttgggtatgttatcttagtactaatcacgagggaggaaaacaactttggtatgttgtaaagtttcattccaactccagtcatttcttttctttgttttaattgtgacaatattatatatttgcttgtgggttttgtttagctatttggtttttgatatatttcaaactagttggaaagtttaattacgtatactttgtttccagagaaaatttgttctagtttttcattaattaatatgtatttatattagctagagagaaatttggaatatatatagtgtctcgaacagaatatactacttaaggttcaatttaatttgaatgggtcttcattatatgttgatacattaattaagctcatgaatatttcactttatataattatgcaggttgaaggtgcatatcaaatcaactatatatactgatgaaatggaacgtagttcaggtgttcaagattttccatattatttccaagttaaggtaataaacacataattgtaattagtgtgtttttcaccattaattatatacttagtgttcgttatagtcaccttttcagtgtattaatttctagacagaattcgagtttcagaaaagaaaagtatataaacctcagtggtttttggggtgaaattcctcttgtattatgataagagtcaactagaccagaggagaagtaataatattgctacacaaattggttaggtgtgcaaaatgagtgaatcagtatggaaaaatggtttcttccattattcctagatcaatgatggagagtatacatacatagtaacagaatcttagataatcttataatattattatatatat

SEQ ID NO: 396058 - DNA, 942 bp, Cannabis indica
gattctttggttgttgttcaagccattcgaggttcggttagcattccatctccatttggtcaacatgtgtatgcttgtcgtacattgttggcttctttacctttagtcacgattaattttgttaaacgttctgtaaacaaagctgcacactgtcttgctcgtagctcttgtttgtattcagatcgtattttcagtgagagtaatgctcctgctgatcttttatctattgtaatggttgaaagttcattctaataaagtttaccattttccttcaaaaaaaaaaaaaaatatataatttagttcttatttctcaactacttgttagtttttcttaagataaagtcttattgttgtggtttcaactttttgtttcttttcttatttcctatttacacatgttaatttgataccttatcatgatgagtgggagatgataaaaggaacaccatcaccacaaaaatagcatcaccactattatccattagattaataagacaaacatgctaaaattgtgtcctcatcatatcatatgaaacatgttaaaattgtgttaatgaagatttgtatgtacatgtgtggtgcataataaaggattatttcattaaaccacaaaatcaattagttgtggtgtttaatttttctacacatgtaaacgtggagtgattattaacgtaccattataaaaatttataaaattgtgactaattataaattattatttttatactgtgattaaaaaattactgactaaatatattagtcgcaaaaatcacaatttattgtaactaaatgtatttttagtcataatatttactgtggctaaaactaatagtgataacttgtatttgaatattattttcagtcacaagtgactttattttgcgactaaaaatcatatttagtcacaaaaatttatattataactaaaaaattgtcacaaaa

SEQ ID NO: 396059 - DNA, 625 bp, Cannabis indica
ttatttatttattttcattcatatcatatatgtattgttgagatcattaaaagtgatttaataattataaatagaagagtttaattaagttagatgactacttgcttgcatttaaagggaaattttaaaggacttccactatcctacaaataaattgattttaataaaaaatgattaatgaaaaaaatgtagttaatagaataaaaccattatgtgtgcattaggaaaattagaaattaattgcctcaattttttattttaatatatatatatatatatatatatatatttgaaagaaaaaatgggattttagttttattaagtttggtgggaagtacctttcaacaatatatttaatatttatgttacaataacacttaagaacaaaacaaacgtactgaagtgggaattgggacttggaccattcccatttttgcatgtcaaggacattcatgcatgtgttattttatttcttatcgttatttatttatttaattaattaatttgaatttttgcatggcaaacaaaagactactcttttttttaaaaaaaaaataaaaaattagcgtcgaattgagttatatttttagaacttctataagtacttgtcatttaagtgtcaagt

SEQ ID NO: 396060 - DNA, 1986 bp, Cannabis indica
acgcaaccaccaactgtgggtcaaggtatgacatctcctctggctgggatcacacccagtgtgcaagagattggaaacactagttcgacagccgatctgggtactcccaacactggaatccctttcgcaatcaatgttcagacgactataggagatgatactgagatccagaacctctacaatgctgttggacttatgcaagatcatactgataccttgcatcacgatcaggaagagctccgtgctgtagtgaacctggcgtttgaagagcagaggcgtcagttcgttgagaggagggatatggagatggaaacgttaaaggctcaataggcagccatcgacgaccgaagatgacaagctaccgtactgatacagaaagcctaccaagttgctaactaacaaccagccgtaatgtccagcatcccactgggcatactgcccaaactcttaacggttagccgtccaatctccggtcacaggttccacctgtgggccaagtggtaggcggccacaccttatctggcaattaatcaagtggagttatacccaataactccgtccaaactagcgattttgactaggtgactggccaaaccaaccaatcactgagacagcttggtgtctcagtatttaacagatgtggaacagctcatgatctcagcaatgatttgaataggaggggtttggatgaacaatatgttcaaccggccactcagcccggtatccgcatccaggatccaattctaagagatcctgacgtgacacagatggaccaagaggctgaactagttcacccatctgtgtaagcacagttggatgaattgaaaaatatgttccaaggcctagccggtcaaaaactcactgatctcgagttggaccaagcacacagatcacccttcactcctaagatcaatgatttagagctatccctcaagttcaaaatgccgacctggaaaatgtacacaggaaaataagatcccttgtcacaccttaagtattttgaagtgcaaatagatttgcaaggggtacaaggagatgtgcggtgcagagtatttcctgccacactttcaaaagccgcactgtagtggtacttcaagttaccaccaggaaggttcaactcctggaaagccttcttctcggagtttcatgcacagttctcttcttctcgccaactcccattgcatttaaaagatctggtcgaagtgaagcaaagaccaggagagcctttccgagcctacataagcagattcatgacaaagactacgaaagtagcacgattaactgaagaggggaggctggccgcaatactggggggcatcgaagtgctaggagaactatggaaatatatcaagaaaagtggccctagactctatggcggattttcttgaccgagcagacggtttcatcaaacttgcagaggccattcaacgggcggatgtcgagcctagatcgggccaaccagaggctcactcggcaggagtgtcagctcaaaacccccaataccctagtagtttaaattgggcggcaaaagatctaacaacaacgacagacaaggcaatgggaaaaagggaaagttcgcaggcaaaaccgaacagacccttagagaaaatccttccaagatcactgctttctctatcttgactgacgacttggagacaatctacatggcaactcagtctgtagtcccgtacaaaaaacctgctcccatgaaaaaggacataagtaagcaggacatgtccaaattttgtcgttttcatggagactatggccatgacactaatgagtgcaacaacctgaagtgggaaattgaattcctgagaaggaaaaataacccgcatgtgcaaaagtatgtcacggccgaccagaatcaacgggccgcccaagcagataacgaccaagacctgctactgcctctaccagtggacggacatttacaagttatcatcggaggcccacatattgttggagattcgggcaaagctcagg

SEQ ID NO: 396061 - DNA, 1163 bp, Cannabis indica
ggtaagagtaaccctggtgtccatctctgccttggttcccacaaaattgctaactctagcccgagccaccagatgtcagggtaacttttctcttctaatcagtggtggaacaaccactgtccctaccataagaagtattaggaagagtgggggtcctaccaacacttagagtcacacagggctcctggaaaaactttaccgcatcctcggctcgtaaagctttctcaaccatacccgcatacgatgttgcctcattagtagtgatcattaaatcatgtctaattttcatattcaaaccggcgaatatttttccttcttactgaagtttgttggcatgatacacgaggcgagcttggccaaacagtcaaactttgttgtatactcaataactgacataccctctgtctgcactaacgcagtgaattcttttcgcttagcactgcggacagcttcattataatacttggcgttgaataactttgagaactcctcccaagtcattacagtgacgtcccgggtgagggacatcgattcccaccacactagagcgtcttcatggaaatgaaatgtggcgcaggtcacccgatcatttcaaccacccccatgaaattcaaaattttctctatcactgtgagccattgctaaccttcatgacatcaggacctcccaagaacactagaggtgcttgcttacgaaacctttcgtataatggctccatactattgccggcaacaggttgttctgctggcacagctcgagctataacggcctgagcttgttgtggaggcactgtaggaggaccctgctaccttaatctcagaatttcttcttcttgttggcggatttgatcttgcatctccgcaaacctctgctcctaatttgtaggagcttgtggtggatttacaggatgaccaccttgaattctgccacagcctcagccgcgaccacagggattcgaggtaatttgatttccctgaccgcctacgttctcaaccatattaccttggcttcttatattttgttgggcgtccatttaataggacttagcctgtgaatccataagtcaggcaggttagaaagtgatcataatacttaatattactcttatggattttaacgcaacgcatttaaaataaataaccataatctaatatgcttcctaa

SEQ ID NO: 396062 - DNA, 1413 bp, Cannabis indica
ttaatgaattataattcataagtcattgtaagaggctaaatagccttgaaatgttatacaaatgttcttgacaagctcaagatcccaacgtcttgctatggagtttgtaatgaatttctctccttttgcatgagggtatcatgtagtatttataggctaaggtcggactatggatatactcgggacccgctagaatttacgtgtaacattgccaactaatggggaaaatacatataatatatgttgacttaggacccacggattgagacccagcctgtggggttatgatcttctgtacggtagggaccacttgatggcgacagatggcatgtgtgtgttgcctttgcgtactgcgttgtcagagtacgtggtcatcggacaaaaagtatgctcccattggtggttatggtctgatgcaggggacaatgccccgacattgcgagatttggtgtcaaaaaattgtcacttataatcttctgaggcgtctcttgggaagccctttcggatgcatcccagtgtaacaccctaactcctaaggatgccacatgtgtgttttagaacatagtttagtaataatagattacctatttagtcaaattcgtgataatattaaaaaaattcactaaaaaagccatagcagtgaataggataacactgctaaaaatttgtttcgaagatcttttgttacaaaagtttgacaaaaagaactatatataaaagtaaatcaaaatacatgatgtacaatctaaagattcctcagtcgtaactcaaagatattttattttaaaaatagtatatataatactcacatgttccaataaaatctccgtaatttataataattacgatcacttaattattttctcaaaatctactaattatctcataattggctttagtaagattatcatcttactctaatattcacataactacatatttaataaaactagtatattgttacgtgcgatgcacgtatgctatgttttatattaagtattaaattatgagttttgaaggaaataaatgaatcaaaaataaataatatttaatttagagagatttgaattataaatttaaattaaacttttatgtctagtataatggagtttaaattaaactacaaatgttagtaaaaacatattggaaacaataataataaggttataatatatgttgcatttgttccagttcaaatattacaaaattaagaataactaacacttgagggaacattctcactaccaaggagaaatcttagatatggagtcaaaaatagagcaaaatcaaaattaatgtgtacaagtattcctaagaagctaccactatcagcctaccagaaatcatgaattttaacaatgctaactgaaatctcatctgctcattataaagccaccgtcactcaaaatagca

SEQ ID NO: 396063 - DNA, 702 bp, Cannabis indica
agagagagagagagtaatctttgtatcttcttctaattttaataaaatgaaaattaaaaataagttttatgtattaattaagggataatattaagggttaaatgaccatttatccctccactaaccaaaaagtcacaaaaccaccaagaggtaatttggtcaactctaaaatctcgactaatctcgatattcccaatgtctaactatgtggccccgctatactaaaaatactaaaatgtgattctaattgccaaacgtcgcgttccaatgttgtcggacacaaaacatgcaaaaatattaaatttcatatgaattctgaattcaaataaatctccgtaaaataataattcataactaatatacaagtttcataattaaaccctattcatctgtttatttccaaattaaagttaagtggtcttaacattattgttaaacatcgatggagtatagactggcctttagacgactttgtttgcgtcccccctaaggaaggtatttatctatactgttgcttaaggtttatctcttgactataataagaggaagtgatgtattttagtgtgacatcgacccttaaggcgacacactaagttaagtcatgaaatctaaaataaagggatacactcacaaagcacaactaagcttcatagtggttagttgttaacttggtcaaaaagttgtactttatatatttttttt

SEQ ID NO: 396064 - DNA, 672 bp, Cannabis indica
atcttaacaaataaccactagttttttaagatagagatgaatctaattttttaaagataaatttgttattatttgatatttttattttgataatagttcaaatttttggatttcaaaaaataaaaaaacaacaacaaaaacaaaaatttgaatttgtaattttctaaccgttaccttctttataagttcaatgttttataattatttaataaaaactaaagaatcaaaacatattataaaaataaaaccttgcattatgcatgtagtcatacttatttaaataaattctacttccaccttttaaattaaagttaattaagtaaacactcaaaataatatatgtaatacttagccacataaataaattgttttaaaaagtcattaaaagttaaaatacatacatgtgacatttaggattttgtaaaagttactaattagactctctatattgtaaaataataataaaaaaatcttgtattttctaaaactgtaaaaataagaccccaagctcaatttttaacaattttttaatataatcaattccttatacgaacaaatacagaaaatgtaaccagttttgtcataacacctgtagatcatattattattaaattttattttgacaaaaaataaagttcatggttctatttgtactattttagaaaatacagg

SEQ ID NO: 396065 - DNA, 758 bp, Cannabis indica
ttacacttttgtttaagggagttgaagaaactagatatataatacatactaagtgaatacttgttccaataaattgtgagtaatagctcaaaattgatgacttttggttaaaataaacaaatattattcttttttctcttctctcttgctgatcaaaaccagctaaaacaaaaattattcttgatggcatgacaaaagcacacttaacagaaaaaatatgttatgtttgttcagcttcaactgtttcttttttcttttcttttctttccttttttttctttttcttctttctacttctcttatctaatcctaaaagaatattaataatacaaacgaaaaagttcatgattagagttttaagggttgtaaagaatttttgtcaaccaagtcagcatcactaacatatctagatacaattacaaaagatatcagcaaaatgggacaccaattagtggagcatctaagataagaacaccatcatttttcatcatattacatttacatttatagcttgatgaaaaactcgtttagaaaaatttagctaaaacatttcaattgtatattaatcacataaatatgccacaaatagaaaataccatagaaaaagagaaaacataccatttagtaggttcaataagacccttatactttttgtagcggcgtttcgatacaatgtgatctctacctcgagagtagaatccaatgacctctaataacaacctgaacctgttgggttttgtgtcctaaataaaacccat

SEQ ID NO: 396066 - DNA, 601 bp, Cannabis indica
ttaaaagcaagttatgttttcaacaccatattatttaaaagagttgcgataattacaatttctatttcaatctattagttaatcttttggcccaaaattacatggtagtatatatatatatgtattttttttttatttttttacattcagtagtattttttttttaatctacagacttgatattgtaactataataaatgtcgcaatgaaaaaaaaattggtatatactttcaaatgcagagattgaaataagagattaacgataacacttttgtatttcgaattacttaattccttgtattataatatctctcatctcttttgtgtgaaataataattattgtatttctcaaaatgatttgttgtcattatgtcaggttttgaaggatgctctttcatctacaaataaaggcagaaaatagctaaataactgttttaatagttaaagaaaaaaaactttaataatcaaatatagtgttttacattgcaacttaaaagtatgtgtctccatgtattcttttttatatttttaacatttaaagagttataatttatttattttctcatataatattgtattttatagtcaatacattctaaa

SEQ ID NO: 396067 - DNA, 2063 bp, Cannabis indica
ttgtttttatgtttgatactattatataatgttgttagtttaaataaattatctttactattttaatattaactaaaaaaaaagtatattttctaagtaaatatgaatatataaattgttactcaaattttgataagagagacgtggtgagtatgatgacatgtgtacacgaaagtattcaagattaaattaatgaaaaatatgtaaagtcactagacacaaagattctagagaaaaaaaaggatgaaatattggtttgaactatgtaagggggaagtaaagctaatacactccttaaggtgggtaaagtgactaccccgaggggtataataagtgactaccccctaggggtgggttgagtgaccaccactcgaaggtatgttgagtgactatccccctaggcgtatgttgagggactatccccttggggttatgttgagtgactaccccatgggtattttaagtgactacccccaggtgggttaagtgactaccccccaggggtgggttgagtgactatcccttgggtatgttgagtgactaccctcaggggtaggttaagtgactaacccctaggtggcttagtcaaggtgactaaattttcaccccctacactcttatggtcatcgtgtcacaccctacctacatatgaagatggattgtgtaaatacttgctctaagtatcaagactttatactaccctgatgatacgaccctagaggaagtgctacccaccataggatcggtcagccagattgtacctgagggggtatccacacatagccttacacatccaacactctcccagcaccctccaattctgcatgaagctcgaaggtggttacgaaccaacaaaaaatagcaggatatcactgctagaattagacattaaccactcataaaaatcaagggaatagttgagattccaatggatttggacccaaccgatccaatccaattttatattgaatattgaattttgtcattcgatccaattagattggttcggttccaaccattgaatgcattgattggtttttttatttggattagattggatctatccaatctattttagctaccatttaagttaatttcattaaaaagaaatatatatacataaaaaacataatttaaaactttataatccaacatacataataaatattagtttaatccaacctaattatcatgatctcataataaaatcgctaaaaaataaaatctaattcaatacgcattgacaatttattagcgtttagaaagataaaaattaatattttagatttaagattttttttctttaatctcatgtgttaaatgtatattaaatcaattaatatatattttaaataaaatatagtaaatatataaaattataaatagtatttaaaaataatataaatataattggatgaccattggatgataattggatcagtttggtcggttatttatttggatcggatgtcccatccaatcactacaagaaaatacgttttcagcgactagattttttgtgaccaaatcaacttagtcagtaatagttagattttgtgactaatttttagtcgcaaataattttagtcacgagacaatgtttatttagaaccaaaaaaatcaatgaccaattttttagtcattgtttgttatatttagtgactaaaatagtatttagtcactaaaactgttgcgccaaattataatagtggcgagactaataattttttgtgactaaaattatttagtcatttaaaatttgaaatttgtgacgaaatagttagtcagtaaaagttaatgatcttttacaactaaaatattagtcttaaaatattttatcatggtttattgtgatgcatccagacaaggtctgaggtgtatgttgatgcaggttgatcgggttattgcctatgcttcttgtcagttgaaagattatgagcaccggtacccgactcatgacctggaacttgccgcagtagtgtttgctttgaaaatttggcagcattatctctatggagaaagatgtgaaatttataccgaccataaaagtctcaaatatttct

SEQ ID NO: 396068 - DNA, 833 bp, Cannabis indica
catataagatagatacaattaaagttaataatctagctatgagtattgctccggaaggaagtttctatttgggactgccgagttcaatgggtcgtaataagaatgcggctttgggatatctgaaggagaaggttcaaaaacgtcttcaagggtggggaacaaagtttatctctcgtgctggaaaggaagtgttaataaaagttgttgctcagtcactcccaagctacgctatgaatgttttcctaatccctcttgaaactactaaggacatggaaagtttgatagaaaaatattggtggcaagcctcatctacaaccaactcgggtattcattggaattcatggaaaaggctttgtcaacacaaatcaaaaggcggaatgaactttcaaaatttaagagactttaatttggcgcttttgggtaagcaaggttggtgtctctaaatcaattatgaatccttagtttcgcgtgtgttcaaagccagatgttatcccaatggcacattcacttcggcctctttaggtcccaacccgagctatgtgtggcggagtatccttgaagctcaaaacttagtggctaatggggttcgttggaatgttggcaatggtagctcgtgattctcaaggaatgctagttgaaggctacacaaaattgttccatggtcaagttcctcctgctacagccgaagtcattggaatccgagaggcattgagctggatcaagataagataacgaacacatgtggttcttgaaacggattgccttccggtggttcaagccttacgaagcacaattgatatgagatccatgtttggtcaagtggtgaatgtttg

SEQ ID NO: 396069 - DNA, 856 bp, Cannabis indica
attatactgtaaacaattaaatgttgttgtgtatatgtattaaacgtgattggtttggctaccttacttttttcactgaaatatatctgaaatattaactctcgttttcattaatcatacacaaaaaagatattgtctttcataaaagaaaagctaaattctttgcaagtgtttttcattttgattttgagtggtctcttgtctaggataaggcttaacctatttggatgagtcaaaaatcaacctgatcaacttaagaaatttcattgtgtggtagatatcaatactcaaatatggatccatcaatgactgacacatttagtcatatactgtcaccctcttcaatagttgatttagtcatcatgctctgcagcctttccttcaccataactcaagttacctaacccaacccaacccaacccaacccgacccaacccaactagccctcttgtttaaaatccacggccaatgattggaatatgagagaaggaaattgatatgactacccctttataataatagttagtacaatactaagaatcaggaatatgtaaatttaataataatcaaaatcaaattaattaagagttctgaaaattcggaggagagaggaacaagtccacaaattattgtgaaaaacaaaatccatgcagcacaaccacaactccttctataatgtatagagacactttttattttattacaaacaaaaataataataacaataattaaagaagaaaaaaaatatagtgcaatgcaaaaatactcattattcgtggacccaccttatatatatcttgaatgactcgtctattgctctaacacacagagcaaagcaagagagagaaagagagag

SEQ ID NO: 396070 - DNA, 1186 bp, Cannabis indica
gaaattgaaacagaagctagaaagaataatggaaaaaagaaaatcaaagttatttagagaggaactcattaactaatgatgagagacatagacatcaaatggaataagatatggaatatccattaaaataaggaaagtcttaaacaaggtatgaggttctgcaaatccattgaattgatataggtccttgaaagcataatttcatcagcttagctacaaaactccaagtaggagaccaaatgcagcagagaaaaatctggcaattggcacccaatttcttttttacttcctatagctacagcaaaaaaaaaaaagaaaaaactagcttggtaatttctataagacataataaagtttaaatttcagtactcaatgtacaaagatatgcttttatgcatcccaaatggcaacttcaatctccaatccttctgtttacgacttaaaggtcgacctttgctaagagggtctctattttccttgacatcagccaacttccatatgcaagtctccatgtcaagggcctccagcaaaaatgtaccatttttttctgagcaattagactcttcaccccctacgtagcagactcgcatcggcatatccttgaaccgatcaagatcatccggcacctttaataatctctctgcaccaggagatgataccttcaaaagataacttgtcctataatttgtgattcaatatatttttaaccagtaatactaaaagaaactaccacgccacacaacactatgaaaaagctatttgtcatttaattacctctaaagctaagtcattaggtatttgtccactttctccaacttcgtctagtctcttcttatattcctgactgtagccttcaagctcctccatgctgggacatccatatcttatgaagcacaaaataatatattaccacacatgaacccaagtcaataatatacgtaatttaaaagtttgtatccttttccatggttttaaaattggtcaaagcgtgccaagacagttcaaaacaaaatctgaggctacacctctgctgttacaattaaggcatacgcctcacgttgatgtggtgcccttgaggcgcttacctctgaggtgcaagcctcagcttaactgtgttaggactgttctattgtgggttcatttaggcttttaatgacttaaatgggcttatgataagcctaagggg

SEQ ID NO: 396071 - DNA, 635 bp, Cannabis indica
gggggggggaatcttttaacgttacttttacatgaactaaacgttacctttaaaatatgacgtttgaataaacaaattatttattatgtaaaataattattacttccacatgaaacttttaacgttacttctacatgaacaaattacttctacaagtttagtatgtaaaataaaacaaaattatttatttatcttctaaagaaacttctaatgttacttctacatgaacaaatcgtcaccttatgacgtttgtcaccttatgacgtttgaatgaacaaatttagtatttttctcttcaaaaataaaataagacaaaaaagcgacgtaataggcctttcacgtctcttacttactatgtcataatagtgtatagacatcgtttttgtaagtatggaatcagaaattctattgaaaggagacattatattgtagcctttcttatgtttgggtatttacattatatggaatttagagataatgacgtacattattttattttcttaatctctgtttaggtatcctaatgtagtaatatatccaatataaaaatgggatatcggcatcaacttattattagcaaagtagagagagagagagagagagagagagagagagagagagaagaaagaaaagaa

SEQ ID NO: 396072 - DNA, 763 bp, Cannabis indica
gttgagattggattatgaagctgtcagtactgcttgggctactcaaggcgggtctccatggactactggggaccgacccgatctcgacccggattcctgcttacccgattgcatggttagtctttaatcaattaatatattttagttatatagttttttacatgatattttagttatattttttatatgatatttttagttattagtttttttttagggatatgattatttttagttatattacatggaaaaatctatagtatcacttattgatttcagtatttttttttaatgaaactgttttttataatagtgtaaggtgtagttattcaagataatcagtaaaattttaaaaaatttaaatagttgtggtattgaaaataaaatttaaatgttttgttccataagtgacttttattttatacaagtatcaaataactatttaaattttattttcaacattataaaatatttagaatattttaataatttataattaattttaaacaattataatttacaccatttaaagaaataaattctaaatgtgaaagcatagtactataaacttgctgaatagacatgagtacttatttagcatactaagatagaaatagaaatagaaattgattattattattattattattattattattattattattattattagtgaatggagataattatcacttcatcattaaataacgaaggattttttttattatttttacattttaaaatatattttttattttta

SEQ ID NO: 396073 - DNA, 678 bp, Cannabis indica
aaaaatgttaagattataactatttgaaaatagaaataaagtacacaagggaaattggcgtgattgtctatgaaacagtttgctaatgttttcaaagaagaagctaagctatcggtgtctttgttggatcgtgatcaagtggcaacggtaaggaggacagctggagtggtggttgtcgatgcttttttttaggcattcaaactgagagttgtttggcctcttctacattggaagctgagattagagcaagtattagtgttatgagacaagaagttctgtaatcttgtgttcctttcacattgcgtcgaaatctggggtgtggacattgatcctctttgatcttttggattctgtaggtggtgttttccgatggatccctcggtttgagaatggggctacagatgctttggcaagttttccttctataactctaaactcgttgttgctaataggggtgttcgcggtgcgggtggtgcggtttttaaccattttttcaaactaatccgcacatgcggtttttctaattttccaaaccgcacccgcaccgcgatactaaaaaaccgcaaaaaccgcaccgcaaaaaatgatgcggtgcggtgcggtttctgcggtttatgcggtttgaactatcacaattttttttttgaagtcatcacaaaataattaaactatcattaa

SEQ ID NO: 396074 - DNA, 1014 bp, Cannabis indica
tttttttttttaatgaaaatacctattattttttctattgtttttctatttatgtatattcttatgtaacttaaattaaatgacattttcatcagcaatccacaaagttatacacagtaaacacattatttaagaagactatacattcatgaattaataacatccaaaatataatttatttatgcacttttaagtggtgtactaataaagtaaatcattgtataagaataattttatatactcaaataaaaaattccatgtacaaatatgaaactattacaaaaaattttatttttagtcacaataaaatttgtgattaagtataaaataatatttttatgttgtgactaaaatgtccgtagctaaaagtattagtcacaaaaattacaattaatttattgtgactaaatgtatttttagccacaatacttatggctaaaactaaattaatgacaacttataactaaatattatattttagtcacaagtaatattttattgtgactaaaagtcacatttaatcacaaaaaatttatattgtgactaaaagattgtcactacaagtatctattttttgtagtgatatttttttatgagtatttatttattgatgacaactaaataaatttaactattaattttaaaaatattaaattattagattttgatcaattaacggacaatgaaacaaaatttgattttttttaataaagaaagatttgaatttatatgcataatttagctatttaattaaaaaaatattttttttacactatcaaaaatatatttatatgcaaaatatttaaatcaaactcaacttttttttatcttattttttttgccgaaaactttaactttttttttcagctgatggaacaacctagactatataattttaaagtgagagttttctaaggaaaattatagtaaatgaccccaaattatagggctatgttagtaaatgttcttatttcaaaacttgtaataaaatacccttttagattatttattatt

SEQ ID NO: 396075 - DNA, 579 bp, Cannabis indica
gagagagagagagagtgaaacagagaataaaaaatttaatatacaggtttaaaatggctgaacaaagagagaccctaaaggttccgaatggtgcgtcctctgctggtggatctcgtcctccgcctgtcatcgtcatggctgagaaaagatgaagaaatatgtgtttgtggttgttgtaaagagaagagagtagaagaattctcataagaaccctagaacccaacccaaaaaaaaaggaagaagaagagagaggagaagaataaaccttgtgtggcgtaattaagagagaggagaagtaagttttttttttttttgaaggaagagagagaggagaagaagttgaaatgttaaaaagttgaaaagttgaatttttgagaaagagagggctgcgtgtatgtattgtgtttagggattagaaaaattcattttattattatagtttattatttaattttttatattggttaataaatgtattaattgattgggaattgtcattgattaagaaagagagagtattggcgtgaataactatgatttatcattactatatatattttttattttttatttatttat

SEQ ID NO: 396076 - DNA, 792 bp, Cannabis indica
aaagggaatataaagaccaattataatgtcacaagtggccctaatattggagccaaaggaaacacacataacacaattcttacaacccttaaaaataataaaatagtcattaacaaacactaaaatagggattaacattaaggagcaagtaatcaattttcttaacaattagtaggatttgcaatgcctcccctttaaaggcatagtatgctacaaacctacagtatcaagatgctatcataaaatatatataaatctatttcatgatttgaaaactaatacaacgtggaccttatattataattgacttgtccaatcttaaatctattttatcattttcttatgtagtatgtaataatgtaaaatatcgaacatttgaacaccataaaaataagggaacattcaaaaaaattagagggaaaatttataaaaatactatgatacagtgtttttaacattgtattgtaccaacattgaaaaaatagttccttcaagaaaaaaaaaaaaaaaacattgaaaaatagtgtttaaaattttcaaaaatataaatatattgtgtttcagtaaaatacaaaaaaataaagtcataaacaactaaaaaaaactctagaacaacttaacaaacaacatgaaaacaactataaaataacacaaatataactacaaagcaatagaaaagtaataaagcattgacctaattacaataagtaaaataatatcaagtcctcaatatgtttttgtattacaatttttttttacttagttttgtttgacagtcaatagtcccgtgat

SEQ ID NO: 396077 - DNA, 645 bp, Cannabis indica
tataacatctcatagtaaaaatagtagaccataggcaatctcttactagacggttaaattaattttaaaaaaaaaaaaaaaaaagataaaatatttttattagatattatggtgtctaatattactataagataaatgtagtttaatgatattttatattttattaaagtaacaataatagaataatagtgtacacataaattacatacaaatatgttacacacttatgtggctagtcatttttaataagtgagatccatcttatcgatcttaatatcaatgattagttgttacttgtcacataagtttgtgtcaagtttacgattaaattgttgacgctaaaaaaatggtcaacttcgtattgtctgataaacgatagaagtaaatagaaaataaagaaaagtaaaaggaacactacaatttatagtagtttattctctatgtcgtgatgattatgaagctacgtctaggagtgttcataaaatatttgactcaatctaattcgcacgatcatatccaattcaatttgcaaagtgcggattggatgttaattgacatgtaaaagtaattgatttaatccaatcaacacatatttacaaaaaaaaaaattaaaattatatacacaattaaaatgtaaagaaaata

SEQ ID NO: 396078 - DNA, 1348 bp, Cannabis indica
ccaggcaaactgatcctgatttttccttcaaaaaacttatagttgctattttaatattcatctaggttcctcccaaatgaatactacactttctgggatttctttgatctagaacaaccacttccaattcctcggttggtttcaataaattctgttcatcttgaattcgaggatcaagatcctcatcctgcttattgccttcatcggtcatgactaccattagctggtgaccggcctagctcgatgcagtagcactcccgagcgagaagttggtcacctctcaccaactcttacacatgttggtgtctgaaactttatggataagtgcttaattgaactaattgcccctagtccaattaacgttgttcgacccagcagtgcgttgtaggctaatggtaggtcgccaactagaaagtcttgcatgatagcggtggataaaggtgcttcactcatagtgaatgggagctgaattattccttgactggcgacattgtcgcctgtaaatccatatagatttaccatgcaaggttttaattttgctttttctatcctcattttcttcaatgtatccctataaaggatattcactgaacttccattgtccaccagcaccctttttatccttttctgggaaagatggatggtaatcactagtcggtcgacatcagggtatctcacatgcttcacatcctcttctgaaaacgcaattggaggttcctcactcttacctttcttagaagattctggagcaaaaatagactgctcgtttttaacttccttcactatcttttttggacattgttactttctccagcgagatgtagccctccagagataaccagaatgtcctctccttcaagaggaggaagttgtagtccctggttgcctgggttattaggcggatttggttggttatttccatcgccttgtcttgtcagatactaccaaaagtaacctcgcgagataagactttctatctcgtcttttagttgacaacattcttctgtcgtatgcccaatgtccttgtgatacttataaaatttggttggatctctcttgtgtctcgcattcctcatgggctcaagattatagaatgcgaccatcggcttaagtgcgagatagatattttcccgagtgtcatttagctcggtataaatagtgtagattagcatggacttgtccagcttcttttattttttcttgtccttggctgattccttagagtgatctttcctcttagagcctcctggattgtcagccttcgtccatacggtacttatcgagacaatgataggtttacttcccgagccagtctttaataagttcatctctttcttgctttcttttc

SEQ ID NO: 396079 - DNA, 537 bp, Cannabis indica
ttaccttacctaaaactaaattacaagtaagttttagtttttttttttttttttttaaaaaaaaatagttatgagattcacctaattaattttgaaaatttttaaataaacaaagttcaaaatagttccttttacaagtgtataaaaaatgcacttatataacaaattatttgaattttaatttcttagaactataacatatttaaaattttttaaaaattgattgaagactcactatcactataatataaacactatcataaaaaaaattcgaagtatatttttgagagactgatgtatcagtacatgttaagaatcatgaggtttcatttaaaaccaatggtaatgtaatgagtataaatcgtggatcttatatattctattatcttttaacacattagcaatgtgagactctctaacatcccccttaagatggtagttatttttttgcttaacatcttgaacagctcgatcacaagcaactcttttttttggctcactatcttcgaatcacaagtgactcttttgactctactt

SEQ ID NO: 396080 - DNA, 782 bp, Cannabis indica
ctctacttttataagcaacaaaagtaatagatatactttgacatgagaataaactcattttggtaccactcatttttgttttttttttaacttttcttgattgtgctcactttccattgtttgtgtatgcattgataatattctcttaacaccagtacagttttgttttagacctattgttatgaacttctaatgtctgcttactttcttcatttttattttgttaggtcgcaggtagatttgagatcacaaatcattcgttaaatttccacactcaaggtactccatttagtacttttttctagttactttttaccatgacaaatgggtgtcttgtgaaattttttaatgttaaaccatgaccttgtttgggacgagagtccttaaaatggatgctgacccaaatcaaaatgggatttttgaatatgatttgaacttgaacttgaatttggcaggtggagaatggagggtggctttccccaatattggctttcagtaattttcaaaaattttcctttttgaccaaaattagattctttttcaaccaaaactaaactacatagcttaccttagcatagcgtagctttgttatattaattaatcatatcacatgttttatatatatatatatatgaaacacttctcgatgggtattactcatgaattgttactaaacaaatttaactataaatattaattttaaaaatattaaaccatcattttgatctaatgacgaataattaaattacaaatttgaatttctatgcttaatttaactactt

SEQ ID NO: 396081 - DNA, 758 bp, Cannabis indica
ttatagaaaaataattttttaataatgtgttaaatcttttgctaaaacttgtattgaatttcgtagaagatataatattgaaaatactttaatacatttttttttattaatatgtattgttattaactattttttttaaatatttaaattggaaattcgagacaaaaatactattttattaggtttgttgttcttgatctcgcttttagctaacgacagtaaatctttataataagcgataaatgatataattcatatatgatatgaaaagataaataaagaacacaaagtttttaaagaggttcagcactgagcagttcggtaataggctactacccttaatttgtattgacttaagaacgaagaatacaatattttctctcttaaagctcttacaatgaaatctctgagtttgctctcttagatttctctcaagtaattctttcgacccctttttcagtgtgaatggatcactatttatagggctacatgtttgagggatccttttgcttacaatatctataattggttaggatacatattacatatttaaaatacacagattgtgggatttggacaatttgccatattgatgcgtgtcgtaagccacaacaatttactatttctttaattccaatacttccaattattttagtataatcgtaagtaagggtcgatcccacgaggactatgtttattcaattattcaaaaattagtaacaaaaattagaaaaaagggagttttgatgatcagaata

SEQ ID NO: 396082 - DNA, 1134 bp, Cannabis indica
aattaggtttaattagtgtatattttagtataatagctagtcattaactttgtctttagtttgagattaattttttttcctacgcaacacacacagttttctacttattattattttcctaaaccaaaatgattgttgaagctagcattaatgtggtccaccaattccttgggttgaatcaaaaaatataattataattggattctaatattaatgtgtgtggttctcttgttaactcatcaagtctcatataaaaataatggggtccattttcttgcttagctacacccttgtttaaagtttggtgggtcagattaagatcaaattctcttctcttctcaccttaaaacacccattaacttaatttaatctttgtttaaagagaaaataatatatttttttttttttgtagtataattaaaattagttgatggcttacgtaggtacgtaagagattgtggatcttgaaactgttgatgagggctgatgtaataaccatatataaataaagacgtagtgttaatttaacagcaggttatatatagtttttcatctcaaattatactattaataatctccaaagattaatgttgttgttatatattattataactttggtaagattactatttgtactttaattgatttgactatattacacaattaatggtcaggagatatttttcaatgaacttctgaaattggaatgctgtgaatttataattgttttatttaattattatgcgatagcacaaattaataattttaggactcgtttggaatgtaagtcgtattatattatattatattatattatattatattatattgaattgtattttatgtattatttttatgtaaaactatatgtggtattaacttttatggacacctaaatatataatattttataataaaatttaacatagtattatataaaaatatgatatataatccaattcaatataatacaatacgacctaatacaacattctaaatgaaccagattgaagtattatttaacaatgttataatttcttttaatatatatctattctatataaattgtggctatataacagaattcttagtttatgagaaattattgggtgactttttctttaaataaaaaaa

SEQ ID NO: 396083 - DNA, 548 bp, Cannabis indica
atcttactctcttttttttttgttttcattttcatatttttgggtccctcgtggtgctcttggcatggctcttatctgagatttattttccttttttgcatatccaagcaaacccaaaaatattttgttgtttctagttgtatatctcagatctgaaatcgaagatctagactgggtttgatcgcatatatatatatgatatttttaatttgtttttttagatgtatctgtgtaaaatcgacgcaaatgtgtgagaaaatattcatattttatctttttgtgttgttttaaaaccaacagcgccactttagaagtgtaagttgagaactgaggcaaatgctcaagcaaatacgtcagtagaatatacactggttcaagcaattggtagatatgtcgaatctgaaccaatggaataggacgttttcatagtagtgcaatatactttccaacagtgttaagtttgttagattcagttgttgagttggttagaaacagaatttggttagttaatagttagttgtaggttcaagttagttatgccagctgta

SEQ ID NO: 396084 - DNA, 1579 bp, Cannabis indica
tgtttgtagttttatgactagttggattttcttgtctttctaccacatgacccctcaaatcaaattcttaattttggatgttcttccaggcctatctctgatgtttccagcaatatccttgttgaagtaggaacttcaagctttccacttcacaaggtgatgaaaaatatggatttgttctgtctagaaaatgactgtttagtatcaagcataataatttcaagtaaaaatatgcttacctatgtaataaatatataaatatatatttttttaatcaaactactaactgcaagttgtataattgcatactagcagtgagtcttctaaaagtttgacttaaattaaaatgttgtttgccccagttataagttctcagttggtatggcagttgcatctgtcatttattatgttgagaaatgaaattgctctctaatgattgaatattaattcaggtaattgtcaaagtacattttgtggcttgttgctttgtaacaattggaaactatatgatcttagggtcagcctcaattgagttgacttttttcatttcactgctttcaacatttcattgctctctaaattcaaatttattagatttatttttatttatttgttttttacagcaacatgtaattagttagctgattgattatgtattacacgcccaatgaagtctttcatggttggaagaagtttcatattctttccactttgcttttagctttatactttacaaaaattcaaataatccgcgtcaccaaatctaaataagcttaattcaaaatattcacctacaattaactaaaaagcatccaaaaacaatgaggaattttcttattgctgcctgcataataaaattgccactataggccacagtttaaaaccgtgcctataccactataggtgacggtttaaaaccgtggcctatagtataggctacggttttaaacaatagcctaaactataggccacggttttaaaccgtcgcctatagtgttcactataggtgacggtttaaaaccgtggcccatgctattttcctgactgtttttaaccgtcgcctattctacctagtatttgcgacgctcgtataggcgacggttttatggactgtcgagaattctttacccgacaatgtaaaactgacgggaattaagggttttttagtagtgaatctacaactgtacaaaaatttcttaagataaactcgatctgtagcatcaaaaatagattctgacgcaccaaatctaaccagaaaaggaaacttgccataaacgggtctgatcttgtattgggtcttgatacctgctagaaacagggaatatgatatgatataatcaagacgaaatcgaacttaacaaggaaaatgataaagatcaaagtttccttgaaaacctaactttccataagagaatcgcttctcttacaagaagtttccatacaagaaaaattcagctgaaaaatgcatctttcctaacatagaaaagagcaataaaaatcgaataaacaaggtaagaaaatcggttatgaatgcaataaatcttaccataaagtaaaaaatattttggcatctaacttg

SEQ ID NO: 396085 - DNA, 1126 bp, Cannabis indica
gtgctctgccttcttcttcaacttaaatatacaaaaaagtaaaaaaaactttctgtattcttttctattctttttttttctacattaattcctccttttttttttccacttcctctcctcttattgtctcctaatgtttttgtctctagttactagttaaattattattactaaatatcaatattaaaggacaattcacttcaaacacttgaatttcttcgtctccattgtttttttctttggtattatactatatataccatattgtattaatgaatgagtagttaagtagacttaatataatttttaaagagaaaaacaagtttgattttgcatgcatggggtggggagttgcatattgagaagcttttaaaagaacacgtttcttatttaatgataaattaagagatttttaattatatgtattacttttttgctggcgtggaagtcaccaaagctctccatatatccagtgtagtgtagtagtatattaatattgataataatactgtataattattaaaatatttgttgcataataatgtatgactatgtcaaccattaaaaaaaaacttgaagaattattaatacatacataaaacactaacatgcacgtgattatgaatgaatgcctatctaataagttggggaagtagaaatgatttttttatttatatatatatataaatatattcattaataaaaaataatcttatataatattttattaaaatacacatactttcttattcaatgtactctcattttattttttacttaagtctaacatataatttatattaattaaagaatctagtaaagacatcatctaaaaaattattatatcttaaaaaatataaaaataaaagtaaaaattaaaacaataataaaataatataagtatataatgtaatttcctctaataagttaatgtattttctatctaccagagtcgaatccagctacagctaggcttatctagtatatctagaagctcaaaaaatatatatatatttctattaaaaatataggggtaagttgaaaaatagtacttttattaatcaattaatcaaatttacttttaattttatatttaattgaaacatacatctttttatatgtattg

SEQ ID NO: 396086 - DNA, 714 bp, Cannabis indica
taacaactatttattcatcgacctaaaaattaaaaaaaaaaaaaaaaaaaaggaagctaatcgaattgcttcttttgttgatacacgcgtgtggtaccttggtgaatgattatgatgaggtagtttaccattatttaaaccacttcaaaagctttataggcagtccaagttcgacctctatgagtaacaacgagtgtttgactatgggtgctactctgagtagtgatcaacagatttagttgattaagctttttactagcctcgatgttaagaaaaccttatttaatattcaagagttgaaaagttcaggtcttgatgggtttagttcaaaaaaatttgaagtgttataagctgacattgatcaggaaattttcaagaatgttgttgtaattccagcggaaataactttgaggattcaatcataaacctgcaataatctaaacacgtgaacagtaataatgaacataaaccaattaatcaacacaatgaatcaaacctgaaatcaaacaaagaacaacacaagattttatcctggttccggtcctagagatcaacatgatccctggccatactccagctgagaaaaatcaccaattcttcattaatatgtgaataagagagcagcaatacaattacaataaccagagcaatcatagctcagatggcactcgacacacaccagagaaaacagtcacagttttctctctatcaacc

SEQ ID NO: 396087 - DNA, 928 bp, Cannabis indica
accgtttttaaatggagatcttgaagaggaagtttatatgactcaacccctggtttcgttgacctcaatttccaaacaaagtctacaaacttaagaaagctttatatggtttaaagcaggcacctagggcctagttttccaaactttccaaagccttaactcagtttggatttcagtcatcaaaaacagacacttctctcttcatcaaagttgacccaaacaatgatatctacatacttgtttatgtcgataacataatcataattggtagcaatgacactcaagtatctcacctgatctcaaatctccactcaacctttgccttaaaagaccttggagaactcagttattttcttggaattcaggttactcactcggattctggtattcatttgtctcaaaagaaatatctccaagatctgctatgtcgaaccaagatgcaatgtgctaaaaccagctcaacaccaatgactaatggcctaaaactgtctcaattttgcagtgatcggattcttgacccttcactctacagatttgtagttggggcacttcaatatgcaacaattactcggccagatattgcatattcagtcaataaagtgtcttaattcatgcaatcaccccttgagtcccattggattgcagtaaagaggatacttcgatatttagcagggtctcttaatcacggttttcacatatcaaaatgcaccagtttttacatcgaagcattttgtgatgctgattgggcatcagaccccgatgatagaaggtctacaagtggctactgtgttcttcttggatcaaaccttgttgcatggaaaacgaagaagcagcaaactatatcccggtcttcaaccgaagcagaatttcaaagtcttgctgctgtagttactaacattacttggcttcaatccttacttactgaact

SEQ ID NO: 396088 - DNA, 710 bp, Cannabis indica
caaaaagagaatttatcggtttttttcttagcatttttagatagctataatttttaatattttatatataattatagcaagtaaatttaattaattttttttaagagtgattaagttatgattgcaaaattaaagtataaacattttattgcgcgcatggttttttttttttctttacttatgtaaaacatattttttttaatatttgaaactcatgtaaaccatattgtgtttgtttgaagtgacctgatctaatattgtagaagcttaactatggaaaaagcaaaggcacattttcaaagaaaaagtctaacagagaagttgccaaaaaaaaggtccctccctcaaacaaaatggtgtaaaaaaaaaccattttcagtttagacatgagatagttgaaccaatctatggatagaggttttgttagagcatcaacttgatcgaaagaagtctgacaaaataaagaatttgaagatcaattttaatgtgtttacacctagaatgaaacacaagattaagctaacactttgttatcaacccatataacttgacactcaggaaggagaaacttaaaactcagttaagagagatacaagccatttgatttttgcaaatgttttgattcagaattattatggatttggttgcacattttgattcagagttgcatcaaatagctgttaaaactgttgttctgaatggagaattga

SEQ ID NO: 396089 - DNA, 768 bp, Cannabis indica
cccttactttctctctccctctcaacgatttgtttcctaccctctctcctcaagtctctttcttcctccagatctgaaaagatcccaacattcaacactattactcagacggtggtatttcaagcgagatgggaaaaatgaaatggtggctattgttgtgtccataggtgggcgagaggaatgaaagagagtgagagagatgaggggagtgctatgcgaatggctgggcatgatgacgttttaggcgagagaaagtggtggagatccagagagctaaacggagttgaaggggtaccgtggctcaggcgagatagggtggtgggggtgaagctcatcgggaagtgggtcaaccgagatggaatgggtagggatggagttttgggcgagaaaaaaatgaacaataggtggctggaatttgggcaaaactgaggtcgattggggcagctatggaggttgagtgtggatttctttggatgtctctttttctttaatttggtttttgttttcttgagattgaatgttttgttttgggttaaatattatatatggttagaattagatttagaatttttgatttggattattttgattctgttatgtattattagattttgttctaggttttggattttatataaacatggtggattttgttctgggtttttcgatgttgatagttgtgttttagatttgtgatatttgggtttgatttttgtgaaaagtttagattttttttttttatgtatatatgattcagatgggtggtgg

SEQ ID NO: 396090 - DNA, 818 bp, Cannabis indica
aattttgatatatatatataacacaccgacaaaacatgcataagtccaccgaattcaagaagagttaaggaataaagccaaacttacaagaaaaatgaactgtagcattttaagctttttttacaatgagtaaatgaaattaaaatagaaaaaagaacaaatatgtaaaatatcatggataatacaatactaaattcagtctagtatttatccttattattaatagcttgaacaagacgaatacagtctgagaaaacagtaatgaagttgtatcccaaacggcagcacaacatcaacccacttaagagagttgatgcctccactacatgaggatgaaaggaagctgccattactggattacttgaagaacacaaaatcaccatgtcacggtctatcatcaccgcctcaagacccatacaaccatggtcctcattgatacccatatccacaaatagattaaaattacataacctcaaagtctcagtcgagccactagagagcccaaccatagtctccgtcagcttcacatgagcagttggattcaaatagattgagcatcttgataacgcctaagaaaactcaaagtgtaaagacaacctaagtttaatattttagattattaaataattaggatttatttatgtgatttaattattgtgtatgattttatattgtggagatttatttagattcaatatatatctataatactatttatgtgaatttctcgttattctgtaattgtgtttggtagcgctggaacgcgatgttggaccattagagagtcacgctttcatatggtttagaatgttatagat

SEQ ID NO: 396091 - DNA, 766 bp, Cannabis indica
gaaagaatattcatttgcaaatttcagagaagtaatattagagtatacaatgtggacaaaggctggaaagtgcagaaaacattgttgtcacaggtttgtgatggactattaccgatacatctctttcctcagatcaacgttatctggtaagttgtatatcatttgtactttatgtataattggtgtttttgctcttcataattttaaaatgccttttgtcttatacattagatttatggtttctgggaattaggacaaaattattggtaacagaattttgatttttcattctacatggctcaacttttgcatactttttgctgcgtttagtaaattccttttgttcacatatcttttagtaatttgaggatttttctccaggacttatctttaatctaacggacttatgttttagtattataggtttatgccagtatgtcacctattgtccatattattaacggggtatgttgaaatggagtcactagctaacgttactgtatgaaatgatttataatttatttggacaatgatattctaatttgtcacgtaaagaaaaatgagtgtttatgtcattatctctgttcttggaaaattacctttccttaaatatacttatgaaaatgtgacaaggtttgacacattcattcacagcttatctaaatgttgatccatttacaggtgaggaaactttcataaaatataatttttagttggcaagtcttctctttgctcattaccaagttcctaatgcaggagagatgtt

SEQ ID NO: 396092 - DNA, 1146 bp, Cannabis indica
tgagcaacagacttaagtaagaaaaagcaatataaacaaaataatataataccgacgtttgatgtaggcactcatacacctatctataggacttacagataagtagaatgtagtacgaccattataccacatgcactacgtactgatactgtacgagtgttggtagggtttgttttcgtatcctagtaccactaagtgttgtaccacacacactccgtaactgtccgtactagtgctggtaacaccgtaatgtacactttacatatcgtacactataccaatgcactcaataccactaccgtactagtgttggtagtgtacgaatcacaacaagcatgcatatatatcacacatacatacattcacatatataatatgttctatgctattcttacctcatttctaaattcaagtgagttggccgaccggaatagaaaatttcgtgctgaatggatgccctagtcacattacataaacgggtaaaaaacacgccaaaaccctaatttgtgaaactcaaactcccaactaagggttctgctattggtaactaatataacattaccctaagtatcaaggaattaaccaaccaaggctctaaaaataacatgaatcgacaagacgaactgttcaggaaacctacccctgatctggttaactggttatacaagacctgccaaaccggttatccagtttgcaccaggtttccccaaaaatactaaaccttgccaaatcgtgtccaaaccataccaaactttctagaacacctataccaaccccaaataacatattctaagcaataaaaaccagaaatacacaaagaatcaaaaagtgtcatagatgaaccaagcttgagtttcaaactcaaccttgttcatcattcacccaaatcaacacaaccagctacaaataatcatattgaacttaaaaattaactcagaagttgaaccataaaccatcctaaccctaaccctaacagctaggggtatttataaaatagtcgatccaatccaatccaatccgtaaagtgtggatatctgcacttgtgcggattggatgttgattgacatgtaaaagtaaccgatccaatccaatccatacatatttataaaaaaattaaaaaattatatacacaaataacattttaat

SEQ ID NO: 396093 - DNA, 646 bp, Cannabis indica
tgatttacaagatcattaaaatttcaattatagaatgtaaatcaacatgaacacatgaatttacaaggttcacgtgcagtgaaaacatattccagtcaactactccttgagtcccctaaaaatcaaagtaaaataactccactattaaattaatgttatgtacattttttaattctaaaatcaaatcaacatattacattcatagagattataatttaccccaatacttgagtatctacgaaaaaaaatctgtttcatctcttaaaatcaaataatcaaatcacttaattcttcactcaagatctccttaaaatactatagctaaaattcctccaactataaatttgaactctcttcaaattaaacagtctccattttcactttattgcagaagtttgaactcttcaattaatggagaacctacaacaacaaagaagtaaaagaaaaaaaaattaaccctagcagagaaatatctatatcaaagactctaaatgaatgaatgctctaaaaaaaagactgaataaatgggagtcagataagatagttaaaaaaaaagtacatataactccaactctcacaaaccgacttcaatagcttatgacagttgtcaaatattgttaaaaaataaacctccacttacactgat

SEQ ID NO: 396094 - DNA, 1134 bp, Cannabis indica
ctttcagactctcatcagcttggtttggttcttccctttgtaacttcagcgagggaaatattttcagcaacattaaacttcgatttcttcttaacaaggtgacaatcacgtttttttgataggcggagcagagtctgaatcatcatcttcaacaacagaccgtttgcctttagatttgttggcaagagatttaacacctatttttgaaagttttttcaacaatggtgatggagaaaatgaagaccaagtaatggccatttataaaatagaaaaaagaagaaaaaaaaattaaaaaaaacgtagtcagatgatggaggaaggtagttgaggaagatggatgaaatcagtttttgttttttttttggatcaaaaatagttttgatcatgggagaaattttcaaacaagaaaactacaaagaaaaatgaaatgaagctaaaaaaaaaagaaaaaagaaagaaaaaagatgatagaaaatgaggaaaaatagatagtgtgtgaaagtggtataatgatatcatgcaaagaggtattggtgtaaataaaataaaataaaataaaaacaaaagtaaaaatataggagtagccttgtaaggctataaggataatatttttggatttttgtatttttcatataattttttttattattatttataaattttaaaatgtggaaacttaattcaaagtttacataaaggatgtgaatacaattcacctaactaatataggttcaaagcaaaaagtgaattcaatcttaaaaaaaaaagttgagcaaaaaataaaggaaaattacatgaaaaatacaaaaatccaaaaatattacttctatacccttacatgctactcttacatttttatctttgatattattttatttacactaatacctcttacacatgcatgatgtcgttgtacaacattcacacactatctattttccctcattttttattatcttttttcttttttcttttttttttccagtttcatttcatctttcattgtagctgtctgtttcaaaacttctcccatgataaaaaaccattttttaatccaaaaaaaattgatttcgtccatcttcctcaattgccttccttcatcatctgattctttttttttttttttccaatttt

SEQ ID NO: 396095 - DNA, 789 bp, Cannabis indica
aaattaatatgtatatatataatcagatctcttaaagtagtaataaataatgataataataataataataataataatcagatgaactctgatcatacaaaaaatttataatcaataattaatcagattaaatatagttggctgtttagttggattctgtacacttcttttctatctcctctgtctcatttctaatttccacaaactttttaaattttataaagtaaaaataataaaactaatagctaatttttgaacagatttaatcttcattaaggagcaattgcttaacataacaaacaataaattagccgaaagaaaatctttcgtaaccacacgatcaactaaccatcgagaatttttgacaacatatatacaattcaattcgcaaatcgcttgagaaaaactaaaaaaacattaacttaaacgcaaaacatataaaaattgtgcttcagatagcttctatcaccacaaaattattcgtttcaatcacagtaagcgtaaaatgatagagtttcaacttaactcctctttgatactcatagctaattagctaagaaaaaaatcatactttaattacatcaaactcaaatattaaaatactaactgattatatattaaaaagaatttttggaaaagtctctataaagattatagaaaaatatatataagtatattatatattaatatatgttgaaatcaaacttagtcaatgcaagttcaatatattatatattatattaatatataagtatagggcaagactatggtaggacctagcaaaagttc

SEQ ID NO: 396096 - DNA, 867 bp, Cannabis indica
ttttgaaaagtcaaactcaaaagtcaataaagttcatctatacaaaatatgctgtagatttttattattattattattactattattattattattattattattattattattattattattattattattattgttattattgctaagttaatttaagagtcgcaaaatattaaaccgggacaaacataagaaaaaagagaaaaagatgtacttgaaaaactacaataaaacattaaaattttgaataagcaacaacttaagcaaaaatagatatatttttaagtagaaaaatattagtccttcctgcttgaaaatcaagctgactatactagccttatatatactccatacactgactataaaatattactactaataaaatatttctatgattttttttaaaattgatattaaatgaaaataaagaagcagaaaaatgaaaggaagcagctaatagttaattgttgtcagtattatattaaaaaaaaaattataatacatatagtattaacatagcggggtaagttggagaatatatactcttttttttaatcaattaatcaaaaatacctacatattaaaatccattcaaatttacatacttttataagtttactattcaatttacccttacatatgttactttaggtggcgtttggtaacacttttttaatcggttttctgtttttaaaagtaaaaaagtgaaaatatttttaaaaaacatgttctataaaactgtttttacttctcaattttataattaaaaatcaaaattttaaaaaacaaaaaaaaaaaatcactctcaatattttttaaacagttttttttttttgtaatcaatcttttggattacgaccagacccg

SEQ ID NO: 396097 - DNA, 1357 bp, Cannabis indica
tttcgattctctctgttcttacaatgtttggtaagaaggaaagagagtaggatggatggagagtgtagaagaaatggggagtaggagggatggagataatatttgttttctttatgttgttaggtattagaagtatatgtggaacatagagatggaaagtgaaataaatattaaaatttattttattattttaatacaattatttattattttttaagggtagatttatataatttttttttgtctttttctagaatttccacatgttaggaggaattaaaaataatgtgtttggaaggagactctctccttccatctctcctctccattcttctctccctcttgccaaacaaaaagattcgccaaaccctctatctctctctccacccctttctctccctccttctctcctctttatcacacatagtataaatgttgaagttaagttacttaacttcagatcacttcgagttgaagcccctccttatagccatcatttgtgtcatgaggttgttgaaggactaaaaaagagcctcaaaccaatgcaatgtcacctatcatctttggcagcggcgttacacaaattgccactagcttttcttcttgcatcaatatttatttttatcaatccagatttcaattgggaccaatgaatagcctttctatcttgctttggagagcttgtttgatcaccagcaaagccaaaccagtagtttttgcaccagtcaaccatgtccctagcaggatgacttttttcccaaacttcattttatttcgtatgtgtcaaagttgccaagaaataaactaaaatcttcatcttcaagcccttcttgaatcttagaaataaaaatgagtggatcaatctccttgcagccttttataatcgacgaaaaacctgcctttttccgaaagattgagctggcagaatatctccataatgcatagcaaatatctgtaggatctccattcgaacatttaatggcacgtttactacacaatattcagaatcagtataaagtaatagagaaatgcaacggaataaatattgtaatatgatgtttactaaaactgtttggaaatagaattatagtgatttatcttgtttactttatcaggaaaagtaatcggaatgcttaaattgactaaattacccttttgagttaaactattgtatatgataattattttgtaagacatattttaaaggataaaattgtcattataaatttaatattaaaaaatagggatattggcggctaaaccacctgaattttacggtttgtaacacttaaccacaaaaatcgaaattttggcagcataactacctaaaccctggttccgttttgctctgcacacc

SEQ ID NO: 396098 - DNA, 1327 bp, Cannabis indica
ataatgattattaaaaattgagagctttgtaacgaattcataaaaagataattctataaaaaaaaaacttatcatagaatgtcaaattggtaaaaaatttatcagttttttttttgattgagcttttctaattattattgcattaagatttaagatactataccatacatgtatctagtcaaaccattgttgatttttatgtgttgaagtttttaaatataattaattaattaatcttaacgataaataattatatatattgtattagaaaatcgagattaatgaataaatcatgaataatttaatgttatgacgatattgaagttgtcgacataaaaacaaaagtcgctatgtctccaaatatattgagaaatatttgatgagtgaggaattaagaataaataaatcatattgacaataattagtaatttacaaaaaaaaaaaaatattataaattatagaaagaaaatataccattaaaaaatcaaggtcttgatgttgtagattgatgtcattgctatgctcattatggtattctaaacaacaaaagaaaaaatattttaaaaaaaaaaaatataagattagagaatgaaaaagatgaagaatgtatactctataaaattactaaagaaatgaaaaaaaaaatgaaagaaagaaagaaagagcagccaaagagataaaacatatataattttagggttatttagtagtgttgcttaattaatagaaaggatattttaagaatttcgatatgaaaaacacaaatttactatattgatttattaaatgtatattatatataattaaaatcaaatatgcatagattaataattttaaaaaaaattagaaaaaaaatataagagaaaatagataaatatttataaatttattaaaaaaaatttaaaaataagataaataatttttctaattatatacctaaatgtgaaaatttattaaaaaaaaatgagaaaattaaggataaaattaattgatgtattttaaattattttaccttaataaaaaaactaaaaaaataagaaaattaaggagagaataattagaagtgtttaaagtaattttaaagtgtcacatcaccgcctctgtaacaccctaactagcatagacgtgttgacgtgattttaaacgtactatgcagctcgttgctaatcaacgaggttaataaaaatcgtgattaattaaaattttgttatttaattaaaacttatatatatttcatacaaaatatttcaggatcccgattacaaaacactttacaaaagtttactagttctttacaaaatatttgtcgcccagcgactaactacaa

SEQ ID NO: 396099 - DNA, 866 bp, Cannabis indica
tgccactaattagagtttttggtatagtgccactttatgctccattgttgttgttgtggttttcattagaagagtgtttaagagtttgtatagtgagatatatatggttacgatgaagaagaagcaaagaaaaatattcatatatgttagagaagagattgtggaaatctatatgatgcgtgtgtatatatatatatatataatatagtgagtcaattcaatacagatcagtagtaaaacaatagtaagagacaaaactaagccaattaatgcattgaagagtcattatatgaaaatggtatgcaattagggttaagaagaaagataacaatgacttaccctaaattagaaatttgctcttttctatcttcatgcagagtaagattattagacaaaaaagaaaactaaggtaaagaacaataaaaacttacttgaaataataaaaatgggttgtaaaatgagcattaatgtcatacaaaaccctaattaattagataagaaattcaaatagcctttctccatcttcaattaggccgtagaccattaatgtcatcatacctgtcattttcatttctttcaaattttaaataaaataataagaaaagctatattttatttgagtcatatttaatcaattaatttaaaattacccacacaaagttttagtataaaaaaataaaaagaagttaatttaaaataacaagttaggacttattagaacagaaaacacaataattatttattgtgtatagttcttctcttctaaccaaacatttggttctatacgtacatatctataccacttaattaaaattgaataattataattaagaccaaaaatcaaaatcaattgatacacaataaat

SEQ ID NO: 396100 - DNA, 1363 bp, Cannabis indica
caagcttcccaaaaaattttgtaaaaaatattagtgtgtacaaaattttggtggatgatgatgtgaagataaaaatacactggtgcaaatgagagaaattgtatcaccagaaagataatagtggaatggagttttgagattcacaacttttccatcaagccttattgattaaacaagttttgaggctttatcaagatccttcttccttggcggcttgggttttgaaaagtttgtatcatagaaatagatcttgacaattaagtctttcaaaagaggctattctgtttggaagaatattttatgggaaaatgaaatatataatgcagggcaatttggagagttggggatgatagaaatatttctatttatgaagacatacagttggattcctttggctgttggcttctctgtttagcttcgaatttgctcagagttggtagcacggtggattgtttggggtatgatttgggtggttgggatgtggatgtgattcatggtctttttttcgtaatgaagctttaggcattctttcgattccttagccagcaaattctttttgtgataaattgatttggggtcatgattctactgacttctattctgtcaagagtagttactggtttgctactaaatttttggagcgtgacaaaccttctacttctcaggggttttcgagatagtggaagaaactttagagtcttcatatacctcccaaaattgaaatgtttactaggcagatatcaaataattagattccatacaagtttaatttgaatatacattgtatatgcttactgatggcctttgtcctttatgcgacgcccaggaagagacttctcattatgctttgtggggacattcttctctttctcagttctaaaaaatttgtgagtttaacctcggagaccctttggttacttgtacttattttattagttttatctactattttttggatcctttgtcattttctcaagtgaagttagcccttgttatcatgtggagagtttggtataggagaaataaaatggtacataataatactttaatgtcccttaagttggtggtcagttgggctcatgatttttttgagtgattaccaaaagcctcttttggagactaaagagattagttgttagagatcttctgggcaagtcgtggctaattcgtctcctcctattgtgtcacgttgggcacttcctttggtggcctttttcaaagtcaacatgtgacagtcagtagtcccgtgatccgtaaggagaaacactaggtaagatgtgcaatcccacatcgcctggggaaggtcaagtgtgatgatttggagactgtgtaggtatgggactacatagttgaagagagctta

SEQ ID NO: 396101 - DNA, 677 bp, Cannabis indica
taggacccactctttttgggggcccaaaataaaaaaaaaattattagacttttatttaagtaaaattaagtacattgtaaacaacgaagagtcatagcttagttagttgaggtgtatgacatattatttaatgtcgtaggttcgaattgcataacactcggccctgctttttcttttctcacaattaatacttattcaaaaaatattacaacttaacaaatataaataaacaaataaagaaataaataatttgagttaaattccaacacttttactatcttcccatctccaacaacatctatcttgacgcgtaaagtgggagacggatcaacatcatccatgacagcgtcccactcacgaccctgcgggaaattgttaacccatgtttactagttatgagcaaagcgttttcattgatcgtctatgttatctctttatctctcgtcattatgataaatatataactcacttttaccctatatataaatatatatatatttatatgactcactttattcaaagtcaatgaagcttttacaataatctaagttgttcttttctgcctattttggtcaactacaaagatgattgatcatacgaactcaaaataaataaataaataaacatcgttcggatatcatatataccactcacaattttcaataataataataata

SEQ ID NO: 396102 - DNA, 1254 bp, Cannabis indica
cctgtgttaactttaccggtcagtgatggaaagttcatgatttattgtgatgcatccaaacaggggttaagctgtgttcttatgcagtcagggaatgtgattgcttatgcttacaggcaactaaaacagtatgagcagcgatatcctactcatgacattgaattggcaacagttgtttttgcacagaaagtctgtcatcattatctttatggtgaaaagtgggagatctacaccgatcataaaagcctcaaatactttttcacatagaaggaataaaatatgaggcaacgatgatggttagaactggtcaaagattatgacagcgagattctctaccaccatgggaaaggaaatgtggtggtgaatgctctaagtcaaaagggcccaaggaaagtttatgaattaaagaagatttcagcagagctggctgaagatatgactagagcgggaattgaatttgtgattggaaaacttgccaatattaccctgcagtctgatttgctggaaagaattaaaatggcccaacaaggttattctgagttacaagggtacagaggaaaattagaagctagtatagcaaaggacttttcactctcatctgatgggctactatgatacaagagcaaagtttgtgtaccggtagataaaagtatcagacaggagattcttgatgagtctcataccacaccgtaatccttacacccgggaacaaccaaaatgtatcatgatgtgaaagttctatattggtggccaagtatgaagagagatatcgtcgaatatgtgtcaagatgcttaacctatgagcaaattaaagcaaaacatcaaaggtcggcaagtttgctttagcctctgaaaattcccgagtggaaatgggaagacatcaccatggattttgtggtgggattgccaagaacagtagtgtattatgactctatttaggtaattgtggatcgataaaaacgaagtcttctcactttttaccagtgcggacaacgtatacggtggaacagtatgctgatttatatatcaaagagatagtttggcttcatggtgccccaaaatcaatagtttcagatcgagatctaaaatttacatccaagttctgggaaatcttacagcgagcaataggtaccaagataaattttagtacaactttttatcctcaaattgatggtcaatttaagaggactatttgaatacttgaggatatgctgagggcatgtataatggactttgaaggttcttggaacaagt
